United States Patent Application Publication US 2020/0163878 A1 - sequence listing, part 35

SEQ ID NO: 129960 - RNA, 1698 nt, Artificial Sequence
  derived and/or modified CDS sequence (opt3) from hemagglutinin__InfluenzaA__ABV29678
augaaggugaaacugcucauccuucugugcaccuucacagccacuuacgcugacacgauuuguauaggcuaucacgcaaacaauagcaccgauacagucgacacuguuuuggagaagaacgugaccguaacacauuccgugaauuuacuggaagauucucacaacgggaaacuaugccuccugaagggaaucgcgccccuucagcuggguaauuguucagucgccggcuggauuuuggggaacccugagugcgaacuccugaucaguaaagagagcugguccuacauuguggaaaccccaaauccggagaacggaacuuguuaucccggcuacuuugcugacuaugaggaacugagagagcaacucucuucgguuagcucauucgaaagguuugagaucuucccuaaggagaguuccuggccaaaucauacagugaccggugucucugccagcugcucccacaacgggaagucaaguuuuuaccggaauuuacuguggcuuacgggcaaaaacggauuguaucccaaucugagcaagucuuacgcaaacaauaaagaaaaggaggugcuaguacucuggggcguucaucacccuccaaacauaggggaucagcgcgcccuguaccacacugaaaacgcuuauguguccgucgugucaagccauuacagucgacguuucacccccgagaucgcaaaaagaccuaaggugagggaccaggaaggacggauuaauuauuacuggacacuucuggagccaggugauacuaucauuuuugaggccaacggcaauuugaucgcuccgcgcuucgccuuugcgcucucuagaggguucggauccggcauaauuaccagcaacgcacccgucgacgaaugugaugccaagugccagacaccucaaggugcuaucaauucgucucugccauuucagaacguucaccccgugaccauuggggaguguccuaaauauguaagguccacgaaguuacggauggugacuggacugcgcaauaucccaucaauccagagucgaggccucuucggcgccauugcaggguuuauagaaggagguuggacaggcauggucgacgggugguacggauaucaucaccagaacgagcaaggcagcgguuacgcugccgaucagaaauccacccagaaugcgaucaacgggauuacuaauaaggugaacucuguuaucgaaaagaugaauacacaguucaccgccgugggcaaagaguucaacaaacuugagagaaggauggaaaaucugaacaagaaggucgacgauggauuuuuggacauauggacguacaacgcagagcuacuggugcuccuggaaaaugagcggacccuugacuuccacgauagcaacguuaaaaaucuguaugaaaagguaaaaucacaauugaagaacaaugcuaaagagauuggcaacgggugcuuugaguucuaccauaaguguaaugacgaaugcauggagagugugaagaacggaacauaugauuaccccaaauauuccgaagagagcaagcucaaucgugagaaaaucgacggugucaagcuggaaucuaugggcguguaccagaucuuagccauuuauucaacugucgcuaguagccuggugcuacucguuucccugggggccaucucuuuuuggaugugcucgaacggaagccuucagugucgcauuugcauauga

SEQ ID NO: 129961 - RNA, 1698 nt, Artificial Sequence
  derived and/or modified CDS sequence (opt3) from hemagglutinin__InfluenzaA__ABV29689
augaaggugaaacugcucguccuucugugcaccuucacagccacuuacgcugacacgaucuguauuggcuaucacgcaaacaauagcaccgauacaguugacacuguguuggagaagaacguaaccgugacacauuccgucaauuuacuggaagauucucacaacgggaaacuaugccuccugaagggaauagcgccccuucagcuggguaauuguucaguggccggcuggaucuuggggaacccugagugcgaacuccugauuaguaaagagagcugguccuacaucguugaaaccccaaauccggagaacggaacuuguuaucccggcuacuuugcugacuaugaggaacugagagagcaacucucuucggugagcucauucgaaagguuugagauuuucccuaaggagaguuccuggccaaaucauacagucaccggugugucugccagcugcucccacaacgggaagucaaguuuuuaccggaauuuacuguggcuuacgggcaaaaacggauuguaucccaaucugagcaagucuuacgcaaacaauaaagaaaaggagguucuaguacucuggggcgugcaucacccuccaaacaucggggaucagcgcgcccuguaccacacugaaaacgcuuaugucuccguggugucaagccauuacagucgacguuucacccccgagauagcaaaaagaccuaaggucagggaccaggaaggacggaucaauuauuacuggacacuucuggagccaggugauacuauuaucuuugaggccaacggcaauuugauugcuccgcgcuucgccuuugcgcucucuagaggguucggauccggcaucauaaccagcaacgcacccauggacgaaugugaugccaagugccagacaccucaaggugcuauuaauucgucucugccauuucagaacguucaccccgugaccaucggggaguguccuaaauauguaagguccacgaaguuacggauggugacuggacugcgcaauauuccaucaauccagagucgaggccucuucggcgccaucgcaggguuuauugaaggagguuggauaggcauggucgacgggugguacggauaucaucaccagaacgagcaaggcagcgguuacgcugccgaucagaaauccacacagaaugcgaucaacgggauuaccaauaaggugaacucuguuaucgaaaagaugaauacucaguucacagccgugggcaaagaguucaacaaacuugagagaaggauggaaaaucugaacaagaaggucgacgauggauuuuuggacauauggaccuacaacgcagagcuacuggugcuccuggaaaaugagcggacgcuugacuuccacgauagcaacguuaaaaaucuguaugaaaagguaaaaucacaauugaagaacaaugcuaaagagauuggcaacgggugcuuugaguucuaccauaaguguaaugacgaaugcauggagagugugaagaacggaaccuaugauuaccccaaauauuccgaagagagcaagcucaaucgugagaaaaucgacggugucaagcuggaaucuaugggcguguaccagaucuuagccauuuauucaacagucgcuaguagccuggugcuacucguuucccugggggccaucucuuuuuggaugugcucgaacggaagccuucagugucgcauuugcauauga

SEQ ID NO: 129962 - RNA, 1698 nt, Artificial Sequence
  derived and/or modified CDS sequence (opt3) from hemagglutinin__InfluenzaA__ABV29700
augaaggugaaacugcucguccuucugugcaccuucacagccacuuacgcugacacgaucuguauuggcuaucacgcaaacaauagcaccgauacaguugacacuguguuggagaagaacguaaccgugacacauuccgucaauuuacuggaagauucucacaacgggaaacuaugccuccugaagggaauagcgccccuucagcuggguaauuguucaguggccggcuggaucuuggggaacccugagugcgaacuccugauuaguaaagagagcugguccuacaucguugaaaccccaaauccggagaacggaacuuguuaucccggcuacuuugcugacuaugaggaacugagagagcaacucucuucggugagcucauucgaaagguuugagauuuucccuaaggagaguuccuggccaaaucauacagucaccggugugucugccagcugcucccacaacgggaagucaaguuuuuaccggaauuuacuguggcuuacgggcaaaaacggauuguaucccaaucugagcaagucuuacgcaaacaauaaagaaaaggagguucuaguacucuggggcgugcaucacccuccaaacaucggggaucagcgcgcccuguaccacacugaaaacgcuuaugucuccguggugucaagccauuacagucgacguuucacccccgagauagcaaaaagaccuaaggucagggaccaggaaggacggaucaauuauuacuggacacuucuggagccaggugauacuauuaucuuugaggccaacggcaauuugauugcuccgcgcuucgccuuugcgcucucuagaggguucggauccggcaucauaaccagcaacgcacccauggacgaaugugaugccaagugccagacaccucaaggugcuauuaauucgucucugccauuucagaacguucaccccgugaccaucggggaguguccuaaauauguaagguccacgaaguuacggauggugacuggacugcgcaauauuccaucaauccagagucgaggccucuucggcgccaucgcaggguuuauugaaggagguuggacaggcauggucgacgggugguacggauaucaucaccagaacgagcaaggcagcgguuacgcugccgaucagaaauccacccagaaugcgauaaacgggaucacuaauaaggugaacucuguuauugaaaagaugaauacacaguucaccgccgugggcaaagaguucaacaaacuugagagaaggauggaaaaucugaacaagaaggucgacgauggauuuuuggacaucuggacguacaacgcagagcuacuggugcuccuggaaaaugagcggacccuugacuuccacgauagcaacguuaaaaaucuguaugaaaagguaaaaucacaauugaagaacaaugcuaaagagauaggcaacgggugcuuugaguucuaccauaaguguaaugacgaaugcauggagagugugaagaacggaacauaugauuaccccaaauauuccgaagagagcaagcucaaucgugagaaaauugacggugucaagcuggaaucuaugggcguguaccagaucuuagccaucuauucaacugucgcuaguagccuggugcuacucguuucccugggggccauuucuuuuuggaugugcucgaacggaagccuucagugucgcaucugcauuuga

SEQ ID NO: 129963 - RNA, 1701 nt, Artificial Sequence
  derived and/or modified CDS sequence (opt3) from hemagglutinin__InfluenzaA__ABV29711
augaagaccaucauugcccugagcuacauacucugccuuguguucgcucagaaacugcccggcaacgacaauuccacagcaacuuuguguuuagggcaccaugccgucccuaacggaacgaucguuaagaccauuacaaaugaucaaaucgaggugacuaacgcgaccgaacugguacagucuucaaguacaggugagauuugcgacagcccacaccagauccuagauggcgaaaauuguacccucauagacgcucugcuuggggauccgcagugcgacggauuucaaaacaaaaagugggaucuguucguggagagauccaaagccuauucuaauuguuaccccuaugacgucccugauuacgcaucguugaggucacucguggccagcaguggcacucuggaauuuaacaaugaguccuucaacuggacagguguuacccagaaugggacgucuagcgcuugcauccggcgcuccaacaauucauuuuucagucgacugaacuggcucacucauuuaaaguuuaaguauccagcacugaaugugaccaugcccaacaacgagaaauucgacaaacuuuacauuuggggaguccaccauccuggcacagauaaugaccagaucuuuuuguaugcccaggcuagcggccguauuacugugucuaccaagagaucccaacagacaguaaucccaaacauagggucaaggccccggguucgcaauauuccuagcagaaucaguauuuacuggaccaucgugaagccaggagauauccugcuaauuaacucuacggguaaucucauagccccgaggggcuacuucaaaauccaguccggaaagagcucgauuaugcggucugacgcgcccaucgggaaguguaacuccgaaugcauaacuccuaauggcucaauuccaaacgacaaacccuuucagaaugucaaccgcaucacauauggugcauguccucgauacgugaagcaaaauacccugaaacuugccacugggaugagaaacgugccagagaagcagacaaggggaaucuucggcgcuauugccggcuuuaucgaaaaugggugggagggaauggucgaugguugguauggcuuccggcaccagaacagugaggggauuggacaagcagcugaccugaaaagcacccaggccgcgauagaucagaucaauggcaaguugaaccgucucauugguaaaacgaacgaaaaguuccaccagaucgagaaggaauuuuccgagguugaagggcgcauccaagaccuggagaaauacguggaggauaccaagauugacuuauggucuuauaaugccgaacugcucguagcacuugagaaccagcauacaauagaucugacugacagcgaaaugaauaaauuguucgagaagaccaaaaagcagcuaagagaaaacgcugaggauaugggcaauggaugcuuuaagaucuaccacaaaugugacaacgccugcauuggcucaaucaggaaugggacauaugaucaugacguguaccgggacgaggcucugaacaaucgauuccagauuaagggagucgaacucaaaagugguuacaaggauuggauccuguggauauccuuugccaucagcugcuuccuucuguguguggcauugcucggcuuuauuaugugggccugccaaaaagggaacauccgcuguaauauuugcaucuga

SEQ ID NO: 129964 - RNA, 1701 nt, Artificial Sequence
  derived and/or modified CDS sequence (opt3) from hemagglutinin__InfluenzaA__ABV29722
augaagaccaucauugcccugagcuacauacucugccuuguguucgcucagaaacugcccggcaacgacaauuccacagcaacuuuguguuuagggcaccaugccgucccuaacggaacgaucguuaagaccauuacaaaugaucaaaucgaggugacuaacgcgaccgaacugguacagucuucaaguacaggugagauuugcgacagcccacaccagauccuagauggcgaaaauuguacccucauagacgcucugcuuggggauccgcagugcgacggauuucaaaacaaaaagugggaucuguucguggagagauccaaagccuauucuaauuguuaccccuaugacgucccugauuacgcaucguugaggucacucguggccagcaguggcacucuggaauuuaacaaugaguccuucaacuggacagguguuacccagaaugggacgucuagcgcuugcauccggcgcuccaacaauucauuuuucagucgacugaacuggcucacucauuuaaaguuuaaguauccagcacugaaugugaccaugcccaacaacgagaaauucgacaaacuuuacauuuggggaguccaccauccuggcacagauaaugaccagaucuuuuuguaugcccaggcuagcggccguauuacugugucuaccaagagaucccaacagacaguaaucccaaacauagggucaaggccccggguucgcaauauuccuagcagaaucaguauuuacuggaccaucgugaagccaggagauauccugcuaauuaacucuacggguaaucucauagccccgaggggcuacuucaaaauccgguccggaaagagcucgauuaugcgcucugacgcgcccaucgggaaguguaacuccgaaugcauaacuccuaauggcucaauuccaaacgacaaacccuuucagaaugucaaccgaaucacauauggugcauguccuagauacgugaagcagaauacccugaaacuugccacugggaugaggaacgugccagagaagcaaacacggggaaucuucggcgcuauugccggcuuuaucgaaaaugggugggagggaauggucgaugguugguauggcuuccgucaccagaacagugaggggauuggacaggcagcugaccugaaaagcacccaagccgcgauagaucagaucaauggcaaguugaaccgccucauugguaaaacgaacgaaaaguuccaccagaucgagaaggaauuucuggagguugaagggagaauccaggacuuagagaaauacguggaggauaccaagauugaccugugguccuauaaugccgaacuccuuguagcacuggagaaccaacauacaauagauuugacugacucugaaaugaauaaacuauucgagaagaccaaaaagcagcugagggaaaacgcugaggauaugggcaauggaugcuuuaagaucuaccacaaaugugacaacgccugcauuggcagcauccggaaugggacauaugaucaugacguguaccgagacgaggcucucaacaaucgcuuccagauuaagggagucgaacugaaaucagguuacaaggauuggauccuuuggauaaguuuugccaucuccugcuuccuguuguguguggcacuccugggcuuuauuaugugggccugccagaaagggaacaucagauguaauauuugcaucuga

SEQ ID NO: 129965 - RNA, 1698 nt, Artificial Sequence
  derived and/or modified CDS sequence (opt3) from hemagglutinin__InfluenzaA__ABV29733
augaaggugaaacugcucguccuucugugcaccuucacagccacuuacgcugacacgaucuguauuggcuaucacgcaaacaauagcaccgauacaguugacacuguguuggagaagaacguaaccgugacacauuccgucaauuuacuggaagauucucacaacgggaaacuaugccuccugaagggaauagcgccccuucagcuggguaauuguucaguggccggcuggaucuuggggaacccugagugcgaacuccugauuaguaaagagagcugguccuacaucguugaaaccccaaauccggagaacggaacuuguuaucccggcuacuuugcugacuaugaggaacugagagagcaacucucuucggugagcucauucgaaagguuugagauuuucccuaaggagaguuccuggccaaaucauacagucaccggugugucugccagcugcucccacaacggggaaucaaguuuuuaccggaauuuacuguggcuuacgggaaagaacggcuuguaucccaaucugagcaaaucuuacgcaaacaauaaggagaaagaaguucuaguacucuggggcgugcaucacccuccaaacaucggggaucagcgcgcccuguaccacacugagaacgcuuaugucuccguggugucaagccauuacagucgacguuucacccccgaaauagcaaagagaccuaaagucagggaccaggagggacggaucaauuauuacuggacacuucuggagccaggugauacuauuaucuuugaagccaacggcaauuugauugcuccgcgcuucgccuuugcgcucucuagaggguucggauccggcaucauaaccagcaacgcacccauggacaagugugaugccaagugccagacaccucaaggugcuauuaauucgucucugccauuucagaacguucaccccgugaccaucggggaguguccuaaauauguaagguccacgaaguuacggauggugacuggacugcgcaauauuccaucaauccagagucgaggccucuucggcgccaucgcaggguuuauugaaggagguuggacaggcauggucgacgggugguacggauaucaucaccagaacgagcaaggcagcgguuacgcugccgaucagaaauccacccagaaugcgauaaacgggaucacuaauaaggugaacucuguuauugaaaagaugaauacacaguucaccgccgugggcaaagaguucaacaaacuugagagaaggauggaaaaucugaacaagaaggucgacgauggauuuuuggacaucuggacguacaacgcagagcuacuggugcuccuggaaaaugagcggacccuugacuuccacgauagcaacguuaaaaaucuguaugaaaagguaaaaucacaauugaagaacaaugcuaaagagauaggcaacgggugcuuugaguucuaccauaagugugacgaugaaugcauggagagugugaagaauggaacauaugacuaccccaaauauuccgaagagagcaagcucaaccgugagaaaauugauggugucaagcuggaaucuaugggcguguaccagaucuuagccaucuauucaacugucgcuaguagccuggugcuacucguuucccugggggccauuucuuuuuggaugugcucgaauggaagccuucagugucgcaucugcauuuga

SEQ ID NO: 129966 - RNA, 1698 nt, Artificial Sequence; identical to SEQ ID NO: 129958
  derived and/or modified CDS sequence (opt3) from hemagglutinin__InfluenzaA__ABV29744

SEQ ID NO: 129967 - RNA, 1698 nt, Artificial Sequence
  derived and/or modified CDS sequence (opt3) from hemagglutinin__InfluenzaA__ABV29755
augaaggugaaacugcucguccuucugugcaccuucacagccacuuacgcugacacgaucuguauuggcuaucacgcaaacaauagcaccgauacaguugacacuguguuggagaagaacguaaccgugacacauuccgucaauuuacuggaagauucucacaacgggaaacuaugccuccugaagggaauagcgccccuucagcuggguaauuguucaguggccggcuggaucuuggggaacccugagugcgaacuccugauuaguaaagagagcugguccuacaucguugaaaccccaucuccggagaauggaacuuguuaucccggcuacuuugcugacuaugaggaacugagagagcaacucucgucagugagcaguuucgaaagguuugagauuuucccuaaggaguccucuuggccaaaccauacagucaccggugugagcgccuccugcucacacaaugggaagaguagcuuuuaccggaacuuacuguggcuuacgggaaagaauggcuuguaucccaaccugucuaaguccuacgcaaauaacaaagaaaaggagguucuaguacucuggggcgugcaucacccuccaaauaucggggaucagcgcgcccuguaccacacugaaaacgcuuaugucucaguggugagcagucauuacucucgacguuucacccccgagauagcaaaaagaccuaaggucagggaccaggaaggacggaucaacuauuacuggacacuucuggagccaggugauacuauuaucuuugaggccaauggcaacuugauugcuccgcgcuucgccuuugcgcucuccagaggguucggaagcggcaucauaaccucgaaugcacccauggguaagugugacgccaaaugccagacaccucaaggggcuauuaacucuucccugccauuucagaauguucaccccgugaccaucggagaauguccuaaguauguaaggucagccaaauuacggauggugacgggccugcgcaacauuccaaguauccagagccgaggccucuucggggcaaucgcuggauuuauugaggguggcuggacugggauggucgauggaugguacggcuaucaucaccagaaugaacaagguuccggguacgccgcggaccagaagucuacacagaacgccauaaauggcaucaccaacaaagugaauagcguuauugagaagaugaacacucaguucacagcagugggaaaagaguucaauaaacuugaaagaaggauggagaaccugaauaagaaagucgaugacggcuuuuuggauaucuggaccuacaacgcugaacuacuggugcuccuggagaacgaacggacgcuugacuuccacgacucaaauguaaagaaccuguaugagaaaguuaagagucaauugaaaaauaacgccaaggaaauagggaauggaugcuuugaguucuaccauaaguguaacgaugagugcauggaauccgugaaaaaugguaccuaugacuaccccaaguauagcgaggaaucuaaacucaaccgugagaagauugauggcgucaaacuggagucaauggggguguaccagaucuuagcuaucuauaguacagucgccagcucccuggugcuacucguuucucugggagcaauuucguuuuggaugugcagcaauggcucccuucagugucgcaucugcauuuga

SEQ ID NO: 129968 - RNA, 1698 nt, Artificial Sequence; identical to SEQ ID NO: 129958
  derived and/or modified CDS sequence (opt3) from hemagglutinin__InfluenzaA__ABV29766

SEQ ID NO: 129969 - RNA, 1698 nt, Artificial Sequence
  derived and/or modified CDS sequence (opt3) from hemagglutinin__InfluenzaA__ABV29777
augaaggugaaacugcucguccuucugugcaccuucacagccacuuacgcugacacgaucuguauuggcuaucacgcaaacaauagcaccgauacaguugacacuguguuggagaagaacguaaccgugacacauuccgucaauuuacuggaagauucucacaacgggaaacuaugccuccugaagggaauagcgccccuucagcuggguaauuguucaguggccggcuggaucuuggggaacccugagugcgaacuccugauuaguaaagagagcugguccuacaucguugaaaccccaaauccggagaacggaacuuguuaucccggcuacuuugcugacuaugaggaacugagagagcaacucucuucggugagcucauucgaaagguuugagauuuucccuaaggagaguuccuggccaaaucauacagucaccggugugucugccagcugcucccacaacggggaaucaaguuuuuaccggaauuuacuguggcuuacgggaaagaacggcuuguaucccaaucugagcaaaucuuacgcaaacaauaaggagaaagaaguucuaguacucuggggcgugcaucacccuccaaacaucggggaucagcgcgcccuguaccacacugagaacgcuuaugucuccguggugucaagccauuacagucgacguuucacccccgaaauagcaaagagaccuaaagucagggaccaggagggacggaucaauuauuacuggacacuucuggagccaggugauacuauuaucuuugaagccaacggcaauuugauugcuccgcgcuucgccuuugcgcucucuagaggguucggauccggcaucauaaccagcaacgcacccauggacaagugugaugccaagugccagacaccucaaggugcuauuaauucgucucugccauuucagaacguucaccccgugaccaucggggaguguccuaaauauguaagguccacgaaguuacggauggugacuggacugcgcaauauuccaucaauccagagucgaggccucuucggcgccaucgcaggguuuauugaaggagguuggacaggcauggucgacgggugguacggauaucaucaccagaacgagcaaggcagcgguuacgcugccgaucagaaauccacccagaaugcgauaaacgggaucacuaauaaggugaacucuguuauugaaaagaugaauacacaguucaccgccgugggcaaagaguucaacaaacuugagagaaggauggaaaaucugaacaagaaggucgacgauggauuuuuggacaucuggacguacaacgcagagcuacuggugcuccuggaaaaugagcggacccuugacuuccacgauagcaacguuaaaaaucuguaugaaaagguaaaaucacaauugaagaacaaugcuaaagagauaggcaacgggugcuuugaguucuaccauaaguguaaugacgaaugcauggagagugugaagaacggaacauaugauuaccccaaauauuccgaagagagcaagcucaaucgugagaaaauugacggugucaagcuggaaucuaugggcguguaccagaucuuagccaucuauucaacugucgcuaguagccuggugcuacucguuucccugggggccauuucuuuuuggaugugcucgaacggaagccuucagugucgcaucugcauuuga

SEQ ID NO: 129970 - RNA, 1698 nt, Artificial Sequence; identical to SEQ ID NO: 129958
  derived and/or modified CDS sequence (opt3) from hemagglutinin__InfluenzaA__ABV29788

SEQ ID NO: 129971 - RNA, 1698 nt, Artificial Sequence; identical to SEQ ID NO: 129962
  derived and/or modified CDS sequence (opt3) from hemagglutinin__InfluenzaA__ABV29799

SEQ ID NO: 129972 - RNA, 1701 nt, Artificial Sequence
  derived and/or modified CDS sequence (opt3) from hemagglutinin__InfluenzaA__ABV29821
augaagaccaucauugcccugagcuacauacucugccuuguguucgcucagaaacugcccggcaacgacaauuccacagcaacuuuguguuuagggcaccaugccgucccuaacggaacgaucguuaagaccauuacaaaugaucaaaucgaggugacuaacgcgaccgaacugguacagucuucaaguacaggugagauuugcgacagcccacaccagauccuagauggcgaaaauuguacccucauagacgcucugcuuggggauccgcagugcgacggauuucaaaacaaaaagugggaucuguucguggagagauccaaagccuauucuaauuguuaccccuaugacgucccugauuacgcaucguugaggucacucguggccagcaguggcacucuggaauuuaacaaugaguccuucaacuggacagguguuacccagaaugggacgucuagcgcuugcauccggcgcuccaacaauucauuuuucagucgacugaacuggcucacucauuuaaaguuuaaguauccagcacugaaugugaccaugcccaacaacgagaaauucgacaaacuuuacauuuggggaguccaccauccuggcacagauaaugaccagguguuuuuguaugcccaggcuagcggccguaucacuguaucuaccaagagaucccaacagacaguuauuccaaacaucgggucaaggccccgggugcgcaauauaccuagcagaauuaguaucuacuggaccauugucaagccaggagauauccugcuaaucaacucuacggguaaucucauugccccgaggggcuacuucaaaauacgguccggaaagagcucgaucaugcgcucugacgcgcccauugggaaguguaacuccgaaugcaucacuccuaauggcucaauaccaaacgacaaacccuuucagaaugugaaccgaauuacauauggugcauguccuagauacgugaagcagaauacccugaaacuugccacugggaugaggaacgucccagagaagcaaacacggggaaucuucggcgcuaucgccggcuuuauugaaaaugggugggagggaaugguugaugguugguauggcuuccgucaccagaacagugaggggaucggacaggcagcugaccugaaaagcacccaagccgcgauugaucagauaaauggcaaguugaaccgccucaucgguaaaacgaacgaaaaguuccaccagauugagaaggaauuuuccgagguggaagggagaauccaggaccuggagaaauacguagaggauaccaagaucgacuuauggucuuauaaugccgaacugcucguggcacuugagaaccaacauacaauugaucugacugacagcgaaaugaauaaauuguucgagaagaccaaaaagcagcuaagggaaaacgcugaggauaugggcaauggaugcuuuaagauauaccacaaaugugacaacgccugcaucggcucaauucggaaugggacauaugaucaugacgucuaccgagacgaggcucugaacaaucgcuuccagaucaagggaguggaacucaaaagugguuacaaggauuggauucuguggaucuccuuugccauaagcugcuuccuucuguguguugcauugcucggcuuuaucaugugggccugccagaaagggaacauuaaguguaauaucugcauuuga

SEQ ID NO: 129973 - RNA, 1698 nt, Artificial Sequence; identical to SEQ ID NO: 129962
  derived and/or modified CDS sequence (opt3) from hemagglutinin__InfluenzaA__ABV29832

SEQ ID NO: 129974 - RNA, 1698 nt, Artificial Sequence; identical to SEQ ID NO: 129958
  derived and/or modified CDS sequence (opt3) from hemagglutinin__InfluenzaA__ABV29865

SEQ ID NO: 129975 - RNA, 1698 nt, Artificial Sequence; identical to SEQ ID NO: 129958
  derived and/or modified CDS sequence (opt3) from hemagglutinin__InfluenzaA__ABV29876

SEQ ID NO: 129976 - RNA, 1701 nt, Artificial Sequence
  derived and/or modified CDS sequence (opt3) from hemagglutinin__InfluenzaA__ABV29898
augaagaccaucauugcccugagcuacauacucugccuuguguucgcucagaaacugcccggcaacgacaauuccacagcaacuuuguguuuagggcaccaugccgucccuaacggaacgaucguuaagaccauuacaaaugaucaaaucgaggugacuaacgcgaccgaacugguacagucuucaaguacaggugagauuugcgacagcccacaccagauccuagauggcgaaaauuguacccucauagacgcucugcuuggggauccgcagugcgacggauuucaaaacaaaaagugggaucuguucguggagagauccaaagccuauucuaauuguuaccccuaugacgucccugauuacgcaucguugaggucacucguggccagcaguggcacucuggaauuuaacaaugaguccuucaacuggacagguguuacccagaaugggacgucuagcgcuugcauccggcgcuccaacaauucauuuuucagucgacugaacuggcucacucauuuaaaguuuaaguauccagcacugaaugugaccaugcccaacaacgagaaauucgacaaacuuuacauuuggggaguccaccauccuggcacagauaaugaccagaucuuuuuguaugcccaggcuagcggccguauuacugugucuaccaagagaucccaacagacaguaaucccaaacauagggucaaggccccggguucgcaauauuccuagcagaaucaguauuuacuggaccaucgugaagccaggagauauccugcuaauuaacucuacggguaaucucauagccccgaggggcuacuucaaaauccgguccggaaagagcucgauuaugcgcucugacgcgcccaucgggaaguguaacuccgaaugcauaacuccuaauggcucaauuccaaacgacaaacccuuucagaaugucaaccgaaucacauauggugcauguccuagauacgugaagcagaauacccugaaacuugccacugggaugaggaacgugccagagaagcaaacacggggaaucuucggcgcuauugccggcuuuaucgaaaaugggugggagggaauggucgaugguugguauggcuuccgucaccagaacagugaggggauuggacaggcagcugaccugaaaagcacccaagccgcgauagaucagaucaauggcaaguugaaccgccucauugguaaaacgaacgaaaaguuccaccagaucgagaaggaauuuuccgagguugaagggagaauccaggaccuggagaaauacguggaggauaccaagauugacuuauggucuuauaaugccgaacugcucguagcacuugagaaccaacauacaauagaucugacugacagcgaaaugaauaaauuguucgagaagaccaaaaagcagcuaagggaaaacgcugaggauaugggcaauggaugcuuuaagaucuaccacaaaugugacaacgccugcauuggcucaauccggaaugggacauaugaucaugacguguaccgagacgaggcucugaacaaucgcuuccagauuaagggagucgaacucaaaagugguuacaaggauuggauccuguggauauccuuugccaucagcugcuuccuucuguguguggcauugcucggcuuuauuaugugggccugccagaaagggaacaucagauguaauauuugcaucuga

SEQ ID NO: 129977 - RNA, 1701 nt, Artificial Sequence
  derived and/or modified CDS sequence (opt3) from hemagglutinin__InfluenzaA__ABV29909
augaagaccaucauugcccugagcuacauacucugccuuguguucgcucagaaacugcccggcaacgacaauuccacagcaacuuuguguuuagggcaccaugccgucccuaacggaacgaucguuaagaccauuacaucugaucaaaucgaggugacuaaugcgaccgaacugguacagaacucaaguauugguggcaucugcaauagcccacaccagauacuagacggggagaacuguacacucaucgaugcucugcuuggagacccgcagugcgauggcuuucaaaauaaaaagugggaccuguucguggaaagauccaaagccuauucuaacuguuaccccuaugaugucccugacuacgcaucguugaggucacucauugccagcagugguacccuggaguuuaauaacgaauccuucaauuggacuggggugacacagaacggaaccucuagcgcuugcaagcggcgcuccaauaacucauuuuucagucgacugaauuggcucacgcauuuaaaguuuaaauauccagcacugaacguuacuaugcccaacaaugaggaguucgauaaacuuuacaucuggggcgugcaccauccuggcaccgacaacgaucagauuagcuuguaugcccaggcuccagggcguaucacagucucuacuaagagaucccaacagaccgugauacccaauauuggaucaaggccucggguacgcgacaucccaagcagaauuaguaucuacuggacaaucguuaagccgggugauauucugcuaauaaacucuaccggcaaucucaucgcccccaggggguacuuuaaaauucgguccggaaagagcucgaucaugcgcucugacgcgccuauagacaaguguaacuccgaaugcauuacgccaaauggcucaauccccaacgauaaaccuuuccagaaugugaaccgaaucacuuauggugcauguccaagauacgucaagcagaauacacugaaacuugccaccgggaugaggaacgugcccgagaagcaaacucggggaauuuuuggcgcuaucgccggcuucauugaaaaugggugggagggaaugguggacgguugguauggcuuucgucaccagaacagugaggggauaggacaggcagcugaucugaaaagcacacaagccgcgaucgaccagauuaauggcaaguugaaccgccucaucgguaaaaccaacgaaaaguuccaccagaucgagaaggaguucuccgaagucgaagggaggauucaggaucuggagaaauacguugaggacacgaagauagauuuauggucuuauaaugccgaacugcucguggcacuugagaaccaacauaccaucgaccugacagauagcgaaaugaauaaauuguuugagagaacuaagaaacagcuacgggaaaacgcugaggacaugggcaauggaugcuucaagauuuaccacaagugugauaacgccugcaucggcucaauucgaaaugggaccuaugaccaugacguauaccgcgaugaggcucugaacaauagauuucagaucaaaggaguggaacucaagagugguuacaaagacuggauacuguggaucuccuucgccauuagcugcuuucuucugugugucgcauugcucggcuucaucaugugggccugccagaaggggaacauuagguguaauaucugcauauga

SEQ ID NO: 129978 - RNA, 1698 nt, Artificial Sequence
  derived and/or modified CDS sequence (opt3) from hemagglutinin__InfluenzaA__ABV29920
augaaggugaaacugcucguccuucugugcaccuucacagccacuuacgcugacacgaucuguauuggcuaucacgcaaacaauagcaccgauacaguugacacuguguuggagaagaacguaaccgugacacauuccgucaauuuacuggaagauucucacaacgggaaacuaugccuccugaagggaauagcgccccuucagcuggguaauuguucaguggccggcuggaucuuggggaacccugagugcgaacuccugauuaguaaagagagcugguccuacaucguugaaaccccaaauccggagaacggaacuuguuaucccggcuacuuugcugacuaugaggaacugagagagcaacucucuucggugagcucauucgaaagguuugagauuuucccuaaggagaguuccuggccaaaucauacagucaccggugugucugccagcugcucccacaacgggaagucaaguuuuuaccggaauuuacuguggcuuacgggcaaaaacggauuguaucccaaucugagcaagucuuacgcaaacaauaaagaaaaggagguucuaguacucuggggcgugcaucacccuccaaacaucggggaucagcgcgcccuguaccacacugaaaacgcuuaugucuccguggugucaagccauuacagucgacguuucacccccgagauagcaaaaagaccuaaggucagggaccaggaaggacggaucaauuauuacuggacacuucuggagccaggugauacuauuaucuuugaggccaacggcaauuugauugcuccgcgcuucgccuuugcgcucucuagaggguucggauccggcaucauaaccagcaacgcacccaugggugaaugugacgccaagugccagacaccucaaggggcuauuaauucgucucugccauuucagaacguucaccccgugaccaucggagaguguccuaaauauguaagguccgccaaguuacggauggugacgggccugcgcaauauuccaucaauccagagucgaggccucuucggggcaaucgcuggauuuauugaagguggcuggacugggauggucgauggaugguacggcuaucaucaccagaacgagcaagguagcggguacgccgcggaccagaaauccacacagaaugccauaaacggcaucaccaauaaggugaacucuguuauugaaaagaugaauacucaguucacagcagugggaaaagaguucaacaaacuugagagaaggauggaaaaucugaacaagaaggucgaugacggcuuuuuggauaucuggaccuacaacgcugagcuacuggugcuccuggaaaaugagcggacgcuugacuuccacgacagcaacguuaaaaaucuguaugaaaagguaaaaucacaauugaagaacaaugccaaagagauagggaacggaugcuuugaguucuaccauaaguguaaugaugaaugcauggagagugugaagaacgguaccuaugacuaccccaaauauuccgaagagagcaagcucaaucgugagaaaauugauggcgucaagcuggaaucuauggggguguaccagaucuuagcuaucuauucaacagucgccaguagccuggugcuacucguuucccugggagcaauuucuuuuuggaugugcucgaacggcagccuucagugucgcaucugcauuuga

SEQ ID NO: 129979 - RNA, 1698 nt, Artificial Sequence; identical to SEQ ID NO: 129969
  derived and/or modified CDS sequence (opt3) from hemagglutinin__InfluenzaA__ABV29942

SEQ ID NO: 129980 - RNA, 1698 nt, Artificial Sequence; identical to SEQ ID NO: 129962
  derived and/or modified CDS sequence (opt3) from hemagglutinin__InfluenzaA__ABV29953

SEQ ID NO: 129981 - RNA, 1698 nt, Artificial Sequence; identical to SEQ ID NO: 129962
  derived and/or modified CDS sequence (opt3) from hemagglutinin__InfluenzaA__ABV29964

SEQ ID NO: 129982 - RNA, 1698 nt, Artificial Sequence; identical to SEQ ID NO: 129958
  derived and/or modified CDS sequence (opt3) from hemagglutinin__InfluenzaA__ABV29986

SEQ ID NO: 129983 - RNA, 1698 nt, Artificial Sequence; identical to SEQ ID NO: 129962
  derived and/or modified CDS sequence (opt3) from hemagglutinin__InfluenzaA__ABV29997

SEQ ID NO: 129984 - RNA, 1698 nt, Artificial Sequence; identical to SEQ ID NO: 129958
  derived and/or modified CDS sequence (opt3) from hemagglutinin__InfluenzaA__ABV30008

SEQ ID NO: 129985 - RNA, 1698 nt, Artificial Sequence; identical to SEQ ID NO: 129962
  derived and/or modified CDS sequence (opt3) from hemagglutinin__InfluenzaA__ABV30019

SEQ ID NO: 129986 - RNA, 1698 nt, Artificial Sequence; identical to SEQ ID NO: 129962
  derived and/or modified CDS sequence (opt3) from hemagglutinin__InfluenzaA__ABV30030

SEQ ID NO: 129987 - RNA, 1698 nt, Artificial Sequence
  derived and/or modified CDS sequence (opt3) from hemagglutinin__InfluenzaA__ABV30041
augaaggugaaacugcucguccuucugugcaccuucacagccacuuacgcugacacgaucuguauuggcuaucacgcaaacaauagcaccgauacaguugacacuguguuggagaagaacguaaccgugacacauuccgucaauuuacuggaagauucucacaacgggaaacuaugccuccugaagggaaccgcgccccuucagcuggguaauuguucaguggccggcuggauauuggggaacccugagugcgaacuccugaucaguaaagagagcugguccuacauuguugaaacuccaaauccggagaacggaacauguuaucccggcuacuuugcugacuaugaggaacugagagagcaacucucuucggugagcucauucgaaagguuugagaucuucccuaaggagaguuccuggccaaaucauaccgucacgggugugucugccagcugcucccacaacgggaagucaaguuuuuaccggaauuuacuguggcuuacuggcaaaaacggauuguaucccaaucugagcaagucuuacgcaaacaauaaagaaaaggagguucuaguacucuggggcgugcaucacccuccaaacauuggggaucagcgcgcccuguaccacaccgaaaacgcuuaugucuccguggugucaagccauuacagucgacguuucacacccgagaucgcaaaaagaccuaaggucagggaccaggaaggacggauaaauuauuacuggacucuucuggagccaggugauaccaucauuuuugaggccaacggcaauuugaucgcuccgcgcuucgccuuugcgcucucuagaggguucggauccggcauuaucacaagcaacgcacccaugggugaaugugacgccaagugccagaccccucaaggggcuauaaauucgucucugccauuucagaacguucaccccgugacgauuggagaguguccuaaauauguaagguccgccaaguuacggauggugacuggccugcgcaauaucccaucaauucagagucgaggccucuucggggcaaucgcuggauuuaucgaagguggcuggacagggauggucgauggaugguacggcuaucaucaccagaacgagcaagguagcggguacgccgcggaccagaaauccacccagaaugccauuaacggcauaacuaauaaggugaacucuguuaucgaaaagaugaauacacaguucaccgcagugggaaaagaguucaacaaacuugagagaaggauggaaaaucugaacaagaaggucgaugacggcuuuuuggauauuuggacguacaacgcugagcuacuggugcuccuggaaaaugagcggacccuugacuuccacgacagcaacguaaagaaucuguaugaaaaaguuaaaaaccaauugaagaauaacgccaaagagaucgggaauggaugcuuugaguucuaccauaaguguaacgaugaaugcauggagucagugaagaaugguacauaugacuaccccaaauauagugaagaguccaagcucaaccgugagaaaauagauggcgucaagcuggaaagcauggggguguaccagauuuuagcuaucuauucuacugucgccucaagucuggugcuacucaucagccugggagcaauuuccuuuuggaugugcucuaauggcucgcuucagugucgcaucugcauuuga

SEQ ID NO: 129988 - RNA, 1701 nt, Artificial Sequence; identical to SEQ ID NO: 129976
  derived and/or modified CDS sequence (opt3) from hemagglutinin__InfluenzaA__ABV30063

SEQ ID NO: 129989 - RNA, 1701 nt, Artificial Sequence; identical to SEQ ID NO: 129976
  derived and/or modified CDS sequence (opt3) from hemagglutinin__InfluenzaA__ABV30074

SEQ ID NO: 129990 - RNA, 1698 nt, Artificial Sequence; identical to SEQ ID NO: 129962
  derived and/or modified CDS sequence (opt3) from hemagglutinin__InfluenzaA__ABV30085

SEQ ID NO: 129991 - RNA, 1698 nt, Artificial Sequence; identical to SEQ ID NO: 129962
  derived and/or modified CDS sequence (opt3) from hemagglutinin__InfluenzaA__ABV30096

SEQ ID NO: 129992 - RNA, 1698 nt, Artificial Sequence; identical to SEQ ID NO: 129958
  derived and/or modified CDS sequence (opt3) from hemagglutinin__InfluenzaA__ABV30107

SEQ ID NO: 129993 - RNA, 1698 nt, Artificial Sequence
  derived and/or modified CDS sequence (opt3) from hemagglutinin__InfluenzaA__ABV30129
augaaggugaaacugcucguccuucugugcaccuucacagccacuuacgcugacacgaucuguauuggcuaucacgcaaacaauagcaccgauacaguugacacuguguuggagaagaacguaaccgugacacauuccgucaauuuacuggaagauucucacaacgggaaacuaugccuccugaagggaauagcgccccuucagcuggguaauuguucaguggccggcuggaucuuggggaacccugagugcgaacuccugauuaguaaagagagcugguccuacaucguugaaaccccaaauccggagaacggaacuuguuaucccggcaauuuugcugacuacgaggaacugagagagcaacucucuucggugagcucauucgaaagguuugagauuuucccuaaggagaguuccuggccaaaccauacagucaccggugugucugccagcugcucccacaaugggaagucaaguuuuuaucggaacuuacuguggcuuacgggcaaaaauggauuguaccccaaccugagcaagucuuaugcaaauaacaaagaaaaggaggugcuaguucucuggggcgugcaucacccuccaaacaucggggaucagcgcgcccuguaccacacugaaaaugcuuacgucuccguggugucaagccauuauagucgacguuucacccccgagauagcaaaaagaccuaaggucagggaccaggaaggacggaucaacuacuauuggacacuucuggagccaggugauacuauuaucuuugaggccaauggcaacuugauugcuccgcgcuucgccuuugcgcucucuagaggguucggauccggcaucauaaccagcaaugcacccauggacgaaugugaugccaagugccagacaccucaaggugcuauuaacucgucucugccauuucagaauguucaccccgugaccaucggggaguguccuaaauacguaagguccgccaaguuacggauggugacgggacugcgcaacauuccaucaauccagagucgaggccucuucggcgcaaucgcuggguuuauugaaggagguuggacuggcauggucgacgggugguauggauaccaucaccagaaugagcaaggcagcgguuaugccgcggaucagaaauccacacagaacgccauaaaugggaucaccaacaagguaaauucuguuauugaaaagaugaacacucaguucacagcagugggcaaagaguucaauaaacuugagagaaggauggaaaaccugaacaagaaggucgacgauggauuuuuggacaucuggaccuacaaugcugagcuacuggugcuccuggaaaacgagcggacgcuugacuuccacgauagcaauguuaaaaaccuguacgaaaagguaaaaucacaauugaagaauaacgccaaagagauaggcaaugggugcuuugaguucuaucauaaguguaacgacgaaugcauggagagugugaagaauggaaccuacgauuaucccaaauacuccgaagagagcaagcucaaccgugagaaaauugacggugucaagcuggaaucuaugggcguguaucagaucuuagcuaucuacucaacagucgccaguagccuggugcuacucguuucccugggggcaauuucuuuuuggaugugcucgaauggaagccuucagugucgcaucugcauuuga

SEQ ID NO: 129994 - RNA, 1698 nt, Artificial Sequence
  derived and/or modified CDS sequence (opt3) from hemagglutinin__InfluenzaA__ABV30140
augaaggugaaacugcucguccuucugugcaccuucacagccacuuacgcugacacgaucuguauuggcuaucacgcaaacaauagcaccgauacaguugacacuguguuggagaagaacguaaccgugacacauuccgucaauuuacuggaagauagacacaacgggaaacuaugccuccugaagggaauagcgccccuuaaacuggguaauuguucuguggccggcuggaucuuggggaacccugagugcgaacuccugauuucaaaggagaguuggagcuacaucguugaaaccccaaauccggagaacggaacuuguuaucccggcuacuuugcugacuaugaggaacugagggagcagcucuccucugugucgucauucgaacgguuugagauuuucccuaaggagagcaguuggccaaaucauacagucaccgguguguccgccucuugcagccacaacgggaaauccucauuuuaccgcaauuuacuguggcuuacgggaaagaacggcuuguaucccaaucugagucgaagcuacgcaaacaauaaagaaaaggagguucuaguacucuggggcgugcaucacccuccaaacaucggggaucaacgugcccuguaccacacugaaaacgcuuaugucucugugguguccucacauuacagcagaagguucacccccgagauagcaaaacggccuaagguccgcgaccaggaaggaagaaucaauuauuacuggacacuucuggagccaggugauacuauuaucuuugaggccaacggcaauuugauugcuccgagguucgccuuugcgcucagucggggguucggaucuggcaucauaaccuccaacgcacccauggacgaaugugaugccaagugccagacaccucagggugcuauuaauagcucgcugccauuucaaaacguucaccccgugaccaucggggaguguccuaaauauguacgcucugccaaguuacgaauggugacgggacugagaaauauuccauccauccagucaaggggccucuucggcgcaaucgcuggguuuauugaaggagguuggacuggcauggucgacgggugguacggauaucaucaccagaacgagcagggcagugguuacgccgcggaucagaaaagcacacaaaaugccauaaacgggaucaccaauaaggugaacuccguuauugaaaagaugaauacucaguucacagcagugggcaaagaguucaacaaacuugagcggcguauggaaaaucugaacaagaaggucgacgauggauuuuuggacaucuggaccuacaacgcugagcuacuggugcuccuggaaaaugagcgcacgcuugacuuccacgauucuaacguuaaaaaucuguaugaaaagguaaaaagccaguugaagaacaaugccaaagagauaggcaacgggugcuuugaguucuaccauaaguguaaugacgaaugcauggagucagugaagaacggaaccuaugauuaccccaaauauagugaagaguccaagcucaauagagagaaaauugacggugucaagcuggaaagcaugggcguguaccaaaucuuagcuaucuauucuacagucgccucaagucuggugcuacucguuagccugggggcaauuuccuuuuggaugugcucuaacggaucgcuucaguguaggaucugcauuuga

SEQ ID NO: 129995 - RNA, 1698 nt, Artificial Sequence
  derived and/or modified CDS sequence (opt3) from hemagglutinin__InfluenzaA__ABV30151
augaaggugaaacugcucguccuucugugcaccuucacagccacuuacgcugacacgaucuguauuggcuaucacgcaaacaauagcaccgauacaguugacacuguguuggagaagaacguaaccgugacacauuccgucaauuuacuggaagauucucacaacgggaaacuaugccuccugaagggaauagcgccccuucagcuggguaauuguucaguggccggcuggaucuuggggaacccugagugcgaacuccugauuaguaaagagagcugguccuacaucguugaaaccccaaauccggagaacggaacuuguuaucccggcuacuuugcugacuaugaggaacugagagagcaacucucuucggugagcucauucgaaagguuugagauuuucccuaaggagaguuccuggccaaaucauacagucaccggugugucugccagcugcucccacucagggaagaguagcuuuuaccggaacuuacuguggcuuacgggcaaaaauggauuguaucccaaccugucuaaguccuacgcaaauaacaaagaaaaggagguucuaguacucuggggcgugcaucacccuccaaauaucggggaucagcgcgcccuguaccacacugaaaacgcuuaugucucaguggugagcagucauuacucucgacguuucacccccgagauagcaaaaagaccuaaggucagggaccaggaaggacggaucaacuauuacuggacacuucuggagccaggugauacuauuaucuuugaggccaauggcaacuugauugcuccgcgcuucgccuuugcgcucuccagaggguucggaagcggcaucauaaccucgaaugcacccaugggugaaugugacgccaagugccagacaccucaaggggcuauuaacucuucccugccauuucagaauguucaccccgugaccaucggagaguguccuaaauauguaaggucagccaaguuacggauggugacgggccugcgcaacauuccaaguauccagagccgaggccucuucggggcaaucgcuggauuuauugaagguggcuggacugggauggucgauggaugguacggcuaucaucaccagaaugagcaagguuccggguacgccgcggaccagaaaucuacacagaacgccauaaauggcaucaccaacaaggugaauagcguuauugaaaagaugaacacucaguucacagcagugggaaaagaguucaauaaacuugagagaaggauggaaaaccugaauaagaaggucgaugacggcuuuuuggauaucuggaccuacaacgcugagcuacuggugcuccuggaaaacgagcggacgcuugacuuccacgacucaaauguuaaaaaccuguaugaaaagguaaaaagucaauugaagaauaacgccaaagagauagggaauggaugcuuugaguucuaccauaaguguaacgaugaaugcauggaguccgugaagaaugguaccuaugacuaccccaaauauagcgaagagucuaagcucaaccgugagaaaauugauggcgucaagcuggaaucaauggggguguaccagaucuuagcuaucuauaguacagucgccagcucccuggugcuacucguuucucugggagcaauuucguuuuggaugugcagcaauggcucccuucagugucgcaucugcauuuga

SEQ ID NO: 129996 - RNA, 1698 nt, Artificial Sequence
  derived and/or modified CDS sequence (opt3) from hemagglutinin__InfluenzaA__ABV30162
augaaggugaaacugcucguccuucugugcaccuucacagccacuuacgcugacacgaucuguauuggcuaucacgcaaacaauagcaccgauacaguugacacuguguuggagaagaacguaaccgugacacauuccgucaauuuacuggaagauucucacaacgggaaacuaugccuccugaagggaauagcgccccuucagcuggguaauuguucaguggccggcuggaucuuggggaacccugagugcgaacuccugauuaguagagagagcugguccuacaucguugaaaccccaaauccggagaacggaacuuguuaucccggcuacuuugcugacuaugaggaacugagggagcaacucucuucggugagcucauucgaacgguuugagauuuucccuaaagagaguuccuggccaaaucauacagucaccggugugucugccagcugcucccacaacgggaagucaaguuuuuaccgcaauuuacuguggcuuacgggaaagaacggcuuguaucccaaucugagcaaaucuuacgcaaacaauaaggaaaaagagguacuuguucucuggggcgugcaucacccuccaaacaucggggaucagcgagcccuguaccacacugaaaacgcuuaugucuccguggugucaagccauuacagucguagauucacccccgagauagcaaagaggccuaaaguccgggaccaggaaggacgcaucaauuauuacuggacacuucuggagccaggugauacuauuaucuuugaggccaacggcaauuugauugcuccgagauucgccuuugcgcucucuaggggguucggauccggcaucauaaccagcaacgcacccauggacgaaugugaugccaagugccagacaccucaaggugcuauuaauucgucucugccauuucagaacguucaccccgugaccaucggggaguguccuaaguauguacgguccacgaaauuacgcauggugacuggacugcgaaauauuccaucaauccagaguagaggccucuucggcgccaucgcaggguuuauugaaggagguuggacaggcauggucgacgggugguacggauaucaucaccagaacgagcaaggcagcgguuacgcugccgaucagaaguccacccagaaugcgauaaacgggaucacuaauaaagugaacucuguuauugaaaagaugaauacacaguucaccgccgugggcaaagaguucaacaagcuagagaggcggauggaaaaucugaacaaaaaggucgacgauggauuuuuggacaucuggacguacaacgcagagcuacuggugcuccuggaaaaugagcguacccuugacuuccacgauagcaacguaaagaaucuguaugaaaaaguuaagucacaauugaaaaacaaugcuaaggagauaggcaacgggugcuuugaguucuaccauaaauguaaugacgaaugcauggagagugugaagaacggaacauaugauuaccccaaguauuccgaagagagcaaacucaaucgcgagaagauugacggugucaaacuggaaucuaugggcguguaccagaucuuagccaucuauucaacugucgcuaguagccuggugcuacucguuucccugggggccauuucuuuuuggaugugcucgaacggaagccuucaguguagaaucugcauuuga

SEQ ID NO: 129997 - RNA, 1698 nt, Artificial Sequence; identical to SEQ ID NO: 129962
  derived and/or modified CDS sequence (opt3) from hemagglutinin__InfluenzaA__ABV30173

SEQ ID NO: 129998 - RNA, 1698 nt, Artificial Sequence; identical to SEQ ID NO: 129962
  derived and/or modified CDS sequence (opt3) from hemagglutinin__InfluenzaA__ABV30184

SEQ ID NO: 129999 - RNA, 1701 nt, Artificial Sequence; identical to SEQ ID NO: 129976
  derived and/or modified CDS sequence (opt3) from hemagglutinin__InfluenzaA__ABV30217

SEQ ID NO: 130000 - RNA, 1701 nt, Artificial Sequence; identical to SEQ ID NO: 129976
  derived and/or modified CDS sequence (opt3) from hemagglutinin__InfluenzaA__ABV30228

SEQ ID NO: 130001 - RNA, 1701 nt, Artificial Sequence
  derived and/or modified CDS sequence (opt3) from hemagglutinin__InfluenzaA__ABV30261
augaagaccaucauugcccugagcuacauacucugccuuguguucgcucagaaacugcccggcaucgacaacuccacagcaacuuuguguuuagggcaccaugccgucccuaauggaacgauuguuaagaccaucacaaacgaucaaguggagguaacuaaugcgaccgaacuggugcagucuucaaguacagguggcauuugcgacagcccacaccagauccuagauggggagaacuguacccucauagacgcucugcuuggagauccgcagugcgacggcuuucaaaauaaaaagugggaucuguucgucgaaagauccaaagccuauucuaacuguuaccccuaugacgugccugauuacgcaucguugaggucacucguugccagcagugguacucuggaguuuaauaacgaauccuucaauugggcuggggugacacagaacggaaccucuagcgcaugcaagcggggcuccaauaacucauuuuucagucgccugaauuggcucacgcauagcaaguuuaaauauccagccuuaaacgucacuaugcccaauaacgaggaguucgacaagcuguacaucuggggcgugcaccauccugggaccgauaacgaccagauuuuucuuuaugcucaggccucuggacgaaucacaguauccacuaaacguucacaacagaccguuauuccaaauaucgguagcagacccagggugcggaacauaccuagucgcauuucuaucuacuggacaauugucaagccaggcgauaucuugcugaucaauuccaccgggaaccuaauugcgccgagaggauacuucaaaauaaggagcggcaagucgucuaucaugcgguccgacgcacccauugguaaguguaauucagaaugcaucacgccuaacgggaguauaccaaaugacaaacccuuucagaacgugaaucgcauuacuuauggagccuguccucgauacgugaagcagaacacacucaaacuggcuaccggcaugagaaaugucccagagaagcaaacuaggggcaucuucggggccaucgcaggauuuauugaaaacgguugggagggcaugguugaugggugguauggauuccggcaccagaauagcgagggcaugggucaggcugccgaccuuaaauccacacaagcggccaucgaucagauuaacgggaagcugaaucguuugauaggcaaaaccaacgaaaaguuccaccagaucgagaaggaauuuucugagguggaaggacgcauucaggaccucgagaaauacguagaggauacgaagaucgaccuguggagcuauaacgcagaauuacugguggcucucgagaaucaacauaccaucgaucuuacagacucagaaaugaacaaacuguucgagaagacuaaaaagcaguugagagaaaaugccgaggauaugggcaacgggugcuuuaagauuuaccacaaaugugacaaugcuugcauaggaaguaucaggaacgguaccuaugaucaugacgucuaccgggccgaggcacuaaauaaccgauuccagauuaagggcguggaacugaaauccggguacaaggacuggauccucuggauuagcuuugccaucucuugcuuccugcuuuguguugcucuguugggauuuauaaugugggcgugccagaaaggcaauauccgcuguaacauuugcaucuga

SEQ ID NO: 130002 - RNA, 1701 nt, Artificial Sequence
  derived and/or modified CDS sequence (opt3) from hemagglutinin__InfluenzaA__ABV30272
augaagaccaucauugcccugagcuacauacucugccuuguguucgcucagaaacugcccggcaacgacaauuccacagcaacuuuguguuuagggcaccaugccgucccuaacggaacgaucguuaagaccauuacaaaugaucaaaucgaggugacuaacgcgaccgaacugguacagucuucaaguacaggugagauuugcgacagcccacaccagauccuagauggcgaaaauuguacccucauagacgcucugcuuggggauccgcagugcgacggauuucaaaacaaaaagugggaucuguucguggagagauccaaagccuauucuaauuguuaccccuaugacgucccugauuacgcaucguugaggucacucguggccagcaguggcacucuggaauuuaacaaugaguccuucaacuggacagguguuacccagaaugggacgucuagcgcuugcauccggcgcuccaacaauucauuuuucaguaagcugaacuggcucacucauuuaaaguuuaaauauccagcacugaaugugaccaugcccaacaacgagaaguucgacaaacuuuacauuuggggaguccaccauccuggcacagauaaugaccagaucuuuuuguaugcccaggcuagcggccgaauuacugugucuaccaagcguucccaacagacaguaaucccaaacauagggucaagacccaggguucggaauauuccuagccgcaucaguauuuacuggaccaucgugaaaccaggagauauccugcuaauuaacucuacggguaaucucauagccccgagaggcuacuucaagaucagguccggaaagagcucgauuaugcggucugacgcgcccaucgggaaauguaacuccgaaugcauaacuccuaauggcucaauuccaaacgacaagcccuuucagaaugucaaccgcaucacauauggugcauguccucgauacgugaaacagaauacccugaagcuggccacugggaugagaaacgugccagagaaacaaacaaggggaaucuucggcgcuauugccggcuuuaucgaaaaugggugggagggaauggucgaugguugguauggcuuccggcaccagaacagugaggggauuggacaggcagcugaccuuaagagcacccaagccgcgauagaucagaucaauggcaaauugaaccgucucauugguaagacgaacgaaaaguuccaccagaucgagaaagaauuuuccgagguugaagggcgcauccaggaccuggagaaguacguggaggauaccaaaauugacuuauggucuuauaaugccgaacugcucguagcacuugagaaccaacauacaauagaucugacugacagcgaaaugaauaaguuguucgagaaaaccaagaagcagcuaagagaaaacgcugaggauaugggcaauggaugcuuuaaaaucuaccacaagugugacaacgccugcauuggcucaaucaggaaugggacauaugaucaugacguguaccgggacgaggcucugaacaaucgauuccagauuaaaggagucgaacucaagagugguuacaaagauuggauccuguggauauccuuugccaucagcugcuuccuucuguguguggcauugcucggcuuuauuaugugggccugccagaaggggaacauccgcuguaauauuugcaucuga

SEQ ID NO: 130003 - RNA, 1698 nt, Artificial Sequence
  derived and/or modified CDS sequence (opt3) from hemagglutinin__InfluenzaA__ABV30283
augaaggugaaacugcucguccuucugugcaccuucacagccacuuacgcugacacgaucuguauuggcuaucacgcaaacaauagcaccgauacaguugacacuguguuggagaagaacguaaccgugacacauuccgucaauuuacuggaagauucucacaacgggaaacuaugccuccugaagggaauagcgccccuucagcuggguaauuguucaguggccggcuggaucuuggggaacccugagugcgaacuccugauuaguaaagagagcugguccuacaucguugaaaccccaaauccggagaacggaacuuguuaucccggcaauuuugcugacuacgaggaacugagagagcaacucucuucggugagcucauucgaaagguuugagauuuucccuaaggagaguuccuggccaaaccauacagucaccggugugucugccagcugcucccacaaugggaagucaaguuuuuaucggaacuuacuguggcuuacgggcaaaaauggauuguaccccaaccugagcaagucuuaugcaaauaacaaagaaaaggagguucuaguacucuggggcgugcaucacccuccaaacaucggggaucagcgcgcccuguaccacacugaaaaugcuuacgucuccguggugucaagccauuauagucgacguuucacccccgagauagcaaaaagaccuaaggucagggaccaggaaggacggaucaacuacuauuggacacuucuggagccaggugauacuauuaucuuugaggccaauggcaacuugauugcuccgcgcuucgccuuugcgcucucuagaggguucggauccggcaucauaaccagcaaugcacccauggacgaaugugaugccaagugccagacaccucaaggugcuauuaacucgucucugccauuucagaauguucaccccgugaccaucggggaguguccuaaauacguaagguccgccaaguuacggauggugacgggacugcgcaacauuccaucaauccagagucgaggccucuucggcgcaaucgcuggguuuauugaaggagguuggacuggcauggucgacgggugguauggauaccaucaccagaaugagcaaggcagcgguuaugccgcggaucagaaauccacacagaacgccauagacgggaucaccaauaaggugaacucuguuauugaaaagaugaauacucaguucacagcagugggcaaagaguucaacaaacuugagagaaggauggaaaaucugaacaagaaggucgaugacggauuuuuggacaucuggaccuacaacgcugagcuacuggugcuccuggaaaaugagcggacgcuugauuuccacgacagcaacguuaaaaaucuguacgaaaagguaaaaucacaauugaagaacaaugccaaagagauaggcaacgggugcuuugaguucuaucauaaguguaaugaugaaugcauggagagugugaagaacggaaccuacgacuaucccaaauacuccgaagagagcaagcucaaucgugagaaaauugauggugucaagcuggaaucuaugggcguguaucagaucuuagcuaucuacucaacagucgccaguagccuggugcuacucguuucccugggggcaauuucuuuuuggaugugcucgaacggaagccuucagugucgcaucugcauuuga

SEQ ID NO: 130004 - RNA, 1698 nt, Artificial Sequence
  derived and/or modified CDS sequence (opt3) from hemagglutinin__InfluenzaA__ABV30294
augaaggugaaacugcucguccuucugugcaccuucacagccacuuacgcugacacgaucuguauuggcuaucacgcaaacaauagcaccgauacaguugacacuguguuggagaagaacguaaccgugacacauuccgucaauuuacuggaagauagacacaacgggaaacuaugccuccugaagggaauagcgccccuucagcuggguaauuguucuguggccggcuggaucuuggggaacccugagugcgaacuccugauuucaaaagagaguuggagcuacaucguugaaaccccaaauccggagaacggaacuuguuaucccggcuacuuugcugacuaugaggaacugagggagcaacucuccucugugucgucauucgaacgguuugagauuuucccuaaggagagcaguuggccaaaucauacagucaccgguguguccgccucuugcagccacaacgggaaguccucauuuuaccgcaauuuacuguggcuuacgggaaagaacggcuuguaucccaaucugagucgaagcuacgcaaacaauaaggaaaaagagguacuuguucucuggggcgugcaucacccuccaaacaucggggaucagcgugcccuguaccacacugaaaacgcuuaugucucugugguguccucacauuacagcagaagguucacccccgagauagcaaagcggccuaaaguccgcgaccaggaaggaagaaucaauuauuacuggacacuucuggagccaggugauacuauuaucuuugaggccaacggcaauuugauugcuccgagguucgccuuugcgcucagucggggguucggaucuggcaucauaaccuccaacgcacccauggacgaaugugaugccaagugccagacaccucaaggugcuauuaauagcucgcugccauuucagaacguucaccccgugaccaucggggaguguccuaaguauguacgcucugccaaauuacgaauggugacgggacugagaaauauuccauccauccagucaaggggccucuucggcgcaaucgcuggguuuauugaaggagguuggacuggcauggucgacgggugguacggauaucaucaccagaacgagcaaggcagugguuacgccgcggaucagaaaagcacacagaaugccauaaacgggaucaccaauaaagugaacuccguuauugaaaagaugaauacucaguucacagcagugggcaaagaguucaacaagcuagagcggcguauggaaaaucugaacaaaaaggucgacgauggauuuuuggacaucuggaccuacaacgcugagcuacuggugcuccuggaaaaugagcgcacgcuugacuuccacgauucuaacguaaagaaucuguaugaaaaaguuaagagccaauugaaaaacaaugccaaggagauaggcaacgggugcuuugaguucuaccauaaauguaaugacgaaugcauggagucagugaagaacggaaccuaugauuaccccaaguauagugaagaguccaaacucaauagagagaagauugacggugucaaacuggaaagcaugggcguguaccagaucuuagcuaucuauucuacagucgccucaagucuggugcuacucguuagccugggggcaauuuccuuuuggaugugcucuaacggaucgcuucaguguaggaucugcauuuga

SEQ ID NO: 130005 - RNA, 1698 nt, Artificial Sequence
  derived and/or modified CDS sequence (opt3) from hemagglutinin__InfluenzaA__ABV30305
augaaggugaaacugcucguccuucugugcaccuucacagccacuuacgcugacacgaucuguauuggcuaucacgcaaacaauagcaccgauacaguugacacuguguuggagaagaacguaaccgugacacauuccgucaauuuacuggaagauucucacaacgggaaacuaugccuccugaagggaauagcgccccuucagcuggguaauuguucaguggccggcuggaucuuggggaacccugagugcgaacuccugauuaguaaagagagcugguccuacaucguugaaaccccaaauccggagaacggaacuuguuaucccggcuacuuugcugacuaugaggaacugagagagcaacucucuucggugagcucauucgaaagguuugagauuuucccuaaggagaguuccuggccaaaucauacagucaccggugggucugccagcugcucccacaacggaaagucaaguuuuuaccggaauuuacuguggcuuacgggcaaaaacggcuuguaucccaaucugagcaagucuuacgcaaacaauaaagaaaaggaggugcuaguacucuggggaguucaucacccuccaaacaucggggaucagcgcgcccuguaccacacugaaaacgcuuauguguccgucgugucaagccauuacagucgacguuucacccccgagauagcaaaaagaccuaaggugagggaccaggaaggucggaucaauuauuacuggacacuucuggagccaggcgauacuauuaucuuugaggccaacgggaauuugauugcuccgcgcuucgccuuugcgcucucuagaggauucggcuccgguaucauaaccagcaacgcacccauggacgaaugugaugccaagugccagacaccucaaggggcuauuaauucgucucugccauuucagaacguccaccccguuaccaucggagaguguccuaaauaugugagguccacgaaguuacggaugguaacuggccugcgcaauauuccaucaauccagagucgaggccucuucggggccaucgcaggauuuauugaagguggcuggacagggaugguggacggaugguacggcuaucaucaccagaacgagcaagguagcggguacgcugccgaucagaaauccacccagaaugcgauaaacggcaucacuaauaaggucaacucugugauugaaaagaugaauacacaguucaccgccguuggaaaagaguucaacaaacuugagagaaggauggaaaaucugaacaagaagguggacgauggcuuuuuggacaucuggacguacaacgcagagcuacugguccuccuggaaaaugagcggacccuugacuuccacgauagcaacgugaaaaaucuguaugaaaagguaaaaucacaauugaagaacaaugcuaaagagauagggaacggaugcuuugaguucuaccauaaguguaauaacgaaugcauggagaguguuaagaaugguacauaugacuaccccaaauauuccgaagagagcaagcucaaccgugagaaaauugauggcgugaagcuggaaucuaugggggucuaccagaucuuagccaucuauucaacuguggcuaguagccugguccuacucgugucccugggagccauuucuuuuuggaugugcucgaauggcagccuucagugucgcaucugcauuuga

SEQ ID NO: 130006 - RNA, 1698 nt, Artificial Sequence; identical to SEQ ID NO: 129958
  derived and/or modified CDS sequence (opt3) from hemagglutinin__InfluenzaA__ABV30316

SEQ ID NO: 130007 - RNA, 1698 nt, Artificial Sequence; identical to SEQ ID NO: 130004
  derived and/or modified CDS sequence (opt3) from hemagglutinin__InfluenzaA__ABV30327

SEQ ID NO: 130008 - RNA, 1698 nt, Artificial Sequence; identical to SEQ ID NO: 129958
  derived and/or modified CDS sequence (opt3) from hemagglutinin__InfluenzaA__ABV30338

SEQ ID NO: 130009 - RNA, 1698 nt, Artificial Sequence; identical to SEQ ID NO: 129962
  derived and/or modified CDS sequence (opt3) from hemagglutinin__InfluenzaA__ABV30349

SEQ ID NO: 130010 - RNA, 1698 nt, Artificial Sequence
  derived and/or modified CDS sequence (opt3) from hemagglutinin__InfluenzaA__ABV30360
augaaggugaaacugcucguccuucugugcaccuucacagccacuuacgcugacacgaucuguauuggcuaucacgcaaacaauagcaccgauacaguugacacuguguuggagaagaacguaaccgugacacauuccgucaauuuacuggaagauucucacaacgggaaacuaugccuccugaagggaauagcgccccuucagcuggguaauuguucaguggccggcuggaucuuggggaacccugagugcgaacuccugauuaguaaagagagcugguccuacaucguugaaaccccaaauccggagaacggaacuuguuaucccggcaauuuugcugacuacgaggaacugagagagcaacucucuucggugagcucauucgaaagguuugagauuuucccuaaggagaguuccuggccaaaccauacagucaccggugugucugccagcugcucccacaaugggaagucaaguuuuuaucggaacuuacuguggcuuacgggcaaaaauggauuguaccccaaccugagcaagucuuaugcaaauaacaaagaaaaggagguucuaguacucuggggcgugcaucacccuccaaacaucggggaucagcgcgcccuguaccacacugaaaaugcuuacgucuccguggugucaagccauuauagucgacguuucacccccgagauagcaaaaagaccuaaggucagggaccaggaaggacggaucaacuacuauuggacacuucuggagccaggugauacuauuaucuuugaggccaauggcaacuugauugcuccgcgcuucgccuuugcgcucucuagaggguucggauccggcaucauaaccagcaaugcacccauggacgaaugugaugccaagugccagacaccucaaggugcuauuaacucgucucugccauuucagaauguucaccccgugaccaucggggaguguccuaaauacguaagguccgccaaguuacggauggugacgggacugcgcaacauuccaucaauccagagucgaggccucuucggcgcaaucgcuggguuuauugaaggagguuggacuggcauggucgacgggugguauggauaccaucaccagaaugagcaaggcagcgguuaugccgcggaucagaaauccacacagaacgccauagacgggaucaccaauaaggugaacucuguuauugaaaagaugaauacucaguucacagcagugggcaaagaguucaacaaacuugagagaaggauggaaaaucugaacaagaaggucgaugacggauuuuuggacaucuggaccuacaacgcugagcuacuggugcuccuggaaaaugagcggacgcuugauuuccacgacagcaacguuaaaaaucuguacgaaaagguaaaaucacaauugaagaacaaugccaaagagauaggcaacgggugcuuugaguucuaucauaaguguaaugaugaaugcauggagagugugaagaacggaaccuacgacuaucccaaauacuccgaagagagcaagcucaaucgugagaaaauugaugguaucaagcuggaaucuaugggcgucuaucagaucuuagcuauuuacucaacaguggccaguagccugguccuacucgugucccugggggcaaucucuuuuuggaugugcucgaacggaagccuucagugucgcauuugcauauga

SEQ ID NO: 130011 - RNA, 1698 nt, Artificial Sequence; identical to SEQ ID NO: 129962
  derived and/or modified CDS sequence (opt3) from hemagglutinin__InfluenzaA__ABV30371

SEQ ID NO: 130012 - RNA, 1701 nt, Artificial Sequence; identical to SEQ ID NO: 129777
  derived and/or modified CDS sequence (opt3) from hemagglutinin__InfluenzaA__ABV30382

SEQ ID NO: 130013 - RNA, 1701 nt, Artificial Sequence; identical to SEQ ID NO: 128678
  derived and/or modified CDS sequence (opt3) from hemagglutinin__InfluenzaA__ABV30393

SEQ ID NO: 130014 - RNA, 1701 nt, Artificial Sequence
  derived and/or modified CDS sequence (opt3) from hemagglutinin__InfluenzaA__ABV30404
augaagaccaucauugcccugagcuacauacucugccuuguguucgcucagaaacugcccggcaacgacaauuccacagcaacuuuguguuuagggcaccaugccgucccuaacggaacgaucguuaagaccauuacaaaugaucaaaucgaggugacuaacgcgaccgaacugguacagucuucaaguacaggugagauuugcgacagcccacaccagauccuagauggcgaaaauuguacccucauagacgcucugcuuggggauccgcagugcgacggauuucaaaacaaaaagugggaucuguucguggagagauccaaagccuauucuaaguguuaccccuaugacgucccugauuacgcaucguugaggucacucguggccagcaguggcacucuggaauuuaauaacgaguccuucaauuggacagguguuacccagaacgggacgucuagcgcuugcauccggcgcuccaauaacucauuuuucagucgacugaauuggcucacucauuuaaaguuuaaauauccagcacugaacgugaccaugcccaauaacgagaaguucgacaaacuuuacauuuggggaguccaccauccuggcacagauaacgaccagaucuuuuuguaugcccaggcuagcggccguauuacugugucuaccaagagaucccaacagacaguaaucccaaauauagggucaaggccccggguucgcaacauuccuagcagaaucaguauuuacuggaccaucgugaaaccaggagauauccugcuaauuaauucuacggguaaccucauagccccgaggggcuacuucaagauccgguccgggaaaagcucgauuaugcgcucugacgcgcccaucggaaaauguaauuccgaaugcauaacuccuaacggcucaauuccaaaugacaagcccuuucagaacgucaaucgaaucacauauggugcauguccuagauacgugaaacagaacacccugaagcuggccacugggaugaggaaugugccagagaaacaaacacggggaaucuucggcgcuauugccggcuuuaucgaaaacgggugggagggaauggucgaugguugguauggcuuccgucaccagaauagugaggggauuggacaggcagcugaccuuaagagcacccaagccgcgauagaucagaucaacggcaaauugaaucgccucauugguaagacgaacgaaaaguuccaccagaucgagaaagaauuuuccgagguugaagggagaauccaggaccuggagaaguacguggaggauaccaaaauugacuuauggucuuauaacgccgaucugcucguagcacuugaaaaucaacauacaauagaccugacugauagcgagaugaacaaguuguucgaaaagaccaagaagcagcuaagggagaaugcugaagacaugggcaacggaugcuuuaaaaucuaccacaagugugauaaugccugcauuggcucaauccggaacgggacauaugaccaugacguguaccgagaugaggcucugaauaaccgcuuccagauuaaaggagucgagcucaagagugguuacaaagacuggauccuguggauauccuuugccaucagcugcuuccuucuguguguggcauugcucggcuuuauuaugugggccugccagaaggggaauaucagauguaacauuugcaucuga

SEQ ID NO: 130015 - RNA, 1701 nt, Artificial Sequence
  derived and/or modified CDS sequence (opt3) from hemagglutinin__InfluenzaA__ABV30415
augaagaccaucauugcccugagcuacauacucugccuuguguucgcucagaaacugcccggcaucgacaacuccacagcaacuuuguguuuagggcaccaugccgucccuaauggaacgauuguuaagaccaucacaaacgaucaaauugaggugacuaaugcgaccgaacugguacagucuucaaguacagguggcaucugcgacagcccacaccagauacuagauggggagaacuguacccucaucgacgcucugcuuggagauccgcagugcgacggcuuucaaaauaaaaagugggaucuguucguggaaagauccaaagccuauucuaacuguuaccccuaugacgucccugauuacgcaucguugaggucacucguggccagcagugguacucuggaguuuaauaacgaauccuucaauugggcugggguuacacagaacggaaccucuagcgcaugcaagcggggcuccaauaacucauuuuucagucgccugaauuggcucacgcauagcaaguuuaaauauccagccuuaaacgugacuaugcccaauaacgaggaguucgacaagcuguacauuuggggcguccaccauccugggaccgauaacgaccagaucuuucuuuaugcucaggccucuggacgaauuacaguguccacuaaacguucacaacagaccguaaucccaaauauagguagcagacccaggguucggaacauuccuagucgcaucucuauuuacuggacaaucgugaagccaggcgauaucuugcugauuaauuccaccgggaaccuaauagcgccgagaggauacuucaaaaucaggagcggcaagucgucuauuaugcgguccgacgcacccaucgguaaguguaauucagaaugcauaacgccuaacgggaguauuccaaaugacaaacccuuucagaacgucaaucgcaucacuuauggagccuguccucgauacgugaagcagaacacacucaaacuggcuaccggcaugagaaaugugccagagaagcaaacuaggggcaucuucggggccauugcaggauuuaucgaaaacgguugggagggcauggucgaugggugguauggauuccggcaccagaauagcgagggcauuggucaggcugccgaccuuaaauccacacaagcggccauagaucagaucaacgggaagcugaaucguuugauuggcaaaaccaacgaaaaguuccaccagaucgagaaggaauuuucugagguugaaggacgcauccaggaccucgagaaauacguggaggauacgaagauugaccuguggagcuauaacgcagaauuacugguagcucucgagaaucaacauaccauagaucuuacagacucagaaaugaacaaacuguucgagaagacuaaaaagcaguugagagaaaaugccgaggauaugggcaacgggugcuuuaagaucuaccacaaaugugacaaugcuugcauuggaaguaucaggaacgguaccuaugaucaugacguguaccgggacgaggcccuaaauaaccgauuccagauuaaguccgucgaacugaaaagcggcuacaaggauuggauccucuggauaucuuuugcaaucucaugcuuccugcuuuguguggcccuguugggguuuauuaugugggcuugccagaaaggaaauauccgcuguaacauuugcaucuga

SEQ ID NO: 130016 - RNA, 1701 nt, Artificial Sequence; identical to SEQ ID NO: 129976
  derived and/or modified CDS sequence (opt3) from hemagglutinin__InfluenzaA__ABV30426

SEQ ID NO: 130017 - RNA, 1701 nt, Artificial Sequence
  derived and/or modified CDS sequence (opt3) from hemagglutinin__InfluenzaA__ABV30437
augaagaccaucauugcccugagcuacauacucugccuuguguucgcucagaaacugcccggcaacgacaauuccacagcaacuuuguguuuagggcaccaugccgucccuaacggaacgaucguuaagaccauuacaaaugaucaaaucgaggugacuaacgcgaccgaacugguacagucuucaaguacaggugagauuugcgacagcccacaccagauccuagauggcgaaaauuguacccucauagacgcucugcuuggggauccgcagugcgacggauuucaaaacaaaaagugggaucuguucguggagagauccaaagccuauucuaauuguuaccccuaugacgucccugauuacgcaucguugaggucacucguggccagcaguggcacucuggaauuuaacaaugaguccuucaacuggacagguguuacccagaaugggacgucuagcgcuugcauccggcgcuccaaccauucauuuuucagucgacugaauuggcucacucacuuaaaguuuaaguauccagcacugaacgugaccaugcccaauaacgagaaauucgacaaacuuuacauuuggggaguccaucacccuggcacagauaacgaccagaucuuuuuguaugcccaggcuagcggccguauuacugugucuaccaagagaucccaacagacaguaaucccaaauauagggucaaggccccggguucgcaacauuccuagcagaaucaguauuuacuggaccaucgugaagccaggagauauccugcuaauuaauucuacggguaaccucauagccccgaggggcuacuucaaaauccgguccggaaagagcucgauuaugcgcucugacgcgcccaucgggaaguguaauuccgaaugcauaacuccuaacggcucaauuccaaaugacaaacccuuucagaacgucaaucgaaucacauauggugcauguccuagauacgugaagcagaacacccugaaacuugccacugggaugaggaaugugccagagaagcaaacacggggaaucuucggcgcuauugccggcuuuaucgaaaacgggugggagggaauggucgaugguugguauggcuuccgucaccagaauagugaggggauuggacaggcagcugaccugaaaagcacccaagccgcgauagaucagaucaacggcaaguugaaucgccucauugguaaaacgaacgaaaaguuccaucagaucgagaaggaauuuuccgagguugaagggagaauccaggaccuggagaaauacguggaggauaccaagauugacuuauggucuuauaacgccgaacugcucguagcacuugagaaucaacacacaauagaucugacugacagcgaaaugaacaaauuguucgagaagaccaaaaagcagcuaagggaaaaugcugaggauaugggcaacggaugcuuuaagaucuaccauaaaugugacaaugccugcauuggcucaauccggaacgggacauaugaucacgacguguaccgagacgaggcucugaauaaccgcuuccagauuaagggagucgaacucaaaagugguuacaaggauuggauccuguggauauccuuugccaucagcugcuuccuucuguguguggcauugcucggcuuuauuaugugggccugccagaaagggaauaucagauguaacauuugcaucuga

SEQ ID NO: 130018 - RNA, 1701 nt, Artificial Sequence; identical to SEQ ID NO: 129976
  derived and/or modified CDS sequence (opt3) from hemagglutinin__InfluenzaA__ABV30448

SEQ ID NO: 130019 - RNA, 1698 nt, Artificial Sequence
  derived and/or modified CDS sequence (opt3) from hemagglutinin__InfluenzaA__ABV30459
augaaggugaaacugcucauccuucugugcaccuucacagccacuuacgcugacacgauuuguauaggcuaucacgcaaacaauagcaccgauacagucgacacuguuuuggagaagaacgugaccguaacacauuccgugaauuuacuggaagauucucacaacgggaaacuaugccuccugaagggaaucgcgccccuucagcuggguaauuguucagucgccggcuggauuuuggggaacccugagugcgaacuccugaucaguaaagagagcugguccuacauuguggaagcuccaaauccggagaacggaaccuguuaucccggcuacuuugccgacuaugaggaacugagagagcaacucucuucgguuagcucauucgaaagguuugagaucuucccuaaggagaguuccuggccaaaucauacugugacaggugucucugcaagcugcucccacaacgggaagucaaguuuuuaccggaauuuacuguggcuuaccggcaaaaacggauuguaucccaaucugagcaagucuuacgccaacaauaaagaaaaggaggugcuaguacucuggggcguucaucacccuccaaacauaggggaucagcgcgcucuguaccacacggaaaacgcauauguguccgucgugucaagccauuacagucgacguuucacucccgagaucgccaaaagaccuaaggugagggaccaggaaggacggauuaauuauuacuggacccuucuggagccaggugauacaaucauuuuugaggcuaacggcaauuugaucgccccgcgcuucgcguuugcacucucuagaggguucggauccggcauaauuacuagcaacgcccccauggacgaaugugaugcuaagugccagaccccucaaggugccaucaauucgucucugccauuucagaacguccaccccguuacaauuggggaguguccuaaauaugugagguccaccaaguuacggaugguaacgggacugcgcaauaucccaucaauccagagucgaggccucuucggcgcaauugcuggguuuauagaaggagguuggacuggcaugguggacgggugguacggauaucaucaccagaacgagcaaggcagcgguuacgccgcggaucagaaauccacacagaaugccaucaacgggauuaccaauaaggucaacucugugaucgaaaagaugaauacucaguucacagcaguuggcaaagaguucaacaaacuugagagaaggauggaaaaucugaacaagaagguggacgauggauuuuuggacauauggaccuacaacgcugagcuacugguccuccuggaaaaugagcggacgcuugacuuccacgauagcaacgugaaaaaucuguaugaaaagguaaaaucacaauugaagaacaaugccaaagagauuggcaacgggugcuuugaguucuaccauaaguguaaugacgaaugcauggagaguguuaagaacggaaccuaugauuaccccaaauauuccgaagagagcaagcucaaucgugagaaaaucgacggugugaagcuggaaucuaugggcgucuaccagaucuuagcuauuuauucaacaguggccaguagccugguccuacucgugucccugggggcaaucucuuuuuggaugugcucgaacggaagccuucagugucgcauuugcauauga

SEQ ID NO: 130020 - RNA, 1701 nt, Artificial Sequence; identical to SEQ ID NO: 129976
  derived and/or modified CDS sequence (opt3) from hemagglutinin__InfluenzaA__ABV30470

SEQ ID NO: 130021 - RNA, 1698 nt, Artificial Sequence; identical to SEQ ID NO: 129958
  derived and/or modified CDS sequence (opt3) from hemagglutinin__InfluenzaA__ABV30492

SEQ ID NO: 130022 - RNA, 1698 nt, Artificial Sequence
  derived and/or modified CDS sequence (opt3) from hemagglutinin__InfluenzaA__ABV30503
augaaggugaaacugcucauccuucugugcaccuucacagccacuuacgcugacacgauuuguauaggcuaucacgcaaacaauagcaccgauacagucgacacuguuuuggagaagaacgugaccguaacacauuccgugaauuuacuggaagauucucacaacgggaaacuaugccuccugaagggaaucgcgccccuucagcuggguaauuguucagucgccggcuggauuuuggggaacccugagugcgaacuccugaucaguaaagagagcugguccuacauuguggaaaccccaaauccggagaacggaacuuguuaucccggcuacuuugcugacuaugaggaacugagagagcaacucucuucgguuagcucauucgaaagguuugagaucuucccuaaggagaguuccuggccaaaucauacaauaaccggugugucugccagcugcucccacaacgggaagucaaguuuuuaccggaauuuacuguggcuuacgggcaaaaacggauuguaucccaaucugagcaagucuuacgcaaacaauaaagaaaaggagguccuagugcucuggggcguacaucacccuccaaacaucggggaucagcgcgcccuguaccacacugaaaacgcuuauguuuccguggucucaagccauuacagucgacguuucacccccgagauugcaaaaagaccuaaggugagggaccaggaaggacggaucaauuauuacuggacacuucuggagccaggugauacuauuaucuuugaggccaacggcaauuugauagcuccgcgcuucgccuuugcgcucucuagaggguucggauccggcauuaucaccagcaacgcacccauggacgaaugugaugccaagugccagacaccucaaggugcuauuaauucgucucugccauuucagaacgugcaccccgucaccaucggggaguguccuaaauauguuagguccacgaaguuacggauggugacuggacugcgcaauaucccaucaauucagagucgaggccucuucggcgccauagcaggguuuaucgaaggagguuggacaggcaugguagacgggugguacggauaucaucaccagaacgagcaaggcagcgguuacgcugccgaucagaaauccacccagaaugcgauuaacgggaucacuaauaaggugaacucugucauagaaaagaugaauacacaguucaccgccgugggcaaagaguucaacaaacuugagagaaggauggaaaaucugaacaagaagguugacgauggauuuuuggacauuuggacguacaacgcagagcuacuggugcuccuggaaaaugagcggacccuugacuuccacgauagcaacgucaaaaaucuguaugaaaaggugaaaucacaauugaagaacaaugcuaaagagaucggcaacgggugcuuugaguucuaccauaaguguaaugacgaaugcauggagaguguaaagaacggaacauaugauuaccccaaauauuccgaagagagcaagcucaaucgugagaaaaucgacgguguuaagcuggaaucuaugggcguguaccagauuuuagccaucuauucaacugucgcuaguagccuggugcuacucgucucccugggggccauuucuuuuuggaugugcucgaacggaagccuucagugucgcauaugcaucuga

SEQ ID NO: 130023 - RNA, 1701 nt, Artificial Sequence; identical to SEQ ID NO: 129976
  derived and/or modified CDS sequence (opt3) from hemagglutinin__InfluenzaA__ABV30514

SEQ ID NO: 130024 - RNA, 1698 nt, Artificial Sequence
  derived and/or modified CDS sequence (opt3) from hemagglutinin__InfluenzaA__ABV30525
augaaggugaaacugcucguccuucugugcaccuucacagccacuuacgcugacacgaucuguauuggcuaucacgcaaacaauagcaccgauacaguugacacuguguuggagaagaacguaaccgugacacauuccgucaauuuacuggaagauucucacaacgggaaacuaugccuccugaagggaauagcgccccuucagcuggguaauuguucaguggccggcuggaucuuggggaacccugagugcgaacuccugauuaguaaagagagcugguccuacaucguugaaaccccaaauccggagaacggaacuuguuaucccggcuacuuugcugacuaugaggaacugagagagcaacucucuucggugagcucauucgaaagguuugagauuuucccuaaggagaguuccuggccaaaucauacagucaccggugugucugccagcugcucccacucagggaagaguagcuuuuaccggaacuuacuguggcuuacgggcaaaaauggauuguaucccaaccugucuaaguccuacgcaaauaacaaagaaaaggagguucuaguacucuggggcgugcaucacccuccaaauaucggggaucagcgcgcccuguaccacacugaaaacgcuuaugucucaguggugagcagucauuacucucgacguuucacccccgagauagcaaaaagaccuaaggucagggaccaggaaggacggaucaacuauuacuggacacuucuggagccaggugauacuauuaucuuugaggccaauggcaacuugauugcuccgcgcuucgccuuugcgcucuccagaggguucggaagcggcaucauaaccucgaauacacccaugggugaaugugacgcaaagugccagaccccucaaggggccauuaacucuucccugccauuucagaauguucaccccgugacgaucggagaguguccuaaauauguaaggucagcuaaguuacggauggugacuggccugcgcaacauuccaaguauccagagccgaggccucuucggggccaucgcaggauuuauugaagguggcuggacagggauggucgauggaugguacggcuaucaucaccagaaugagcaagguuccggguacgcugccgaccagaaaucuacccagaacgcgauaaauggcaucacuaacaaggugaauagcguuauugaaaagaugaacacacaguucaccgccgugggaaaagaguucaauaaacuugagagaaggauggaaaaccugaauaagaaggucgaugacggcuuuuuggauaucuggacguacaacgcagagcuacuggugcuccuggaaaacgagcggacccuugacuuccacgacucaaauguuaaaaaccuguaugaaaagguaaaaagucaauugaagaauaacgcuaaagagauagggaauggaugcuuugaguucuaccauaaguguaacgaugaaugcauggaguccgugaagaaugguacauaugacuaccccaaauauagcgaagagucuaagcucaaccgugagaaaauugauggcgucaagcuggaaucaauggggguguaccagaucuuagccaucuauaguacugucgcuagcucccuggugcuacucguuucucugggagccauuucguuuuggaugugcagcaauggcucccuucagugucgcaucugcauuuga

SEQ ID NO: 130025 - RNA, 1698 nt, Artificial Sequence; identical to SEQ ID NO: 129962
  derived and/or modified CDS sequence (opt3) from hemagglutinin__InfluenzaA__ABV30536

SEQ ID NO: 130026 - RNA, 1698 nt, Artificial Sequence; identical to SEQ ID NO: 129969
  derived and/or modified CDS sequence (opt3) from hemagglutinin__InfluenzaA__ABV30547

SEQ ID NO: 130027 - RNA, 1698 nt, Artificial Sequence; identical to SEQ ID NO: 129962
  derived and/or modified CDS sequence (opt3) from hemagglutinin__InfluenzaA__ABV30558

SEQ ID NO: 130028 - RNA, 1698 nt, Artificial Sequence
  derived and/or modified CDS sequence (opt3) from hemagglutinin__InfluenzaA__ABV30569
augaaggugaaacugcucauccuucugugcaccuucacagccacuuacgcugacacgauuuguauaggcuaucacgcaaacaauagcaccgauacagucgacacuguuuuggagaagaacgugaccguaacacauuccgugaauuuacuggaagauaaccacaaugggaaacuaugccuccugaagggaaucgcgccccuucagcuggguaacuguucugucgccggcuggauuuuggggaauccugagugcgaacuccugaucucaaaagagaguuggagcuacauuguggaaaccccaaacccggagaauggaacuuguuaucccggcuacuuugcugacuaugaggaacugagagagcaacucuccucuguuucgucauucgaaagguuugagaucuucccuaaggagagcaguuggccaaaccauacagugaccggugucuccgccucuugcagccacaaugggaaguccucauuuuaccggaacuuacuguggcuuacgggcaaaaauggauuguaucccaaccugaguaagagcuacgcaaauaacaaagaaaaggaggugcuaguacucuggggcguucaucacccuccaaacauaggggaucagcgcgcccuguaccacacugaaaaugcuuaugugucugucguguccucacauuacagccgacguuucacccccgagaucgcaaaaagaccuaaggugagggaccaggaaggacggauuaacuauuacuggacacuucuggagccaggugauacuaucauuuuugaggccaauggcaacuugaucgcuccgcgcuucgccuuugcgcucaguagaggguucggaucuggcauaauuaccuccaaugcacccauggacgaaugugaugccaagugccagacaccucaaggugcuaucaacagcucgcugccauuucagaauguccaccccguuaccauuggggaguguccuaaauaugugaggucuacgaaguuacggaugguaacuggacugcgcaacaucccauccauccagucacgaggccucuucggcgccauugcaggguuuauagaaggagguuggacaggcaugguggacgggugguacggauaucaucaccagaaugagcaaggcagugguuacgcugccgaucagaaaagcacccagaacgcgaucaaugggauuacuaacaaggucaauuccgugaucgaaaagaugaacacacaguucaccgccguuggcaaagaguucaauaaacuugagagaaggauggaaaaccugaacaagaagguggacgauggauuuuuggacauauggacguacaaugcagagcuacugguccuccuggaaaacgagcggacccuugacuuccacgauucuaaugugaaaaaccuguaugaaaagguaaaaagccaauugaagaauaacgcuaaagagauuggcaaugggugcuuugaguucuaccauaaguguaacgacgaaugcauggagucaguuaagaauggaacauaugauuaccccaaauauagugaagaguccaagcucaaccgugagaaaaucgacggugugaagcuggaaagcaugggcgucuaccagaucuuagccauuuauucuacuguggcuucaagucugguccuacucgugagccugggggccaucuccuuuuggaugugcucuaauggaucgcuucagugucgcauuugcauauga

SEQ ID NO: 130029 - RNA, 1698 nt, Artificial Sequence; identical to SEQ ID NO: 129962
  derived and/or modified CDS sequence (opt3) from hemagglutinin__InfluenzaA__ABV30580

SEQ ID NO: 130030 - RNA, 1698 nt, Artificial Sequence; identical to SEQ ID NO: 129958
  derived and/or modified CDS sequence (opt3) from hemagglutinin__InfluenzaA__ABV30591

SEQ ID NO: 130031 - RNA, 1698 nt, Artificial Sequence; identical to SEQ ID NO: 129958
  derived and/or modified CDS sequence (opt3) from hemagglutinin__InfluenzaA__ABV30602

SEQ ID NO: 130032 - RNA, 1698 nt, Artificial Sequence
  derived and/or modified CDS sequence (opt3) from hemagglutinin__InfluenzaA__ABV30613
augaaggugaaacugcucauccuucugugcaccuucacagccacuuacgcugacacgauuuguauaggcuaucacgcaaacaauagcaccgauacagucgacacuguuuuggagaagaacgugaccguaacacauuccgugaauuuacuggaagauucucacaacgggaaacuaugccuccugaagggaaucgcgccccuucagcuggguaauuguucagucgccggcuggauuuuggggaacccugagugcgaacuccugaucaguaaagagagcugguccuacauuguggaaaccccaaauccggagaacggaacuuguuaucccggcuacuuugcugacuaugaggaacugagagagcaacucucuucgguuagcucauucgaaagguuugagaucuucccuaaggagaguuccuggccaaaucauacagugaccggugucucugccagcugcucccacaacgggaagucaaguuuuuaccggaauuuacuguggcuuacgggcaaaaacggauuguaucccaaucugagcaagucuuacgcaaacaauaaagaaaaggaggugcuaguacucuggggcguucaucacccuccaaacauaggggaucagcgcgcccuguaccacacugaaaacgcuuauguguccgucgugucaagccauuacagucgacguuucacccccgagaucgcaaaaagaccuaaggugagggaccaggaaggacggauuaauuauuacuggacacuucuggagccaggugauacuaucauuuuugaggccaacggcaauuugaucgcuccgcgcuucgccuuugcgcucucuagaggguucggauccggcauaauuaccagcaacgcacccauggacgaaugugaugccaagugccagacaccucaaggugcuaucaauucgucucugccauuucagaacguccaccccguuaccauuggggaguguccuaaauaugugagguccacgaaguuacggaugguaacuggacugcgcaauaucccaucaauccagagucgaggccucuucggcgccauugcaggguuuauagaaggagguuggacaggcaugguggacgggugguacggauaucaucaccagaacgagcaaggcagcgguuacgcugccgaucagaaauccacccagaaugcgaucaacgggauuacuaauaaggucaacucugugaucgaaaagaugaauacacaguucaccgccguuggcaaagaguucaacaaacuugagagaaggaugaagaaucugaacaagaaaguggacgauggauuuuuggacauauggacguacaacgcagaacuacugguccuccuggagaaugaacggacccuugacuuccacgauagcaacgugaagaaucuguaugagaaaguaaagucacaauugaaaaacaaugcuaaggaaauuggcaacgggugcuuugaguucuaccauaaguguaaugacgagugcauggaaaguguuaaaaacggaacauaugauuaccccaaguauuccgaggaaagcaaacucaaucgugagaagaucgacggugugaaacuggagucuaugggcgucuaccagaucuuagccauuuauucaacuguggcuaguagccugguccuacucgugucccugggggccaucucuuuuuggaugugcucgaacggaagccuucagugucgcauuugcauauga

SEQ ID NO: 130033 - RNA, 1698 nt, Artificial Sequence; identical to SEQ ID NO: 129958
  derived and/or modified CDS sequence (opt3) from hemagglutinin__InfluenzaA__ABV30624

SEQ ID NO: 130034 - RNA, 1701 nt, Artificial Sequence
  derived and/or modified CDS sequence (opt3) from hemagglutinin__InfluenzaA__ABV30646
augaagaccaucauugcccugagcuacauacucugccuuguguucgcucagaaacugcccggcaacgacaauuccacagcaacuuuguguuuagggcaccaugccgucccuaacggaacgaucguuaagaccauuacaaaugaucaaaucgaggugacuaacgcgaccgaacugguacagucuucaaguacaggugagauuugcgacagcccacaccagauccuagauggcgaaaauuguacccucauagacgcucugcuuggggauccgcagugcgacggauuucaaaacaaaaagugggaucuguucguggagagauccaaagccuauucuaauuguuaccccuaugacgucccugauuacgcaucguugaggucacucguggccagcaguggcacucuggaauuuaacaaugaguccuucaacuggacagguguuacccagaaugggacgucuagcgcuugcauccggcgcuccaacaauucauuuuucagucgacugaacuggcucacucauuuaaaguuuaaguauccagcacugaaugugaccaugcccaacaacgagaaauucgacaaacuuuacauuuggggaguccaccauccuggcacauauaaugaucagaucuuuuuguacgcccaggcuagcggccguauuacugugucuaccaagagaucccaacagacaguaaucccaaacauagggucaaggccccggguucgcaauauuccuagcagaaucaguauuuacuggaccaucgugaagccaggagacauccugcuaauuaacucuacggguaaucucauagccccgaggggcuauuucaaaauccgguccggaaagagcucgauuaugcgcucugaugcgcccaucgggaaguguaacuccgaaugcauaacuccuaauggcucaauuccaaacgacaaacccuuucagaaugucaaccgaaucacauacggugcauguccuagauaugugaagcagaauacccugaaacuugccacugggaugaggaacgugccagagaagcaaacacggggaaucuucggcgcuauugccggcuuuaucgaaaaugggugggagggaauggucgacgguugguacggcuuccgucaccagaacagugaggggauuggacaggcagcugaucugaaaagcacccaagccgcgauagaccagaucaauggcaaguugaaccgccucauugguaaaacgaacgaaaaguuccaccagaucgagaaggaauuuuccgagguugaagggagaauccaggaucuggagaaauauguggaggacaccaagauugauuuauggucuuacaaugccgaacugcucguagcacuugagaaccaacauacaauagaccugacugauagcgaaaugaauaaauuguucgagaagaccaaaaagcagcuaagggaaaacgcugaggacaugggcaauggaugcuuuaagaucuaucacaaaugugauaacgccugcauuggcucaauccggaaugggacauacgaccaugauguguaccgagacgaggcucugaacaaucgcuuccagauuaagggagucgaacucaaaagugguuauaaggacuggauccuguggauauccuuugccaucagcugcuuccuucuguguguggcauugcucggcuuuauuaugugggccugccagaaagggaacaucagauguaauauuugcaucuga

SEQ ID NO: 130035 - RNA, 1701 nt, Artificial Sequence
  derived and/or modified CDS sequence (opt3) from hemagglutinin__InfluenzaA__ABV30657
augaagaccaucauugcccugagcuacauacucugccuuguguucgcucagaaacugcccggcaacgacaauuccacagcaacuuuguguuuagggcaccaugccgucccuaacggaacgaucguuaagaccauuacaaaugaucaaaucgaggugacuaacgcgaccgaacugguacagucuucaaguacaggugagauuugcgacagcccacaccagauccuagauggcgaaaauuguacccucauagacgcucugcuuggggauccgcagugcgacggauuucaaaacaaaaagugggaucuguucguggagagauccaaagccuauucuaauuguuaccccuaugacgucccugauuacgcaucguugaggucacucguggccagcaguggcacucuggaauuuaacaaugaguccuucaacuggacagguguuacccagaaugggacgucuagcgcuugcauccggcgcuccaacaauucauuuuucagucgacugaacuggcucacucauuuaaaguuuaaguauccagcacugaaugugaccaugcccaacaacgagaaauucgacaaacuuuacauuuggggaguccaccauccuggcacagauaaugaccagguguuuuuguaugcccaggcuagcggccguaucacuguaucuaccaagagaucccaacagacaguuauuccaaacaucgggucaaggccccgggugcgcaauauaccuagcagaauuaguaucuacuggaccauugucaagccaggagauauccugcuaaucaacucuacggguaaucucauugccccgaggggcuacuucaaaauacgguccggaaagagcucgaucaugcgcucugacgcgcccauugggaaguguaacuccgaaugcaucacuccuaauggcucaauaccaaacgacaaacccuuucagaaugugaaccgaauuacauauggugcauguccuagauacgugaagcagaauacccugaaacuugccacugggaugaggaacgucccagagaagcaaacacggggaaucuucggcgcuaucgccggcuuuauugaaaaugggugggagggaaugguugaugguugguauggcuuccgucaccagaacagugaggggaucggacaggcagcugaccugaaaagcacccaagccgcgauugaucagauaaauggcaaguugaaccgccucaucgguaaaacgaacgaaaaguuccaccagauugagaaggaauuuuccgagguggaagggagaauccaggaccuggagaaauacguagaggauaccaagaucgacuuauggucuuauaaugccgaacugcucguggcacuugagaaccaacauacaauugaucugacugacagcgaaaugaauaaauuguucgagaagaccaaaaagcagcuaagggaaaacgcugaggauaugggcaauggaugcuuuaagauauaccacaaaugugacaacgccugcaucggcucaauucggaaugggacauaugaucaugacgucuaccgagacgaggcucugaacaaucgcuuccagaucaagggaguggaacucaaaagugguuacaaggauuggauucuguggaucuccuuugccauaagcugcuuccuucuguguguugcauugcucggcuuuaucaugugggccugccagaaagggaacauuagauguaauaucugcauuuga

SEQ ID NO: 130036 - RNA, 1701 nt, Artificial Sequence; identical to SEQ ID NO: 130035
  derived and/or modified CDS sequence (opt3) from hemagglutinin__InfluenzaA__ABV45860

SEQ ID NO: 130037 - RNA, 1698 nt, Artificial Sequence; identical to SEQ ID NO: 130003
  derived and/or modified CDS sequence (opt3) from hemagglutinin__InfluenzaA__ABV45871

SEQ ID NO: 130038 - RNA, 1698 nt, Artificial Sequence; identical to SEQ ID NO: 129962
  derived and/or modified CDS sequence (opt3) from hemagglutinin__InfluenzaA__ABV45882

SEQ ID NO: 130039 - RNA, 1698 nt, Artificial Sequence; identical to SEQ ID NO: 129969
  derived and/or modified CDS sequence (opt3) from hemagglutinin__InfluenzaA__ABV45893

SEQ ID NO: 130040 - RNA, 1701 nt, Artificial Sequence; identical to SEQ ID NO: 129777
  derived and/or modified CDS sequence (opt3) from hemagglutinin__InfluenzaA__ABV45904

SEQ ID NO: 130041 - RNA, 1698 nt, Artificial Sequence; identical to SEQ ID NO: 129969
  derived and/or modified CDS sequence (opt3) from hemagglutinin__InfluenzaA__ABV45926

SEQ ID NO: 130042 - RNA, 1698 nt, Artificial Sequence
  derived and/or modified CDS sequence (opt3) from hemagglutinin__InfluenzaA__ABV45937
augaaggugaaacugcucguccuucugugcaccuucacagccacuuacgcugacacgaucuguauuggcuaucacgcaaacaauagcaccgauacaguugacacuguguuggagaagaacguaaccgugacacauuccgucaauuuacuggaagauucucacaacgggaaacuaugccuccugaagggaauagcgccccuucagcuggguaauuguucaguggccggcuggaucuuggggaacccugagugcgaacuccugauuaguaaagagagcugguccuacaucguugaaaccccaaauccggagaacggaacuuguuaucccggcuacuuugcugacuaugaggaacugagagagcaacucucuucggugagcucauucgaaagguuugagauuuucccuaaggagaguuccuggccaaaucauacagucaccggugugucugccagcugcucccacaacgggaagucaaguuuuuaccggaauuuacuguggcuuacgggcaaaaacggauuguaucccaaucugagcaagucuuacgcaaacaauaaagaaaaggagguucuaguacucuggggcgugcaucacccuccaaacaucggggaucagcgcgcccuguaccacacugaaaacgcuuaugucuccguggugucaagccauuacagucgacguuucacccccgagauagcaaaaagaccuaaggucagggaccaggaaggacggaucaauuauuacuggacacuucuggagccaggugauacuauuaucuuugagaccaacggcaauuugauugccccgcgcuucgcuuuugcccucucuagaggguucggauccggcaucauaacaagcaacgcgcccaugggugaaugugacgcaaagugccagaccccucaaggggccauuaauucgucucugccauuucagaacguucaccccgugacgaucggagaguguccuaaauauguaagguccgcuaaguuacggauggugacuggccugcgcaauauuccaucaauccagagucgaggccucuucggggccaucgcaggauuuauugaagguggcuggacagggauggucgauggaugguacggcuaucaucaccagaacgagcaagguagcggguacgcugccgaccagaaauccacccagaaugcgauaaacggcaucacuaauaaggugaacucuguuauugaaaagaugaauacacaguucaccgccgugggaaaagaguucaacaaacuugagagaaggauggaaaaucugaacaagaaggucgaugacggcuuuuuggauaucuggacguacaacgcagagcuacuggugcuccuggaaaaugagcggacccuugacuuccacgacagcaacguuaaaaaucuguaugaaaagguaaaaucacaauugaagaacaaugcuaaagagauagggaacggaugcuuugaguucuaccauaaguguaaugaugaaugcauggagagugugaagaacgguacauaugacuaccccaaauauuccgaagagagcaagcucaaucgugagaaaauugauggcgucaagcuggaaucuauggggguguaccagaucuuagccaucuauucaacugucgcuaguagccuggugcuacucguuucccugggagccauuucuuuuuggaugugcucgaacggcagccuucagugucgcaucugcauuuga

SEQ ID NO: 130043 - RNA, 1698 nt, Artificial Sequence; identical to SEQ ID NO: 129995
  derived and/or modified CDS sequence (opt3) from hemagglutinin__InfluenzaA__ABV45948

SEQ ID NO: 130044 - RNA, 1698 nt, Artificial Sequence; identical to SEQ ID NO: 129962
  derived and/or modified CDS sequence (opt3) from hemagglutinin__InfluenzaA__ABV45959

SEQ ID NO: 130045 - RNA, 1701 nt, Artificial Sequence
  derived and/or modified CDS sequence (opt3) from hemagglutinin__InfluenzaA__ABV45970
augaagaccaucauugcccugagcuacauacucugccuuguguucgcucagaaacugcccggcaacgacaauuccacagcaacuuuguguuuagggcaccaugccgucccuaacggaacgaucguuaagaccauuacaaaugaucaaaucgaggugacuaacgcgaccgaacugguacagucuucaaguacaggugagauuugcgacagcccacaccagauccuagauggcgaaaauuguacccucauagacgcucugcuuggggauccgcagugcgacggauuucaaaacaaaaagugggaucuguucguggagagauccaaagccuauucuaauuguuaccccuaugacgucccugaucaugcaucguugaggucacucguggccagcaguggcacucuggaauuuaacaaugaguccuucaacuggacagguguuacccagaaugggacgucuagcgcuugcauccggcgcuccaacaauucauuuuucagucgacugaacuggcucacucacuuaaaguuuaaguacccagcacugaaugugaccaugcccaacaacgagaaauucgacaaacuuuauauuuggggaguccaucacccuggcacagauaaugaccagaucuuuuuguacgcccaggcuagcggccguauuacugugucuaccaagagaucccaacagacaguaaucccaaacauagggucaaggccccggguucgcaauauuccuagcagaaucaguauuuauuggaccaucgugaagccaggagauauccugcuaauuaacucuacggguaaucucauagccccgaggggcuacuucaaaauccaguccggaaagagcucgauuaugcggucugacgcgcccaucgggaaguguaacuccgaaugcauaacuccuaauggcucaauuccaaacgacaaacccuuucagaaugucaaccgcaucacauacggugcauguccucgauaugugaagcaaaauacccugaaacuugccacugggaugagaaacgugccagagaagcagacaaggggaaucuucggcgcuauugccggcuuuaucgaaaaugggugggagggaauggucgaugguugguacggcuuccggcaccagaacagugaggggauuggacaagcagcugaccugaaaagcacccaggccgcgauagaucagaucaauggcaaguugaaccgucucauugguaaaacgaacgaaaaguuccaucagaucgagaaggaauuuuccgagguugaagggcgcauccaagaccuggagaaauauguggaggauaccaagauugacuuauggucuuacaaugccgaacugcucguagcacuugagaaccagcacacaauagaucugacugacagcgaaaugaauaaauuguucgagaagaccaaaaagcagcuaagagaaaacgcugaggauaugggcaauggaugcuuuaagaucuaucauaaaugugacaacgccugcauuggcucaaucaggaaugggacauacgaucacgacguguaucgggacgaggcucugaacaaucgauuccagauuaagggagucgaacucaaaagugguuacaaggauuggauccuguggauauccuuugccaucagcugcuuccuucuguguguggcauugcucggcuuuauuaugugggccugccaaaaagggaacauccgcuguaauauuugcaucuga

SEQ ID NO: 130046 - RNA, 1701 nt, Artificial Sequence
  derived and/or modified CDS sequence (opt3) from hemagglutinin__InfluenzaA__ABV45981
augaagaccaucauugcccugagcuacauacucugccuuguguucgcucagaaacugcccggcaacgacaauuccacagcaacuuuguguuuagggcaccaugccgucccuaacggaacgaucguuaagaccauuacaaaugaucaaaucgaggugacuaacgcgaccgaacugguacagucuucaaguacaggugagauuugcgacagcccacaccagauccuagauggcgaaaauuguacccucauagacgcucugcuuggggauccgcagugcgacggauuucaaaacaaaaagugggaucuguucguggagagauccaaagccuauucuaauuguuaccccuaugacgucccugauuacgcaucguugaggucacucguggccagcaguggcacucuggaauuuaacaaugaguccuucaacuggacagguguuacccagaaugggacgucuagcgcuugcauccggcgcuccaacaauucauuuuucagucgacugaacuggcucacucauuuaaaguuuaaguauccagcacugaaugugaccaugcccaacaacgagaaauucgacaaacuuuacauuuggggaguccaccauccuggcacagauaaugaccagaucuuuuuguaugcccaggcuagcggccguauuacugugucuaccaagagaucccaacagacaguaaucccaaacauagggucaaggccccggguucgcaauauuccuagcagaaucaguauuuacuggaccaucgugaagccaggagauauccugcuaauuaacucuacggguaaucucauagccccgaggggcuacuucaaaauccgguccggaaagagcucgauuaugcgcucugacgcgcccaucgggaaguguaacuccgaaugcauaacuccuaauggcucaauuccaaacgacaaacccuuucagaaugucaaccgaaucacauauggugcauguccuagauacgugaagcagaauacccugaaacuugccacugggaugaggaacgugccagagaagcaaacacggggaaucuucggcgcuauugccggcuuuaucgaaaaugggugggagggaauggucgaugguugguauggcuuccgucaccagaacagugaggggauuggacaggcagcugaccugaaaagcacccaagccgcgauagaucagaucaauggcaaguugaaccgccucauugguaaaacgaacgaaaaguuccaccagaucgagaaggaauuuuccgagguugaagggagaauccaggaccuggagaaauacguggaggauaccaagauugacuuauggucuuauaaugccgaacugcucguagcacuugagaaccaacauacaauagaucugacugacagcgaaaugaauaaauuguucgagaagaccaaaaagcagcuaagggaaaacgcugaggauaugggcaauggaugcuuuaagaucuaccacaaaugugacaacgccugcauuggcucaauccggaaugggacauaugaucaugacguguaccgagacgaggcucugaacaaucgcuuccagauuaagggagucgaacucaaaagugguuacaaggauuggaucauauggaucuccuuugccauuagcugcuuccugcuuuguguggcacuguugggcuuuaucaugugggccugccagaaagggaacauuagauguaauaucugcauauga

SEQ ID NO: 130047 - RNA, 1698 nt, Artificial Sequence
  derived and/or modified CDS sequence (opt3) from hemagglutinin__InfluenzaA__ABV82551
augaaggugaaacugcucguccuucugugcaccuucacagccacuuacgcugacacgaucuguauuggcuaucacgcaaacaauagcaccgauacaguugacacuguguuggagaagaacguaaccgugacacauuccgucaauuuacuggaagauucucacaacgggaaacuaugccuccugaagggaauagcgccccuucagcuggguaauuguucaguggccggcuggaucuuggggaacccugagugcgaacuccugauuaguaaagagagcugguccuacaucguugaaaccccaaauccggagaacggaacuuguuaucccggcuacuuugcugacuaugaggaacugagagagcaacucucuucggugagcucauucgaaagguuugagauuuucccuaaggagaguuccuggccaaaucauacagucaccggugugucugccagcugcucccacaacggggaaucaaguuuuuaccggaauuuacuguggcuuacggagaagaacggauuguaucccaaucugagcaaaucuuacgcaaacaauaaggaaaaagagguucuaguacucuggggcgugcaucacccuccaaacaucggcgaucagcgcgcccuguaccacacugaaaacgcuuaugucuccguggugucaagccauuacagucgacguuucacccccgagauagcaaagagaccuaaagucagggaccaggaggggcggaucaauuauuacuggacacuucuggaaccaggagauacuauuaucuuugaggccaacgguaauuugauugcuccgcgcuucgccuuugcgcucucuagaggcuucggguccggaaucauaaccagcaacgcacccauggacaagugugaugccaagugccagacaccucaaggcgcuauuaauucgucucugccauuucagaacguucaccccgugaccaucggugaauguccuaaauauguaagguccacgaaguuacggauggugacugggcugcgcaauauuccaucaauccagagucgaggacucuucggcgccaucgcaggcuuuauugaagggggauggacagguauggucgacggcugguacggguaucaucaccagaacgaacaaggaagcggcuacgcugccgaucagaaauccacccagaaugcgauaaacgguaucacuaauaaggugaacucuguuauugagaaaaugaauacacaguucaccgccguggggaaggaguucaacaaacuugaaagaaggauggagaaucugaacaagaaggucgacgauggcuuuuuggacaucuggacguacaacgcagaacuacuggugcuccuggagaaugaacggacccuugacuuccacgauagcaacguuaaaaaucuguaugagaagguaaaaucacaauugaagaacaaugcuaaagagauaggaaacggcugcuuugaguucuaccauaaguguaaugacgagugcauggaaagugugaagaacgggacauaugauuaccccaaauauuccgaggagagcaagcucaaucgugagaaaauugacggagucaagcuggaaucuauggguguguaccagaucuuagccaucuauucaacugucgcuaguagccuggugcuacucguuucccugggcgccauuucuuuuuggaugugcucgaacgggagccuucagugucgcaucugcauuuga

SEQ ID NO: 130048 - RNA, 1701 nt, Artificial Sequence; identical to SEQ ID NO: 129976
  derived and/or modified CDS sequence (opt3) from hemagglutinin__InfluenzaA__ABV82562

SEQ ID NO: 130049 - RNA, 1701 nt, Artificial Sequence; identical to SEQ ID NO: 129976
  derived and/or modified CDS sequence (opt3) from hemagglutinin__InfluenzaA__ABW36168

SEQ ID NO: 130050 - RNA, 1698 nt, Artificial Sequence; identical to SEQ ID NO: 129962
  derived and/or modified CDS sequence (opt3) from hemagglutinin__InfluenzaA__ABW36179

SEQ ID NO: 130051 - RNA, 1698 nt, Artificial Sequence; identical to SEQ ID NO: 130005
  derived and/or modified CDS sequence (opt3) from hemagglutinin__InfluenzaA__ABW36190

SEQ ID NO: 130052 - RNA, 1698 nt, Artificial Sequence; identical to SEQ ID NO: 129962
  derived and/or modified CDS sequence (opt3) from hemagglutinin__InfluenzaA__ABW36201

SEQ ID NO: 130053 - RNA, 1698 nt, Artificial Sequence
  derived and/or modified CDS sequence (opt3) from hemagglutinin__InfluenzaA__ABW36212
augaaggugaaacugcucguccuucugugcaccuucacagccacuuacgcugacacgaucuguauuggcuaucacgcaaacaauagcaccgauacaguugacacuguguuggagaagaacguaaccgugacacauuccgucaauuuacuggaagauucucacaacgggaaacuaugccuccugaagggaauagcgccccuucagcuggguaauuguucaguggccggcuggaucuuggggaacccugagugcgaacuccugauuaguaaagagagcugguccuacaucguugaaaccccaaauccggagaacggaacuuguuaucccggcuacuuugcugacuaugaggaacugagagagcaacucucuucggugucaucauucgaaagguuugagauuuucccuaaggagaauaguuggccaaaccauacagucaccgguguguccgccucuugcagccacaaugggaaguccucauuuuaccggaacuuacuguggcuuacgggcaaaaauggauuguaucccaaccugaguaagagcuacgcaaauaacaaagaaaaggaggugcuaguucucuggggcgugcaucacccuccaaacaucggggaucagcgcgcccuguaccacacugaaaaugcuuaugucucugugguguccucacauuacagccgacguuucacccccgagauagcaaaaagaccuaaggucagggaccaggaaggacggaucaacuauuacuggacacuucuggagccaggugauacuauuaucuuugaggccaauggcaacuugauugcuccgcgcuucgccuuugcgcucaguagagggcugggaucuggcaucauaaccuccaaugcacccauggacgaaugugaugccaagugccagacaccucaaggugcuauuaacagcucguuaccauuccagaauguucaccccgugaccaucggggaguguccuaaauauguaaggucugccaagcugcggauggugacgggacuccgcaacauuccauccauccagucacgaggccuuuuuggcgcaaucgcuggguucauugaaggagguuggacuggcauggucgacgggugguacggauaucaucaccagaaugagcaaggcagugguuacgccgcggaucagaaaagcacacagaacgccauaaaugggaucaccaacaagguaaauuccguuauugaaaagaugaacacucaguuuacagcagugggcaaagaguucaauaaacuggagagaaggauggaaaacuugaacaagaaggucgacgauggauuccuagacaucuggaccuacaaugcugagcugcucgugcugcuugaaaacgagcggacgcuggacuuucacgauucuaauguuaaaaacuuguaugaaaagguaaaaggccaacucaagaauaacgccaaagagauagggaauggaugcuucgaguuuuaccauaaguguaacgacgaaugcauggagagcgugaagaaugguaccuaugauuaccccaaauauucagaagagaguaagcugaaccgugagaaaauugacggcgucaaguuagaauccauggggguguaccagauccuggcuaucuauagcacagucgccucuagccuagugcuccugguuagucuuggagcaauuagcuucuggaugugcuccaauggcucuuugcagugucgcaucugcauuuga

SEQ ID NO: 130054 - RNA, 1698 nt, Artificial Sequence; identical to SEQ ID NO: 129958
  derived and/or modified CDS sequence (opt3) from hemagglutinin__InfluenzaA__ABW36223

SEQ ID NO: 130055 - RNA, 1698 nt, Artificial Sequence; identical to SEQ ID NO: 129958
  derived and/or modified CDS sequence (opt3) from hemagglutinin__InfluenzaA__ABW36245

SEQ ID NO: 130056 - RNA, 1698 nt, Artificial Sequence; identical to SEQ ID NO: 129958
  derived and/or modified CDS sequence (opt3) from hemagglutinin__InfluenzaA__ABW36267

SEQ ID NO: 130057 - RNA, 1698 nt, Artificial Sequence; identical to SEQ ID NO: 129962
  derived and/or modified CDS sequence (opt3) from hemagglutinin__InfluenzaA__ABW36278

SEQ ID NO: 130058 - RNA, 1698 nt, Artificial Sequence
  derived and/or modified CDS sequence (opt3) from hemagglutinin__InfluenzaA__ABW36289
augaagcugaaacuccuugugcuguugugcaccuucacagccacuuacgcugacacgaucuguauuggcuaucacgcaaacaauagcaccgauacagucgacacuguuuuagagaagaacgugaccguaacacauuccgugaaucugcuagaagauucucacaacgggaaacucugccugcuuaagggaauagcgccccugcaguuggguaauuguucagucgccggcuggauccucgggaacccugagugcgaacugcugauuaguaaagagagcugguccuacaucguggaaaccccaaauccggagaacggaacuuguuaucccggcuacuuugcugacuaugaggaacucagagagcaauuaucuucgguuagcagcuucgaaagguuugagauuuucccuaaggagaguuccuggccaaaucauacagugaccggugucucugccagcugcucccacaacgggaagucaaguuuuuaccggaaucugcuuugguugacgggcaaaaacggacuguaucccaaucuaagcaagucuuacgcaaacaauaaagaaaaggaggugcucguacuguggggcguucaucacccuccaaacaucggggaucagcgcgcccuuuaccacacugaaaacgcuuauguguccgucgugucaagccauuacagucgacguuucacccccgagauagcaaaaagaccuaaggugagggaccaggaaggacggaucaauuauuacuggacacuguuggagccaggugauacuauuaucuuugaggccaacggcaaucucauugcuccgcgcuucgccuuugcgcugucuagaggguucggauccggcaucauaaccagcaacgcacccauggacgaaugugaugccaagugccagacaccucaaggugcuauuaauucgucuuuaccauuucagaacguccaccccguuaccaucggggaguguccuaaauaugugagguccacgaagcugcggaugguaacuggacuccgcaauauuccaucaauccagagucgaggccuuuucggcgccaucgcaggguuuauugaaggagguuggacaggcaugguggacgggugguacggauaucaucaccagaacgagcaaggcagcgguuacgcugccgaucagaaauccacccagaaugcgauaaacgggaucacuaauaaggucaacucugugauugaaaagaugaauacacaguucaccgccguuggcaaagaguucaacaaacuggagagaaggauggaaaauuugaacaagaagguggacgauggauuucuagacaucuggacguacaacgcagagcugcucguccugcuugaaaaugagcggacccuggacuuccacgauagcaacgugaaaaauuuguaugaaaagguaaaaucacaacucaagaacaaugcuaaagagauaggcaacgggugcuuugaguucuaccauaaguguaaugacgaaugcauggagaguguuaagaacggaacauaugauuaccccaaauauuccgaagagagcaagcugaaucgugagaaaauugacggugugaaguuagaaucuaugggcgucuaccagauccuggccaucuauucaacuguggcuaguagccuaguccuccuggugucccuuggggccauuucuuuuuggaugugcucgaacggaucauugcagugucgcaucugcauuuga

SEQ ID NO: 130059 - RNA, 1698 nt, Artificial Sequence; identical to SEQ ID NO: 129969
  derived and/or modified CDS sequence (opt3) from hemagglutinin__InfluenzaA__ABW36300

SEQ ID NO: 130060 - RNA, 1701 nt, Artificial Sequence
  derived and/or modified CDS sequence (opt3) from hemagglutinin__InfluenzaA__ABW36311
augaaggccaaacugcucgugcuucugugcgcuuugagcgcaaccgacgccgauacaaucuguauuggcuaccacgcgaacaauuccacugacacggucgauaccguuuuagagaagaacgugacaguaacucauucugugaaucugcuagaagacucacacaacgggaaacucugcagacugaagggaauagcuccccuucagcuggguaaauguaguaucgccggcuggauuuuggggaauccugagugcgaaagccucuucuccaagaagucuuggucguauaucgcagagaccccaaacucagaaaauggaacauguuacccgggcuauuuugccgauuacgaggagcugagggaacaacugagcagugucuccucuuucgagcgguuugaaauuuuccccaaagagcgcagcuggccuaagcauaacgugacccgagguguuacugcuuccugcucacacaaagggaagaguagcuuuuaucguaaucucuuauggcugacagagaaaaacggaucuuacccaaaucuuuccaagucauaugugaacaauaaggaaaaagaggucuuggugcuguggggcguacaucaccccagcaacaucgaagaccagaagaccauauacagaaaagagaaugcauacguuaguguggucucuuccaacuauaacaggcgguucacgccugaaaucgccaagcgcccaaaagugagagaucaggagggcaggauuaauuacuauuggacucuacucgagcccggggacaccaucauuuuugaagcuaacggaaaucugaucgccccuugguacgcguucgcacuuagccgggguuuuggcucggggauaauuacaucuaacgccuccauggaugagugugacacuaagugccagaccccacaaggagcuaucaauucaagucugccguuccagaacgugcaccccgucacaauuggcgaauguccuaaauauguucgcagcaccaaguugcgaauggugacgggucucagaaauaucccauccauccagucuagggggcuguuuggagccauugcaggcuucauagagggcggguggacuggaaugaucgaugguugguacggcuaucaucaccagaacgaacaagggagcggauacgcugccgaccagaagucaacacagaaugcgauuaacggcaucaccaauaaaguaaacagugugauagagaagaugaauacucaguuuacagccgucgguaaagaguucaacaaguuagaaaaacggauggagaaucugaacaagaagguggaugacggguuccucgacauuuggaccuacaacgcagaacuucugguuuugcuagagaaugaacguacgcuggauucccaugacagcaacgugaaaaaucucuaugagaaggucaaaucucaacugaagaacaaugcuaaagagaucggcaacggaugcuuugaguucuaccacaaguguaauaacgaaugcauggaaucagugaagaauggcaccuaugauuaccccaaauauagugaggagagcaaacuuaaccgcgaaaagaucgacgggguaaagcuggaguccaugggaguuuaccagauuuuggccaucuauucuacaguggcuucgagccucguccuguuagugucccugggugccauuucauuuuggaugugcaguaauggcucucuacaguguagaauaugcaucuga

SEQ ID NO: 130061 - RNA, 1701 nt, Artificial Sequence
  derived and/or modified CDS sequence (opt3) from hemagglutinin__InfluenzaA__ABW38363
augaagaccaucauugcccugagcuacauacucugccuuguguucgcucagaaacugcccggcaacgacaauuccacagcaacuuuguguuuagggcaccaugccgucccuaacggaacgaucguuaagaccauuacaaaugaucaaaucgaggugacuaacgcgaccgaacugguacagucuucaaguacaggugagauuugcgacagcccacaccagauccuagauggcgaaaauuguacccucauagacgcucugcuuggggauccgcagugcgacggauuucaaaacaaaaagugggaucuguucguggagagauccaaagccuauucuaauuguuaccccuaugacgucccugauuacgcaucguugaggucacucguggccagcaguggcacucuggaauuuaacaaugaguccuucaacuggacagguguuacccagaaugggacgucuagcgcuugcaagcggcgcuccaacaauucauuuuucagucgacugaacuggcucacucauuuaaaguuuaaauauccagcacugaaugugaccaugcccaacaacgagaaguucgacaaacuuuacaucuggggaguccaccauccuggcacagauaaugaccagaucuuuuuguaugcccaggcuagcggccguauuacugugucuaccaagagaucccaacagacaguaauuccaaacaucgggucaaggccccggguucgcaauauaccuagcagaauuaguaucuacuggaccauugugaaaccaggagauauccugcuaaucaacucuacggguaaucucauugccccgaggggcuacuucaagauacgguccggaaagagcucgaucaugcgcucugacgcgcccauugggaaauguaacuccgaaugcaucacuccuaauggcucaauaccaaacgacaagcccuuucagaaugucaaccgaauuacauauggugcauguccuagauacgugaaacagaauacccugaagcuggccacugggaugaggaacgugccagagaaacaaacacggggaaucuucggcgcuaucgccggcuuuauugaaaaugggugggagggaauggucgaugguugguauggcuuccgucaccagaacagugaggggaucggacaggcagcugaccuuaagagcacccaagccgcgauugaucagauaaauggcaaauugaaccgccucaucgguaagacgaacgaaaaguuccaccagauugagaaagaauuuuccgagguugaagggagaauccaggaccuggagaaguacguggaggauaccaaaaucgacuuauggucuuauaaugccgaacugauuguagcacucgagaaccaacauacaauagaucuuacugacagcgaaaugaauaagcuguucgagaggaccaaaaagcaguugcgggaaaacgcugaggauaugggcaauggaugcuuuaagaucuaccacaaaugugacaacgccugcauuggcucaauccgaaaugggacauaugaucaugacguguaccgcgacgaggcucuaaacaauagauuccagauuaagggagucgaacugaaaagugguuacaaggauuggauccucuggauauccuuugccaucagcugcuuccugcuuuguguggcacuguugggcuuuauuaugugggccugccagaaagggaacaucagguguaauauuugcaucuga

SEQ ID NO: 130062 - RNA, 1698 nt, Artificial Sequence
  derived and/or modified CDS sequence (opt3) from hemagglutinin__InfluenzaA__ABW39777
augaaggugaaacugcucguccuucugugcaccuucacagccacuuacgcugacacgaucuguauuggcuaucacgcaaacaauagcaccgauacaguugacacuguguuggagaagaacguaaccgugacacauuccgucaauuuacuggaagauucucacaacgggaaacuaugccuccugaagggaauagcgccccuucagcuggguaauuguucaguggccggcuggaucuuggggaacccugagugcgaacuccugauuaguaaagagagcugguccuacaucguugaaaccccaaauccggagaacggaacuuguuaucccggcuacuuugcugacuaugaggaacugagagagcaacucucuucggugagcucauucgaaagguuugagauuuucccuaaggagaauaguuggccaaaccauacagucaccgguguguccgccucuugcagccacaaugggaaguccucauuuuaccggaacuuacuguggcuuacgggcaaaaauggauuguaucccaaccugaguaagagcuacgcaaauaacaaagaaaaggaggugcuaguucucuggggcgugcaucacccuccaaacaucggggaucagcgcgcccuguaccacacugaaaaugcuuaugucucugugguguccucacauuacagccgacguuucacccccgagauagcaaaaagaccuaaggucagggaccaggaaggacggaucaacuauuacuggacacuucuggagccaggugauacuauuaucuuugaggccaauggcaacuugauugcuccgcgcuucgccuuugcgcucaguagagggcugggaucuggcaucauaaccuccaaugcacccauggacgaaugugaugccaagugccagacaccucaaggugcuauuaacagcucguuaccauuccagaauguucaccccgugaccaucggggaguguccuaaauauguaaggucugccaagcugcggauggugacgggacuccgcaacauuccauccauccagucacgaggccuuuuuggcgcaaucgcuggguucauugaaggagguuggacuggcauggucgacgggugguacggauaucaucaccagaaugagcaaggcagugguuacgccgcggaucagaaaagcacacagaacgccauaaaugggaucaccaacaagguaaauuccguuauugaaaagaugaacacucaguuuacagcagugggcaaagaguucaauaaacuggagagaaggauggaaaacuugaacaagaaggucgacgauggauuccuagacaucuggaccuacaaugcugagcugcucgugcugcuugaaaacgagcggacgcuggacuuucacgauucuaauguuaaaaacuuguaugaaaagguaaaaagccaacucaagaauaacgccaaagagauaggcaaugggugcuucgaguuuuaccauaaguguaacgacgaaugcauggagucagugaagaauggaaccuaugauuaccccaaauauagugaagaguccaagcugaaccgugagaaaauugacggugucaaguuagaaagcaugggcguguaccagauccuggcuaucuauucuacagucgccucaagucuagugcuccugguuagccuuggggcaauuuccuucuggaugugcucuaauggaucguugcagugucgcaucugcauuuga

SEQ ID NO: 130063 - RNA, 1698 nt, Artificial Sequence; identical to SEQ ID NO: 129962
  derived and/or modified CDS sequence (opt3) from hemagglutinin__InfluenzaA__ABW39806

SEQ ID NO: 130064 - RNA, 1698 nt, Artificial Sequence; identical to SEQ ID NO: 129969
  derived and/or modified CDS sequence (opt3) from hemagglutinin__InfluenzaA__ABW39817

SEQ ID NO: 130065 - RNA, 1698 nt, Artificial Sequence
  derived and/or modified CDS sequence (opt3) from hemagglutinin__InfluenzaA__ABW39828
augaaggugaaacugcucguccuucugugcaccuucacagccacuuacgcugacacgaucuguauuggcuaucacgcaaacaauagcaccgauacaguugacacuguguuggagaagaacguaaccgugacacauuccgucaauuuacuggaagauaaccacaaugggaaacuaugccuccugaagggaauagcgccccuucagcuggguaacuguucuguggccggcuggaucuuggggaauccugagugcgaacuccugauuucaaaagagaguuggagcuacaucguugaaaagccaaacccggagaauggaaccuguuaucccggccauuuugcugacuacgaggaacugagagagcaacucuccucugugucgucauucgaaagguuugagauuuucccuaaggagagcaguuggccaaaccacacugucacagguguguccgccucuugcagccauaauggggaauccucauuuuauaaaaacuuacuguggcuuaccggaaagaauggcuuguaccccaaccugaguaaaagcuaugcaaauaacaaggagaaagaaguucuaguacucuggggcgugcaccacccuccaaacaucggggaucagaugacgcuguaccauaaggagaaugccuacgucucugugguguccucacacuauagccggaaguucacucccgaaauagcuaaacgcccuaagguccgagaccaggagggacguaucaacuacuauuggacccuucuggagccaggugauacaauuaucuuugaagcaaauggcaacuugauugccccgagauacgcuuucgcccucaguaggggguuuggaucuggcaucauaaauuccaacgcgcccauggacgagugugaugcaaaaugccagacuccucaaggugccauuaauagcucgcugccauuccagaacguucaucccgugaccaucggggaauguccuaaguauguacggucugcuaaauuacgcauggugacaggacugagaaauauuccauccauccagucaaggggccucuuuggcgccaucgcaggguucauugagggagguuggaccggcauggucgacgggugguacggauaucaccaccagaacgaacaaggcagugguuacgcugccgaucaaaagagcacgcagaaugcgauaaacgggaucacuaauaaagugaacuccguuauugagaagaugaauacacaguuuaccgccgugggcaaggaguucaacaaacuugaacggcgcauggagaaccugaauaagaaagucgacgauggauucaucgacguguggacuuacaacgcagaauugcuaguacugcucgagaaugaacgaacacuggacuuucaugauucuaacguuaagaaucuuuaugagaaagugaagaaccagcugaagaauaacgcuaaagagauaggcaaugggugcuucgaauuuuaccacaaguguaacgacgagugcauggaaagcgucaaaaauggaaccuaugauuaccccaaguauucagaggagaguaaauuguccagagaaaagauugacggugugaagcucgagagcaugggcgucuaccagauccuggccaucuauucuacgguggcuucaaguuuaguucugcuagugagccucggggccauuuccuucuggaugugcucuaacggaucgcugcaguguaggaucugcauuuga

SEQ ID NO: 130066 - RNA, 1698 nt, Artificial Sequence
  derived and/or modified CDS sequence (opt3) from hemagglutinin__InfluenzaA__ABW39839
augaaggugaaacugcucguccuucugugcaccuucacagccacuuacgcugacacgaucuguauuggcuaucacgcaaacaauagcaccgauacaguugacacuguguuggagaagaacguaaccgugacacauuccgucaauuuacuggaagauucucacaacgggaaacuaugccuccugaagggaauagcgccccuucagcuggguaauuguucaguggccggcuggaucuuggggaacccugagugcgaacuccugauuaguaaagagagcugguccuacaucguugaaaccccaaauccggagaacggaacuuguuaucccggcuacuuugcugacuaugaggaacugagagagcaacucucuucggugagcucauucgaaagguuugagauuuucccuaaggagaguuccuggccaaaucauacagucaccggugugucugccagcugcucccacaacgggaagucaaguuuuuaccggaauuuacuguggcuuacgggcaaaaacggauuguaucccaaucugagcaagucuuacuccaacaauaaagaaaaggagguucuaguacucuggggcgugcaucacccuccaaacaucggggaucagcgcgcacuguaccacacugaaaacgccuaugucucaguggugagcagucauuacucucgacguuucacccccgagauagcuaaaagaccuaaggucagggaccaggaaggacggaucaauuauuacuggacacuucuggagccaggugauacuauuaucuuugaggcaaacggcaauuugauugccccgcgcuucgcuuuugcccucuccagaggguucggaagcggcaucauaaccucgaacgcgcccaugggugaaugugacgcaaagugccagacaccucaaggggccauuaauucuucccugccauuucagaacguucaccccgugaccaucggagaguguccuaaauauguaaggucagcuaaguuacggauggugacgggccugcgcaauauuccaaguauccagagccgaggccucuucggggccaucgcaggauuuauugaagguggcuggacugggauggucgauggaugguacggcuaucaucaccagaacgagcaagguuccggguacgcugccgaccagaaaucuacacagaaugcgauaaacggcaucaccaauaaggugaacagcguuauugaaaagaugaauacucaguucacagccgugggaaaagaguucaacaaacuugagagaaggauggaaaaucugaacaagaaggucgaugacggcuuuuuggauaucuggaccuacaacgcagagcuacuggugcuccuggaaaaugagcggacgcuugacuuccacgacucaaacguuaaaaaucuguaugaaaagguaaaaagucaauugaagaacaaugcuaaagagauagggaacggaugcuuugaguucuaccauaaguguaaugaugaaugcauggaguccgugcguaacgguaccuaugacuaccccaaguauagcgaagagucuaaacucaaucgcgagaagauugauggcgucaaacuggaaucaauggggguguaccagaucuuagccaucuauaguacagucgcuagcucccuggugcuacucguuucucugggagccauuucguuuuggaugugcagcaacggcucccuucaguguagaaucugcauuuga

SEQ ID NO: 130067 - RNA, 1698 nt, Artificial Sequence
  derived and/or modified CDS sequence (opt3) from hemagglutinin__InfluenzaA__ABW39850
augaaggugaaacugcucguccuucugugcaccuucacagccacuaacgcugacacgaucuguauuggcuaccacgcaaauaacagcaccgauacaguugacacuguguuggagaagaauguaaccgugacacauuccgucaacuuacuggaaaauucucacaacgggaaacuaugccuccugaagggaauagcgccccuucagcuggguaauuguucaguggccggcuggaucuuggggaacccugagugcgaacuccugauuaguaaagagagcugguccuauaucguugaaaagccaaauccggagaacggaaccuguuaccccggccauuuugcugauuaugaggaacugagagagcaacucucuucggugagcucauucgaaagguuugagauuuucccuaaggagaguuccuggccaaaucacacugucacaggugugucugccagcugcucccauaacggggaaucaaguuuuuaccggaauuuacuguggcuuaccggcaaaaacggauuguaucccaaucugagcaagucuuacgcaaacaacaaagagaaggaagugcuaguucucuggggcgugcaccacccuccaaauaucggggaccagaaagcccuguaucauacggagaacgcuuacgucuccguggugucaagccacuacagucgcaaguucacucccgaaauagcaaagcgaccuaaaguccgugaucaggagggaagaaucaauuauuacuggacccuucuggagccaggugacacaauuaucuuugaagccaacggcaauuugauugcuccgagguaugccuucgcgcucucucggggguuuggauccggcaucauaaacagcaaugcacccauggauaagugugacgccaaaugccagacuccucaaggugcuauuaacucgucucugccauuccagaauguucaucccgugaccaucggggaguguccuaaguacguacgcuccgccaaauuaagaauggugacaggacugaggaacauuccaucaauccagagucggggccucuuuggcgcaaucgcuggguucauugaaggagguuggaccggcauggucgaugggugguauggauaccaccaccagaaugagcaaggcagcgguuaugccgcggaccagaaguccacgcagaacgccauaaaugggaucacuaacaaaguaaauucuguuauugaaaagaugaacacacaguuuaccgcagugggcaaggaguucaacaaacuugagcgccgaauggaaaaucugaacaagaaagucgaugacggauucaucgauauauggacuuacaaugcugaguugcuagugcugcucgaaaacgagagaacacuggacuuucaugacagcaauguaaagaaccuuuacgaaaaaguuaagggccaacugaagaauaacgccaaagagauugggaauggaugcuucgaguuuuaucacaaguguaacgaugaaugcauggagucagugaaaaaugguaccuacgacuaucccaaguacagugaagaguccaaauugaacagggagaagaucgauggcgucaagcucgaaagcauggggguguaucagauccuggcuauuuacucuacggucgccucaaguuuagugcugcuaguuagccucggagcaaucuccuucuggaugugcucuaauggcucgcugcagugucggauuugcauauga

SEQ ID NO: 130068 - RNA, 1698 nt, Artificial Sequence; identical to SEQ ID NO: 129993
  derived and/or modified CDS sequence (opt3) from hemagglutinin__InfluenzaA__ABW39861

SEQ ID NO: 130069 - RNA, 1701 nt, Artificial Sequence; identical to SEQ ID NO: 129976
  derived and/or modified CDS sequence (opt3) from hemagglutinin__InfluenzaA__ABW39872

SEQ ID NO: 130070 - RNA, 1698 nt, Artificial Sequence
  derived and/or modified CDS sequence (opt3) from hemagglutinin__InfluenzaA__ABW39883
augaaggugaaacugcucguccuucugugcaccuucacagccacuuacgcugacacgaucuguauuggcuaucacgcaaacaauagcaccgauacaguugacacuguguuggagaagaacguaaccgugacacauuccgucaauuuacuggaagauucucacaacgggaaacuaugccuccugaagggaauagcgccccuucagcuggguaauuguucaguggccggcuggaucuuggggaacccugagugcgaacuccugauuaguaaagagagcugguccuacaucguugaaaccccaaauccggagaacggaacuuguuaucccggcuacuuugcugacuaugaggaacugagagagcaacucucuucggugagcucauucgaaagguuugagauuuucccuaaggagaguuccuggccaaaucauacagucaccggugugucugccagcugcucccacaacgggaagucaaguuuuuaccggaauuuacuguggcuuacgggcaaaaacggauuguaucccaaucugagcaagucuuacgcaaacaauaaagaaaaggagguucuaguacucuggggcgugcaucacccucacaacaucggggaucagcgcgcccuguaccauacugaaaacgcuuaugucuccguggugucaagccacuacagucgacguuucaccccagagauagcaaaaagacccaaggucagggaccaggaaggacggaucaauuauuacuggacacuucuggagccuggugauacuauuaucuuugaggccaacggcaauuugauugcuccacgcuucgccuuugcgcucucuagaggguucggauccggcaucauaaccagcaacgcaccgauggacgaaugugaugccaagugccagacaccccaaggugcuauuaauucgucucugccuuuucagaacguucauccagugaccaucggggagugucccaaauauguaagguccacgaaguuacggauggugacuggacugcgcaauauuccuucaauccagagucgaggccucuucggcgccaucgcaggguuuauugaaggagguuggacaggcauggucgacgggugguacggauaucaccaccagaacgagcaaggcagcgguuacgcugccgaucagaaauccacccagaaugcgauaaacgggaucacuaauaaggugaacucuguuauugaaaagaugaauacacaguucaccgccgugggcaaagaguucaacaaacuugagagaaggauggaaaaucugaacaagaaggucgacgauggauuuuuggacaucuggacguacaacgcagagcuacuggugcuccuggaaaaugagcggacccuugacuuccaugauagcaacguuaaaaaucuguaugaaaagguaaaaucacaauugaagaacaaugcuaaagagauaggcaacgggugcuuugaguucuaccacaaguguaaugacgaaugcauggagagugugaagaacggaacauaugauuacccaaaauauuccgaagagagcaagcucaaucgugagaaaauugacggugucaagcuggaaucuaugggcguguaccagaucuuagccaucuauucaacugucgcuaguagccuggugcuacucguuucccugggggccauuucuuuuuggaugugcucgaacggaagccuucagugucgcaucugcauuuga

SEQ ID NO: 130071 - RNA, 1698 nt, Artificial Sequence; identical to SEQ ID NO: 130003
  derived and/or modified CDS sequence (opt3) from hemagglutinin__InfluenzaA__ABW39894

SEQ ID NO: 130072 - RNA, 1698 nt, Artificial Sequence; identical to SEQ ID NO: 129958
  derived and/or modified CDS sequence (opt3) from hemagglutinin__InfluenzaA__ABW39905

SEQ ID NO: 130073 - RNA, 1698 nt, Artificial Sequence; identical to SEQ ID NO: 129962
  derived and/or modified CDS sequence (opt3) from hemagglutinin__InfluenzaA__ABW39927

SEQ ID NO: 130074 - RNA, 1701 nt, Artificial Sequence
  derived and/or modified CDS sequence (opt3) from hemagglutinin__InfluenzaA__ABW39938
augaagaccaucauugcccugagcuacauacucugccuuguguucgcucagaaaauccccggcaacgacaauuccacagcaacucuguguuuggggcaccaugccgucccuaacggaacgauuguuaagaccaucacaaaugaucaaauugaggugacuaacgcgaccgaauuaguacagucuucaaguacaggugagaucugcgacagcccacaccagauacuggauggcgaaaauuguacccuaaucgacgcucuccugggggauccgcagugcgacggauuucaaaacaaaaagugggaucuuuucguggagagauccaaagccuauucuaauuguuaccccuaugacgucccugauuacgcaucgcugaggucauugguggccagcaguggcacucucgaauuuaacaaugaguccuucaacuggacagguguuacccagaaugggacgucuagcgcuugcauucggcgcuccaacaauucauuuuucagucgacugaacuggcugacucaucucaaguuuaaguauccagcauuaaaugugaccaugcccaacaacgagaaauucgacaagcuguacaucuggggaguccaccauccuggcacagauaaugaccagauuuuucuuuaugcccaggcuagcggccguaucacugugucuaccaaaagaucccaacagacaguaauaccaaacauugggucaaggccccggguucgcaauaucccuagcagaauuaguaucuacuggaccaucgugaagccaggagauauuuugcugauaaacucuacggguaaucuaaucgccccgaggggcuacuucaaaauucgguccggaaagagcucgaucaugcgcucugacgcgcccauagggaaguguaacuccgaaugcauuacuccuaauggcucaaucccaaacgacaaacccuuucagaaugucaaccgaaucacauauggugcauguccuagauacgugaagcagaauacccucaaacuggccacugggaugaggaacgugccagagaagcaaacacggggaauuuucggcgcuaucgccggcuuuauugaaaaugggugggagggaauggucgaugguugguauggcuuccgucaccagaacagugaggggauaggacaggcagcugaccuuaaaagcacccaagccgcgaucgaucagauuaauggcaagcugaaccgcuugaucgguaaaacgaacgaaaaguuccaccagaucgagaaggaauuuuccgagguugaagggaggauucaggaccucgagaaauacguggaggauaccaagauagaccuguggucuuauaaugccgaauuacugguagcacucgagaaccaacauacaaucgaucuuacugacagcgaaaugaauaaacuguucgagaagaccaaaaagcaguugagagaaaacgcugaggauaugggcaauggaugcuuuaagauuuaccacaaaugugacaacgccugcaucggcucaauucggaaugggacauaugaucaugacgcuuaccgagacgaggcccuaaacaaucgcuuccagaucaagggaguggaacugaaaagugguuacaaggauuggauacucuggaucuccuuugcaauuagcugcuuccugcuuugugucgcccuguugggcuuuaucaugugggcuugccagaaagggaacauuagauguaauaucugcauauga

SEQ ID NO: 130075 - RNA, 1698 nt, Artificial Sequence; identical to SEQ ID NO: 129962
  derived and/or modified CDS sequence (opt3) from hemagglutinin__InfluenzaA__ABW39949

SEQ ID NO: 130076 - RNA, 1698 nt, Artificial Sequence; identical to SEQ ID NO: 130003
  derived and/or modified CDS sequence (opt3) from hemagglutinin__InfluenzaA__ABW39960

SEQ ID NO: 130077 - RNA, 1698 nt, Artificial Sequence; identical to SEQ ID NO: 129958
  derived and/or modified CDS sequence (opt3) from hemagglutinin__InfluenzaA__ABW39982

SEQ ID NO: 130078 - RNA, 1698 nt, Artificial Sequence; identical to SEQ ID NO: 129978
  derived and/or modified CDS sequence (opt3) from hemagglutinin__InfluenzaA__ABW39993

SEQ ID NO: 130079 - RNA, 1698 nt, Artificial Sequence; identical to SEQ ID NO: 129958
  derived and/or modified CDS sequence (opt3) from hemagglutinin__InfluenzaA__ABW40004

SEQ ID NO: 130080 - RNA, 1698 nt, Artificial Sequence; identical to SEQ ID NO: 130004
  derived and/or modified CDS sequence (opt3) from hemagglutinin__InfluenzaA__ABW40015

SEQ ID NO: 130081 - RNA, 1701 nt, Artificial Sequence; identical to SEQ ID NO: 130035
  derived and/or modified CDS sequence (opt3) from hemagglutinin__InfluenzaA__ABW40026

SEQ ID NO: 130082 - RNA, 1698 nt, Artificial Sequence; identical to SEQ ID NO: 129958
  derived and/or modified CDS sequence (opt3) from hemagglutinin__InfluenzaA__ABW40037

SEQ ID NO: 130083 - RNA, 1698 nt, Artificial Sequence
  derived and/or modified CDS sequence (opt3) from hemagglutinin__InfluenzaA__ABW40048
augaaggugaaacugcucguccuucugugcaccuucacagccacuuacgcugacacgaucuguauuggcuaucacgcaaacaauagcaccgauacaguugacacuguguuggagaagaacguaaccgugacacauuccgucaauuuacuggaagauucucacaacgggaaacuaugccuccugaagggaauagcgccccuucagcuggguaauuguucaguggccggcuggaucuuggggaacccugagugcgaacuccugauuaguaaagagagcugguccuacaucguugaaaccccaaauccggagaacggaacuuguuaucccggcuacuuugcugacuaugaggaacugagagagcaacucucuucggugagcucauucgaaagguuugagauuuucccuaaggagaguuccuggccaaaucauacagucaccggugugucugccagcugcucccacaacgggaagucaaguuuuuaccggaauuuacuguggcuuacgggcaaaaacggauuguaucccaaucugagcaagucuuacgcaaacaauaaagaaaaggagguucuaguacucuggggcgugcaucacccuccaaacaucggggaucagaaagcccuguaccacacugaaaacgcuuaugucuccguggugucaagccauuacagucgccgauucacccccgagauagcaaagcguccuaaggucagagaccaggaaggaaggaucaauuauuacuggacacuucuggagccaggugauacuauuaucuuugaggccaacggcaauuugauugcuccgcgguucgccuuugcgcucucucgcggguucggauccggcaucauaaccagcaacgcacccauggacgaaugugaugccaaaugccagacaccucaaggugcuauuaauucgucucugccauuucagaacguucaccccgugaccaucggggaguguccuaaguauguaagauccacgaaauuaaggauggugacuggacugcggaauauuccaucaauccagagucgcggccucuucggcgccaucgcaggguuuauugaaggagguuggacaggcauggucgacgggugguacggauaucaucaccagaacgagaagggcagcgguuacgcugccgaucaaaaauccacccagaaugcgauaaacgggaucacuaauaaggugaacucuguuauugaaaagaugaauacacaguucaccgccgugggcaaggaguucaacaaacuugagcgaagaauggaaaaucugaacaaaaaggucgacgauggauuuuuggacaucuggacguacaacgcagagcuacuggugcuccuggaaaaugagaggacccuugacuuccacgauagcaacguuaaaaaucuguaugaaaagguaaaaucacaguugaagaacaaugcuaaggagauaggcaacgggugcuuugaguucuaccauaaauguaaugacgaaugcauggagagugugaagaacggaacauaugauuaccccaaauauuccgaagagagcaagcucaaucgggagaaaauugacggugucaagcuggaaucuaugggcguguaccaaaucuuagccaucuauucaacugucgcuaguagccuggugcuacucguuucccugggggccauuucuuuuuggaugugcucgaacggaagccuucagugucguaucugcauuuga

SEQ ID NO: 130084 - RNA, 1698 nt, Artificial Sequence; identical to SEQ ID NO: 129962
  derived and/or modified CDS sequence (opt3) from hemagglutinin__InfluenzaA__ABW40059

SEQ ID NO: 130085 - RNA, 1698 nt, Artificial Sequence
  derived and/or modified CDS sequence (opt3) from hemagglutinin__InfluenzaA__ABW40070
augaaggugaaacugcucguccuucugugcaccuucacagccacuuacgcugacacgaucuguauuggcuaucacgcaaacaauagcaccgauacaguugacacuguguuggagaagaacguaaccgugacacauuccgucaauuuacuggaaaacucucacaaugggaaacuaugccuccugaagggaauagcgccccuucagcuggguaacuguucaguggccggcuggaucuuggggaauccugagugcgaacuccugauuaguaaagagagcugguccuacaucguugaaaagccaaacccggagaauggaaccuguuaucccggccauuuugcugauuacgaggaacugagagagcaacucucuucggugagcucauucaagagguuugaaauuuucccuaaagagaguuccuggccaaaccacacugucacaggugugucugccagcugcucccauaauggggagucaaguuuuuaucggaacuuacuguggcuuaccggaaagaauggcuuguaccccaaccugagcaaaucuuaugcaaauaacaaggaaaaagagguucuaguacucuggggcgugcaccacccuccaaacaucggggaccagaaggcccuguaccauacggaaaaugcuuacgucuccguggugucaagccacuauagucgcaaguucacucccgagauagcaaaacgaccuaagguccgugaucaggaaggaagaaucaacuacuauuggacccuucuggagccaggugacacaauuaucuuugaggccaauggcaacuugauugcuccgagguacgccuucgcgcucucucggggguuuggauccggcaucauaaauagcaacgcacccauggauaaaugugacucgaagugccagacuccucaaggugccauuaauucuucccugccauuccagaacguucaucccgugaccaucggggaauguccuaaauauguacgcucagcuaaguuaagaauggugacaggacugaggaauauuccaaguauccagagccggggccucuuuggcgccaucgcaggguucauugagggagguuggaccggcauggucgaugggugguacggauaucaccaccagaacgaacaaggcuccgguuacgcugccgaccagaaaucuacgcagaaugcgauaaacgggaucacuaauaaggugaacagcguuauugagaagaugaauacacaguuuaccgccgugggcaaagaguucaacaaacuugaacgccgaauggagaaccugaauaaaaaggucgaugacggauucaucgauauauggacuuacaacgcagaauugcuagugcugcucgagaaugaaagaacacuggacuuucaugacucaaacguaaagaaucuuuaugagaagguuaagagucaacugaaaaacaaugcuaaggaaauuggcaacgggugcuucgaguuuuaccacaaauguaaugaugagugcauggaauccgugaagaacggaaccuaugacuaccccaaauauagcgaggaaucuaaguugaauagggagaagaucgauggugucaaacucgagucaaugggcguguaccagauccuggccauuuauaguacggucgcuagcuccuuagugcugcuaguuucucucggggccaucucguucuggaugugcagcaacggaucccugcagugucggauuugcauauga

SEQ ID NO: 130086 - RNA, 1701 nt, Artificial Sequence; identical to SEQ ID NO: 129976
  derived and/or modified CDS sequence (opt3) from hemagglutinin__InfluenzaA__ABW40081

SEQ ID NO: 130087 - RNA, 1698 nt, Artificial Sequence
  derived and/or modified CDS sequence (opt3) from hemagglutinin__InfluenzaA__ABW40092
augaaggugaaacugcucauccuucugugcaccuucacagccacuuacgcugacacgauuuguauaggcuaucacgcaaacaauagcaccgauacagucgacacuguuuuggagaagaacgugaccguaacacauuccgugaauuuacuggaagauucucacaacgggaaacuaugccuccugaagggaaucgcgccccuucagcuggguaauuguucagucgccggcuggauuuuggggaacccugagugcgaacuccugaucaguaaagagagcugguccuacauuguggaaaccccaaauccggagaacggaacuuguuaucccggcuacuuugcugacuaugaggaacugagagagcaacucucuucgguuagcucauucaagagguuugaaaucuucccuaaggagaguuccuggccaaaucauacagugaccggugucucugccagcugcucccacaacgggaaaucaaguuuuuaccggaauuuacuguggcuuacgggaaagaacggcuuguaucccaaucugagcaaaucuuacgcaaacaauaaggagaaagaagugcuaguacucuggggcguucaucacccuccaaacauaggggaucagcgcgcccuguaccacacugagaacgcuuauguguccgucgugucaagccauuacagucgacguuucacccccgaaaucgcaaagagaccuaaggugagggaccaggagggacggauuaauuauuacuggacacuucuggaaccaggugauacuaucauuuuugaggccaacggcaauuugaucgcuccgcgcuucgccuuugcgcucucuagaggguucggauccggcauaauuaccagcaacgcacccauggacgagugugaugccaaaugccagacaccucaaggugcuaucaauucgucucugccauuucagaacguccaccccguuaccauuggggaauguccuaaguaugugagguccacgaaauuacggaugguaacuggacugcgcaauaucccaucaauccagagucgaggccucuucggcgccauugcaggguuuauagagggagguuggacaggcaugguggacgggugguacggauaucaucaccagaacgaacaaggcagcgguuacgcugccgaucagaaguccacccagaaugcgaucaacgggauuacuaauaaagucaacucugugaucgagaagaugaauacacaguucaccgccguuggcaaagaguucaacaaacuugaaagaaggauggagaaucugaacaagaagguggacgauggauuuuuggacauauggacguacaacgcagaacuacugguccuccuggagaaugaacggacccuugacuuccacgauagcaacgugaagaaucuguaugagaaaguaaagucacaauugaaaaacaaugcuaaggaaauuggcaacgggugcuuugaguucuaccauaaguguaaugacgagugcauggaaaguguuaaaaacggaacauaugauuaccccaaguauuccgaggaaagcaaacucaaucgugagaagaucgacggugugaaacuggagucuaugggcgucuaccagaucuuagccauuuauucaacuguggcuaguagccugguccuacucgugucccugggggccaucucuuuuuggaugugcucgaacggaagccuucagugucgcauuugcauauga

SEQ ID NO: 130088 - RNA, 1698 nt, Artificial Sequence; identical to SEQ ID NO: 130005
  derived and/or modified CDS sequence (opt3) from hemagglutinin__InfluenzaA__ABW40103

SEQ ID NO: 130089 - RNA, 1698 nt, Artificial Sequence
  derived and/or modified CDS sequence (opt3) from hemagglutinin__InfluenzaA__ABW40114
augaaggugaaacugcucauccuucugugcaccuucacagccacuuacgcugacacgauuuguauaggcuaucacgcaaacaauagcaccgauacagucgacacuguuuuggagaagaacgugaccguaacacauuccgugaauuuacuggaagauucucacaacgggaaacuaugccuccugaagggaaucgcgccccuucagcuggguaauuguucagucgccggcuggauuuuggggaacccugagugcgaacuccugaucaguaaagagagcugguccuacauuguggaaaccccaaauccggagaacggaacuuguuaucccggcuacuuugcugacuaugaggaacugagagagcaacucucuucgguuagcucauucgaaagguuugagaucuucccuaaggagaguuccuggccaaaucauacagugaccggugucucuacgagcugcucccacaacgggaagucaaguuuuuaccggaauuuacuguggcuuacuggcaaaaacggauuguaucccaaucugagcaagucuuacgccaacaauaaagaaaaggaggugcuaguacucuggggcguucaucacccuccaaacauagggaaccagcgcgcacuguaccacaccgaaaaugccuauguguccgucgugucaagccauuacagucgacguuucacacccgagaucgcuaaaagaccuaaggugagggaucaggaaggacggauuaacuauuacuggacucuucuggagccaggugacaccaucauuuuugaggcaaauggcaacuugaucgccccgcgcuucgcuuuugcccucucuagaggguucggauccggcauaauuacaagcaaugcgcccauggaugaaugugacgcaaagugccagaccccucaaggugccaucaacucgucucugccauuucagaauguccaccccguuacgauuggggaguguccuaaauaugugagguccacuaaguuacggaugguaacaggacugcgcaacaucccaucaauccagagucgaggccucuucggcgcuauugccggguuuauagaaggagguuggaccggcaugguggaugggugguacggauaucaucaccagaaugagcaaggcagcgguuacgcagcugaccagaaauccacucagaacgccaucaaugggauuacaaacaaggucaauucugugaucgaaaagaugaacacccaguucacggcgguuggcaaagaguucaauaaacuugagagaaggauggaaaaccugaacaagaagguggaugacggauuuuuggauauauggaccuacaaugccgagcuacugguccuccuggaaaacgagcggacacuugacuuccacgacagcaaugugaaaaaccuguaugaaaagguaaaaucacaauugaagaauaacgcaaaagagauuggcaaugggugcuuugaguucuaccauaaguguaacgaugaaugcauggagaguguuaagaauggaacuuaugacuaccccaaauauuccgaagagagcaagcucaaccgugagaaaaucgauggugugaagcuggaaucuaugggcgucuaccagaucuuagcuauuuauucaaccguggccaguagccugguccuacucgugucccugggggcuaucucuuuuuggaugugcucgaauggaagccuucagugucgcauuugcauauga

SEQ ID NO: 130090 - RNA, 1698 nt, Artificial Sequence; identical to SEQ ID NO: 129958
  derived and/or modified CDS sequence (opt3) from hemagglutinin__InfluenzaA__ABW40125

SEQ ID NO: 130091 - RNA, 1701 nt, Artificial Sequence; identical to SEQ ID NO: 129976
  derived and/or modified CDS sequence (opt3) from hemagglutinin__InfluenzaA__ABW40136

SEQ ID NO: 130092 - RNA, 1698 nt, Artificial Sequence; identical to SEQ ID NO: 129993
  derived and/or modified CDS sequence (opt3) from hemagglutinin__InfluenzaA__ABW40147

SEQ ID NO: 130093 - RNA, 1698 nt, Artificial Sequence; identical to SEQ ID NO: 129962
  derived and/or modified CDS sequence (opt3) from hemagglutinin__InfluenzaA__ABW40158

SEQ ID NO: 130094 - RNA, 1698 nt, Artificial Sequence; identical to SEQ ID NO: 129962
  derived and/or modified CDS sequence (opt3) from hemagglutinin__InfluenzaA__ABW40180

SEQ ID NO: 130095 - RNA, 1701 nt, Artificial Sequence; identical to SEQ ID NO: 129976
  derived and/or modified CDS sequence (opt3) from hemagglutinin__InfluenzaA__ABW40191

SEQ ID NO: 130096 - RNA, 1698 nt, Artificial Sequence; identical to SEQ ID NO: 129978
  derived and/or modified CDS sequence (opt3) from hemagglutinin__InfluenzaA__ABW40202

SEQ ID NO: 130097 - RNA, 1698 nt, Artificial Sequence; identical to SEQ ID NO: 129958
  derived and/or modified CDS sequence (opt3) from hemagglutinin__InfluenzaA__ABW40213

SEQ ID NO: 130098 - RNA, 1698 nt, Artificial Sequence; identical to SEQ ID NO: 129958
  derived and/or modified CDS sequence (opt3) from hemagglutinin__InfluenzaA__ABW40224

SEQ ID NO: 130099 - RNA, 1698 nt, Artificial Sequence; identical to SEQ ID NO: 129962
  derived and/or modified CDS sequence (opt3) from hemagglutinin__InfluenzaA__ABW40235

SEQ ID NO: 130100 - RNA, 1701 nt, Artificial Sequence
  derived and/or modified CDS sequence (opt3) from hemagglutinin__InfluenzaA__ABW40246
augaagaccaucauugcccugagcuacauacucugccuuguguucgcucagaaacugcccggcaacgacaauuccacagcaacuuuguguuuagggcaccaugccgucccuaacggaacgaucguuaagaccauuacaaaugaucaaaucgaggugacuaacgcgaccgaacugguacagucuucaaguacaggugagauuugcgacagcccacaccagauccuagauggcgaaaauuguacccucauagacgcucugcuuggggauccgcagugcgacggauuucaaaacaaaaagugggaucuguucguggagagauccaaagccuauucuaauuguuaccccuaugacgucccugauuacgcaucguugaggucacucguggccagcaguggcacucuggaauuuaacaaugaguccuucaacuggacagguguuacccagaaugggacgucuagcgcuugcauccggcgcuccaacaauucauuuuucagucgacugaacuggcucacucauuuaaaguuuaaguauccagcacugaaugugaccaugcccaacaacgagaaauucgacaagcuguacauuuggggaguccaccauccuggcacagauaaugaccagguguuuuuguaugcccaggcuagcggccguaucacuguaucuaccaaaagaucccaacagacaguuauuccaaacaucgggucaaggccccgggugcgcaauauaccuagcagaauuaguaucuacuggaccauugucaagccaggagauauccugcuaaucaacucuacggguaaucucauugccccgaggggcuacuuccggauacgcuccgggaaaagcucgaucaugcgaucugacgcgcccauuggaaaguguaacuccgaaugcaucacuccuaauggcucaauaccaaacgacaagcccuuucagaaugugaacagaauuacauauggugcauguccuagguacgugaaacagaauacccugaaacuugccacugggaugcggaacgucccagagaagcaaacacguggaaucuucggcgcuaucgccggcuuuauugaaaaugggugggagggaaugguugaugguugguauggcuuccgccaccagaacagugaggggaucggacaggcagcugaccuuaagagcacccaagccgcgauugaucagauaaauggcaaauugaacagacucaucgguaagacgaacgaaaaauuccaccagauugagaaggaauuuuccgagguggaagggaggauccaggaccuggagaaguacguagaggauaccaaaaucgacuuauggucuuauaaugccgaacugcucguggcacuugagaaccaacauacaauugaucugacugacagcgaaaugaauaaguuguucgagaaaaccaagaaacagcuacgggaaaacgcugaggauaugggcaauggaugcuuuaagauauaccacaagugugacaacgccugcaucggcucaauucgaaaugggacauaugaucaugacgucuaccgcgacgaggcucugaacaauagauuccagaucaaaggaguggaacucaagagugguuacaaagauuggauucuguggaucuccuuugccauaagcugcuuccuucuguguguugcauugcucggcuuuaucaugugggccugccagaaggggaacauuagguguaauaucugcauuuga

SEQ ID NO: 130101 - RNA, 1698 nt, Artificial Sequence
  derived and/or modified CDS sequence (opt3) from hemagglutinin__InfluenzaA__ABW40257
augaaggugaaacugcucauccuucugugcaccuucacagccacuuacgcugacacgauuuguauaggcuaucacgcaaacaauagcaccgauacagucgacacuguuuuggagaagaacgugaccguaacacauuccgugaauuuacuggaagauucucacaacgggaaacuaugccuccugaagggaaucgcgccccuucagcuggguaauuguucagucgccggcuggauuuuggggaacccugagugcgaacuccugaucaguaaagagagcugguccuacauuguggaaaccccaaauccggagaacggaacuuguuaucccggcuacuuugcugacuaugaggaacugagagagcaacucucuucgguuagcucauucgaaagguuugagaucuucccuaaggagaguuccuggccaaaucauacagugaccggugucucugccagcugcucccacaacgggaagucaaguuuuuaccggaauuuacuguggcuuacgggcaaaaacggauuguaucccaaucugagcaagucuuacgcaaacaauaaagaaaaggaggugcuaguacucuggggcguucaucacccuccaaacauaggggaucagcgcgcccuguaccacacugaaaacgcuuauguguccgucgugucaagccauuacagucgacguuucacccccgagaucgcaaaaagaccuaaggugagggaccaggaaggacggauuaauuauuacuggacacuucuggagccaggugauacuaucauuuuugaggccaacggcaauuugaucgcuccgcgcuucgccuuugcgcucucuagaggguucggauccggcauaauuaccagcaacgcacccauggacgaaugugaugccaagugccagacaccucaaggugcuaucaauucgucucugccauuucagaacguccaccccguuaccauuggggaguguccuaaauaugugagguccacgaaguuacggaugguaacuggacugcgcaauaucccaucaauccagagucgaggccucuucggcgccauugcaggguuuauagaaggagguuggacaggcaugguggacgggugguacggauaucaucaccagaacgagcaaggcagcgguuacgcugccgaucagaaauccacccagaaugcgaucaacgggauuacuaauaaggucaacucuaucauagaaaagaugaauacacaguucaccgccgugggcaaagaguucaacaaacuugagagaaggauggaaaaucugaacaagaagguugacgauggauuuuuggacauuuggacguacaacgcagagcuacuggugcuccuggaaaaugagcggacccuugacuuccacgauagcaacgucaaaaaucuguaugaaaaggugaaaucacaauugaagaacaaugcuaaagagaucggcaacgggugcuuugaguucuaccauaaguguaaugacgaaugcauggagaguguaaagaacggaacauaugauuaccccaaauauuccgaagagagcaagcucaaucgugagaaaaucgacgguguuaagcuggaaucuaugggcguguaccagauuuuagccaucuauucaacugucgcuaguagccuggugcuacucgucucccugggggccauuucuuuuuggaugugcucgaacggaagccuucagugucgcauaugcaucuga

SEQ ID NO: 130102 - RNA, 1701 nt, Artificial Sequence; identical to SEQ ID NO: 130035
  derived and/or modified CDS sequence (opt3) from hemagglutinin__InfluenzaA__ABW40268

SEQ ID NO: 130103 - RNA, 1698 nt, Artificial Sequence
  derived and/or modified CDS sequence (opt3) from hemagglutinin__InfluenzaA__ABW40312
augaaggugaaacugcucguccuucugugcaccuucacagccacuuacgcugacacgaucuguauuggcuaucacgcaaacaauagcaccgauacaguugacacuguguuggagaagaacguaaccgugacacauuccgucaauuuacuggaagauucucacaacgggaaacuaugccuccugaagggaauagcgccccuucagcuggguaauuguucaguggccggcuggaucuuggggaacccugagugcgaacuccugauuaguaaagagagcugguccuacaucguugaaaccccaaauccggagaacggaacuuguuaucccggcuacuuugcugacuaugaggaacugagagagcaacucucuucggugagcucauucgaaagguuugagauuuucccuaaggagaguuccuggccaaaucauacagucaccggugugucugccagcugcucccacaacgggcggucaaguuuuuaccgcaauuuacuguggcuuacgggaaagaacggcuuguaucccaaucugagcaaaucuuacgcaaacaauaaggaaaaagagguacuuguucucuggggcgugcaucacccuccaaacaucggggaucagcgagcccuguaccacacugaaaacgcuuaugucuccguggugucaagccauuacagucguagauucacccccgagauagcaaagaggccuaaaguccgggaccaggaaggacgcaucaauuauuacuggacacuucuggagccaggugauacuauuaucuuugaggccaacggcaauuugauugcuccgagauucgccuuugcgcucucuaggggguucggauccggcaucauaaccagcaacgcacccauggacgaaugugaugccaagugccagacaccucaaggugcuauuaauucgucucugccauuucagaacguucaccccgugaccaucggggaguguccuaaguauguacgguccacgaaauuacgcauggugacuggacugcgaaauauuccaucaauccagaguagaggccucuucggcgccaucgcaggguuuauugaaggagguuggacaggcauggucgacgggugguacggauaucaucaccagaacgagcaaggcagcgguuacgcugccgaucagaaguccacccagaaugcgauaaacgggaucacuaauaaagugaacucuguuauugaaaagaugaauacacaguucaccgccgugggcaaagaguucaacaagcuagagaggcggauggaaaaucugaacaaaaaggucgacgauggauuuuuggacaucuggacguacaacgcagagcuacuggugcuccuggaaaaugagcguacccuugacuuccacgauagcaacguaaagaaucuguaugaaaaaguuaagucacaauugaaaaacaaugcuaaggagauaggcaacgggugcuuugaguucuaccauaaauguaaugacgaaugcauggagagugugaagaacggaacauaugauuaccccaaguauuccgaagagagcaaacucaaucgcgagaagauugacggugucaaacuggaaucuaugggcguguaccagaucuuagccaucuauucaacugucgcuaguagccuggugcuacucguuucccugggggccauuucuuuuuggaugugcucgaacggaagccuucaguguagaaucugcauuuga

SEQ ID NO: 130104 - RNA, 1701 nt, Artificial Sequence; identical to SEQ ID NO: 129976
  derived and/or modified CDS sequence (opt3) from hemagglutinin__InfluenzaA__ABW40323

SEQ ID NO: 130105 - RNA, 1698 nt, Artificial Sequence; identical to SEQ ID NO: 130004
  derived and/or modified CDS sequence (opt3) from hemagglutinin__InfluenzaA__ABW40334

SEQ ID NO: 130106 - RNA, 1698 nt, Artificial Sequence; identical to SEQ ID NO: 130004
  derived and/or modified CDS sequence (opt3) from hemagglutinin__InfluenzaA__ABW40345

SEQ ID NO: 130107 - RNA, 1698 nt, Artificial Sequence
  derived and/or modified CDS sequence (opt3) from hemagglutinin__InfluenzaA__ABW40356
augaaggugaaacugcucguccuucugugcaccuucacagccacuuacgcugacacgaucuguauuggcuaucacgcaaacaauagcaccgauacaguugacacuguguuggagaagaacguaaccgugacacauuccgucaauuuacuggaagauucucacaacgggaaacuaugccuccugaagggaauagcgccccuucagcuggguaauuguucaguggccggcuggaucuuggggaacccugagugcgaacuccugauuaguaaagagagcugguccuacaucguugaaaccccaaauccggagaacggaacuuguuaucccggcuacuuugcugacuaugaggaacugagagagcaacucucuucggugagcucauucgaaagguuugagauuuucccuaaggagaguuccuggccaaaucauacagucaccggugugucugccagcugcucccacaacgggaagucaaguuuuuaccggaauuuacuguggcuuacgggcaaaaacggauuguaucccaaucugagcaagucuuacgcaaacaauaaagaaaaggagguucuaguaauguggggcgugcaucacccuccaaacaucggggaucagcgcgcccucuaccacacugaaaacgcuuaugucuccguggugucaagccauuacagucgacguuucacccccgagauagcaaaaagaccuaaggucagggaccaggaaggacggaucaauuauuacuggacacugcuugagccaggugauacuauuaucuuugaggccaacggcaaucugauugcuccgcgcuucgccuuugcguugucuagaggguucggauccggcaucauaaccagcaacgcacccaugggugaaugugacgccaagugccagacaccucaaggggcuauuaauucgucucucccauuucagaacguucaccccgugaccaucggagaguguccuaaauauguaagguccgccaagcugcggauggugacgggcuuacgcaauauuccaucaauccagagucgaggccuguucggggcaaucgcuggauuuauugaagguggcuggacugggauggucgauggaugguacggcuaucaucaccagaacgagcaagguagcggguacgccgcggaccagaaauccacacagaaugccauaaacggcaucaccaauaaggugaacucuguuauugaaaagaugaauacucaguucacagcagugggaaaagaguucaacaaacucgagagaaggauggaaaaucuuaacaagaaggucgaugacggcuuucuggauaucuggaccuacaacgcugaguugcuagugcugcucgaaaaugagcggacgcuggacuuccacgacagcaacguuaaaaaucuuuaugaaaagguaaaaucacaacugaagaacaaugccaaagagauagggaacggaugcuuugaguucuaccauaaguguaaugaugaaugcauggagagugugaagaacgguaccuaugacuaccccaaauauuccgaagagagcaaguugaaucgugagaaaauugauggcgucaagcucgaaucuauggggguguaccagauccuggcuaucuauucaacagucgccaguagcuuagugcugcuaguuucccucggagcaauuucuuuuuggaugugcucgaacggcagccugcagugucgcaucugcauuuga

SEQ ID NO: 130108 - RNA, 1698 nt, Artificial Sequence; identical to SEQ ID NO: 129962
  derived and/or modified CDS sequence (opt3) from hemagglutinin__InfluenzaA__ABW40367

SEQ ID NO: 130109 - RNA, 1701 nt, Artificial Sequence; identical to SEQ ID NO: 129976
  derived and/or modified CDS sequence (opt3) from hemagglutinin__InfluenzaA__ABW40378

SEQ ID NO: 130110 - RNA, 1698 nt, Artificial Sequence; identical to SEQ ID NO: 129962
  derived and/or modified CDS sequence (opt3) from hemagglutinin__InfluenzaA__ABW40389

SEQ ID NO: 130111 - RNA, 1698 nt, Artificial Sequence; identical to SEQ ID NO: 129958
  derived and/or modified CDS sequence (opt3) from hemagglutinin__InfluenzaA__ABW40400

SEQ ID NO: 130112 - RNA, 1698 nt, Artificial Sequence; identical to SEQ ID NO: 129958
  derived and/or modified CDS sequence (opt3) from hemagglutinin__InfluenzaA__ABW40411

SEQ ID NO: 130113 - RNA, 1698 nt, Artificial Sequence; identical to SEQ ID NO: 129958
  derived and/or modified CDS sequence (opt3) from hemagglutinin__InfluenzaA__ABW40422

SEQ ID NO: 130114 - RNA, 1698 nt, Artificial Sequence; identical to SEQ ID NO: 130004
  derived and/or modified CDS sequence (opt3) from hemagglutinin__InfluenzaA__ABW40433

SEQ ID NO: 130115 - RNA, 1698 nt, Artificial Sequence; identical to SEQ ID NO: 129978
  derived and/or modified CDS sequence (opt3) from hemagglutinin__InfluenzaA__ABW40444

SEQ ID NO: 130116 - RNA, 1698 nt, Artificial Sequence; identical to SEQ ID NO: 129995
  derived and/or modified CDS sequence (opt3) from hemagglutinin__InfluenzaA__ABW40455

SEQ ID NO: 130117 - RNA, 1698 nt, Artificial Sequence; identical to SEQ ID NO: 129962
  derived and/or modified CDS sequence (opt3) from hemagglutinin__InfluenzaA__ABW40466

SEQ ID NO: 130118 - RNA, 1698 nt, Artificial Sequence; identical to SEQ ID NO: 129962
  derived and/or modified CDS sequence (opt3) from hemagglutinin__InfluenzaA__ABW40477

SEQ ID NO: 130119 - RNA, 1698 nt, Artificial Sequence; identical to SEQ ID NO: 129958
  derived and/or modified CDS sequence (opt3) from hemagglutinin__InfluenzaA__ABW40488

SEQ ID NO: 130120 - RNA, 1698 nt, Artificial Sequence; identical to SEQ ID NO: 129962
  derived and/or modified CDS sequence (opt3) from hemagglutinin__InfluenzaA__ABW40499

SEQ ID NO: 130121 - RNA, 1698 nt, Artificial Sequence; identical to SEQ ID NO: 130004
  derived and/or modified CDS sequence (opt3) from hemagglutinin__InfluenzaA__ABW40510

SEQ ID NO: 130122 - RNA, 1698 nt, Artificial Sequence; identical to SEQ ID NO: 129958
  derived and/or modified CDS sequence (opt3) from hemagglutinin__InfluenzaA__ABW40521

SEQ ID NO: 130123 - RNA, 1698 nt, Artificial Sequence; identical to SEQ ID NO: 129962
  derived and/or modified CDS sequence (opt3) from hemagglutinin__InfluenzaA__ABW40532

SEQ ID NO: 130124 - RNA, 1698 nt, Artificial Sequence
  derived and/or modified CDS sequence (opt3) from hemagglutinin__InfluenzaA__ABW40543
augaaggugaaacugcucguccuucugugcaccuucacagccacuuacgcugacacgaucuguauuggcuaucacgcaaacaauagcaccgauacaguugacacuguguuggagaagaacguaaccgugacacauuccgucaauuuacuggaagauagacacaacgggaaacuaugccuccugaagggaauagcgccccuucagcuggguaauuguucuguggccggcuggaucuuggggaacccugagugcgaacuccugaccucaaaagagaguuggagcuacauuguugaaacuccaaauccggagaacggaacauguuaucccggcuacuuugcugacuaugaggaacugagggagcaacucuccucugugucgucauucgaacgguuugagaucuucccuaaggagagcaguuggccaaaucauaccgucacggguguguccgccucuugcagccacaacgggaaguccucauuuuaccgcaauuuacuguggcuuacuggcaaaaacggauuguaucccaaucugaguaagagcuacgcaaacaauaaagaaaaggagguucuaguacucuggggcgugcaucacccuccaaacauuggggaucagcgagcccuguaccacaccgaaaacgcuuaugucucugugguguccucacauuacagccguagauucacacccgagaucgcaaaaaggccuaagguccgggaccaggaaggacgcauaaauuauuacuggacucuucuggagccaggugauaccaucauuuuugaggccaacggcaauuugaucgcuccgagauucgccuuugcgcucaguaggggguucggaucuggcauuaucacauccaacgcacccauggacgaaugugaugccaagugccagaccccucaaggugcuauaaauagcucgcugccauuucagaacguucaccccgugacgauuggggaguguccuaaauauguacggucugccaaguuacgcauggugacuggacugcgaaauaucccauccauucagucaagaggccucuucggcgcaaucgcuggguuuaucgaaggagguuggacaggcauggucgacgggugguacggauaucaucaccagaacgagcaaggcagugguuacgccgcggaucagaaaagcacccagaaugccauuaacgggauaacuaauaaggugaacuccguuaucgaaaagaugaauacacaguucaccgcagugggcaaagaguucaacaaacuugagaggcggauggaaaaucugaacaagaaggucgacgauggauuuuuggacauuuggacguacaacgcugagcuacuggugcuccuggaaaaugagcguacccuugacuuccacgauucuaacguuaaaaaucuguaugaaaagguaaaaagccaauugaagaacaaugccaaagagaucggcaacgggugcuuugaguucuaccauaaguguaaugacgaaugcauggagucagugaagaacggaacauaugauuaccccaaauauagugaagaguccaagcucaaucgcgagaaaauagacggugucaagcuggaaagcaugggcguguaccagauuuuagcuaucuauucuacugucgccucaagucuggugcuacucguuagccugggggcaaucuccuuuuggaugugcucuaacggaucgcuucaguguagaauuugcaucuga

SEQ ID NO: 130125 - RNA, 1698 nt, Artificial Sequence; identical to SEQ ID NO: 130103
  derived and/or modified CDS sequence (opt3) from hemagglutinin__InfluenzaA__ABW40554

SEQ ID NO: 130126 - RNA, 1698 nt, Artificial Sequence; identical to SEQ ID NO: 129962
  derived and/or modified CDS sequence (opt3) from hemagglutinin__InfluenzaA__ABW40565

SEQ ID NO: 130127 - RNA, 1698 nt, Artificial Sequence
  derived and/or modified CDS sequence (opt3) from hemagglutinin__InfluenzaA__ABW40576
augaaggugaaacugcucauccuucugugcaccuucacagccacuuacgcugacacgauuuguauaggcuaucacgcaaacaauagcaccgauacagucgacacuguuuuggagaagaacgugaccguaacacauuccgugaauuuacuggaagauucucacaacgggaaacuaugccuccugaagggaaucgcgccccuucagcuggguaauuguucagucgccggcuggauuuuggggaacccugagugcgaacuccugaucaguaaagagagcugguccuacauuguggaaaccccaaauccggagaacggaacuuguuaucccggcuacuuugcugacuaugaggaacugagagagcaacucucuucgguuagcagcuucgaaagguuugagaucuucccuaaggagaguuccuggccaaaucauacagugaccggugucucugccagcugcucccacaacgggaagucaaguuuuuaccggaauuuacuguggcuuacgggcaaaaacggauuguaucccaaucugagcaagucuuacgcaaacaauaaagaaaaggaggugcuaguacucuggggcguucaucacccuccaaacauaggggaucagcgcgcccuguaccacacugaaaacaccuauguguccgucgugucaagccauuacagucgacguuucacacccgagaucgcuaaaagaccuaaggugagggaccaggaaggacggauuaauuauuacuggacucuucuggagccaggugauaccaucauuuuggaggcaaacggcaaucucaucgccccgcgcuuugcuuucgcccugucuagaggguuuggauccggcauaauuacaagcaacgcgcccauggacgaaugugaugcaaagugccagaccccucaaggugccaucaauucgucuuuaccauuccagaacguccaccccguuacgauuggggaguguccuaaauaugugagguccacuaagcugcggaugguaacaggacuccgcaauaucccaucaauccagagucgaggccuuuuuggcgcuauugccggguucauagaaggagguuggaccggcaugguggacgggugguacggauaucaucaccagaacgagcaaggcagcgguuacgcagcugaucagaaauccacucagaaugccaucaacgggauuacaaauaaggucaacucugugaucgaaaagaugaauacccaguuuacggcgguuggcaaagaguucaacaaacuggagagaaggauggaaaauuugaacaagaagguggacgauggauuccuagacauauggaccuacaacgccgagcugcucguccugcuugaaaaugagcggacacuggacuuucacgauagcaacgugaaaaauuuguaugaaaagguaaaaucacaacucaagaacaaugcaaaagagauuggcaacgggugcuucgaguuuuaccauaaguguaaugacgaaugcauggagaguguuaagaacggaacuuaugauuaccccaaauauuccgaagagagcaagcugaaucgugagaaaaucgacggugugaaguuagaaucuaugggcgucuaccagauccuggcuauuuauucaaccguggccaguagccuaguccuccuggugucccuuggggcuaucucuuucuggaugugcucgaacggaucauugcagugucgcauuugcauauga

SEQ ID NO: 130128 - RNA, 1701 nt, Artificial Sequence; identical to SEQ ID NO: 130035
  derived and/or modified CDS sequence (opt3) from hemagglutinin__InfluenzaA__ABW40587

SEQ ID NO: 130129 - RNA, 1698 nt, Artificial Sequence; identical to SEQ ID NO: 130004
  derived and/or modified CDS sequence (opt3) from hemagglutinin__InfluenzaA__ABW40598

SEQ ID NO: 130130 - RNA, 1698 nt, Artificial Sequence; identical to SEQ ID NO: 129978
  derived and/or modified CDS sequence (opt3) from hemagglutinin__InfluenzaA__ABW40609

SEQ ID NO: 130131 - RNA, 1698 nt, Artificial Sequence; identical to SEQ ID NO: 129993
  derived and/or modified CDS sequence (opt3) from hemagglutinin__InfluenzaA__ABW40620

SEQ ID NO: 130132 - RNA, 1701 nt, Artificial Sequence; identical to SEQ ID NO: 130035
  derived and/or modified CDS sequence (opt3) from hemagglutinin__InfluenzaA__ABW40631

SEQ ID NO: 130133 - RNA, 1698 nt, Artificial Sequence; identical to SEQ ID NO: 129958
  derived and/or modified CDS sequence (opt3) from hemagglutinin__InfluenzaA__ABW40642

SEQ ID NO: 130134 - RNA, 1701 nt, Artificial Sequence; identical to SEQ ID NO: 130035
  derived and/or modified CDS sequence (opt3) from hemagglutinin__InfluenzaA__ABW40653

SEQ ID NO: 130135 - RNA, 1698 nt, Artificial Sequence; identical to SEQ ID NO: 130004
  derived and/or modified CDS sequence (opt3) from hemagglutinin__InfluenzaA__ABW40664

SEQ ID NO: 130136 - RNA, 1698 nt, Artificial Sequence; identical to SEQ ID NO: 129978
  derived and/or modified CDS sequence (opt3) from hemagglutinin__InfluenzaA__ABW40675

SEQ ID NO: 130137 - RNA, 1698 nt, Artificial Sequence; identical to SEQ ID NO: 130107
  derived and/or modified CDS sequence (opt3) from hemagglutinin__InfluenzaA__ABW71294

SEQ ID NO: 130138 - RNA, 1698 nt, Artificial Sequence; identical to SEQ ID NO: 130004
  derived and/or modified CDS sequence (opt3) from hemagglutinin__InfluenzaA__ABW71305

SEQ ID NO: 130139 - RNA, 1698 nt, Artificial Sequence
  derived and/or modified CDS sequence (opt3) from hemagglutinin__InfluenzaA__ABW71316
augaaggugaaacugcucauccuucugugcaccuucacagccacuuacgcugacacgauuuguauaggcuaucacgcaaacaauagcaccgauacagucgacacuguuuuggagaagaacgugaccguaacacauuccgugaauuuacuggaagauucucacaacgggaaacuaugccuccugaagggaaucgcgccccuucagcuggguaauuguucagucgccggcuggauuuuggggaacccugagugcgaacuccugaucaguaaagagagcugguccuacauuguggaaaccccaaauccggagaacggaacuuguuaucccggcuacuuugcugacuaugaggaacugagagagcaacucucuucgguuagcucauucgaaagguuugagaucuucccuaaggagaguuccuggccaaaucauacagugaccggugucucugccagcugcucccacaacgggaagucaaguuuuuaccggaauuuacuguggcuuacgggcaaaaacggauuguaucccaaucugagcaagucuuacgcaaacaauaaagaaaaggaggugcuaguacucuggggcguucaucacccuccaaacauaggggaucagcgcgcccuguaccacacugaaaacgcuuauguguccgucgugucaagccauuacagucgacguuucacccccgagaucgcaaaaagaccuaaggugagggaccaggaaggacggauuaauuauuacuggacacuucuggagccacgcgauacuaucauuuuugaggccaacgguaauuugaucgcuccgagauucgccuuugcgcucucuaggggcuucggguccggaauaauuaccagcaacgcacccauggacgaaugugaugccaagugccagacaccucaaggcgcuaucaauucgucucugccauuucagaacguccaccccguuaccauuggugaguguccuaaauaugugcgguccacgaaguuacgcaugguaacugggcugcgaaauaucccaucaauccagaguagaggacucuucggcgccauugcaggcuuuauagaagggggauggacagguaugguggacggcugguacggguaucaucaccagaacgagcaaggaagcggcuacgcugccgaucagaaauccacccagaaugcgaucaacgguauuacuaauaaggucaacucugugaucgaaaagaugaauacacaguucaccgccguugggaaagaguucaacaaacuugagaggcggauggaaaaucugaacaagaagguggacgauggcuuuuuggacauauggacguacaacgcagagcuacugguccuccuggaaaaugagcguacccuugacuuccacgauagcaacgugaaaaaucuguaugaaaagguaaaaucacaauugaagaacaaugcuaaagagauuggaaacggcugcuuugaguucuaccauaaguguaaugacgaaugcauggagaguguuaagaacgggacauaugauuaccccaaauauuccgaagagagcaagcucaaucgcgagaaaaucgacggagugaagcuggaaucuaugggugucuaccagaucuuagccauuuauucaacuguggcuaguagccugguccuacucgugucccugggcgccaucucuuuuuggaugugcucgaacgggagccuucaguguagaauuugcauauga

SEQ ID NO: 130140 - RNA, 1698 nt, Artificial Sequence; identical to SEQ ID NO: 129958
  derived and/or modified CDS sequence (opt3) from hemagglutinin__InfluenzaA__ABW71327

SEQ ID NO: 130141 - RNA, 1698 nt, Artificial Sequence; identical to SEQ ID NO: 129962
  derived and/or modified CDS sequence (opt3) from hemagglutinin__InfluenzaA__ABW71338

SEQ ID NO: 130142 - RNA, 1701 nt, Artificial Sequence; identical to SEQ ID NO: 129976
  derived and/or modified CDS sequence (opt3) from hemagglutinin__InfluenzaA__ABW71349

SEQ ID NO: 130143 - RNA, 1698 nt, Artificial Sequence
  derived and/or modified CDS sequence (opt3) from hemagglutinin__InfluenzaA__ABW71360
augaaggugaaacugcucguccuucugugcaccuucacagccacuuacgcugacacgaucuguauuggcuaucacgcaaacaauagcaccgauacaguugacacuguguuggagaagaacguaaccgugacacauuccgucaauuuacuggaagauagacacaacgggaaacuaugccuccugaagggaauagcgccccuucagcuggguaauuguucuguggccggcuggaucuuggggaacccugagugcgaacuccugauuucaaaagagaguuggagcuacaucguugaaaccccaaauccggagaacggaacuuguuaucccggcuacuuugcugacuaugaggaacugagggagcaacucuccucugugucgucauucgaacgguuugagauuuucccuaaggagagcaguuggccaaaucauacagucaccgguguguccgccucuugcagccacaacgggaaguccucauuuuaccgcaauuuacuguggcuuacgggaaagaacggcuuguaucccaaucugagucgaagcuacgcaaacaauaaggaaaaagagguacuuguucucuggggcgugcaucacccuccaaacaucggggaucagcgugcccuguaccacacugaaaacgcuuaugucucugugguguccucacauuacagcagaagguucacccccgagauagcaaagcggccuaaaguccgcgaccaggaaggaagaaucaauuauuacuggacacuucuggagccaggugauacuauuaucuuugaggccaacggcaauuugauugcuccgagguucgccuuugcgcucagucggggguucggaucuggcaucauaaccuccaacgcacccauggacgaaugugaugccaagugccagacaccucaaggugcuauuaauagcucgcugccauuucagaacguucaccccgugaccaucggggaguguccuaaguauguacgcucugccaaauuacgaauggugacgggacugagaaauauuccauccauccagucaaggggccucuucggcgcaaucgcuggguuuauugaaggagguuggacuggcauggucgacgggugguacggauaucaucaccagaacgagcaaggcagugguuacgccgcggaucagaaaagcacacagaaugccauaaacgggaucaccaauaaagugaacuccguuauugaaaagaugaauacucaguucacagcagugggcaaagaguucaacaagcuagagcggcguauggaaaaucugaacaaaaaggucgacgauggauuuuuggacaucuggaccuacaacgcugagcuacuggugcuccuggaaaaugagcgcacgcuugacuuccacgauucuaacguaaagaaucuguaugaaaaaguuaagagccaauugaaaaacaaugccaaggagauaggcaacgggugcuuugaguucuaccauaaaugugacgaugaaugcauggagucagugaagaauggaaccuaugacuaccccaaguauagugaagaguccaaacucaacagagagaagauugauggugucaaacuggaaagcaugggcguguaccagaucuuagcuaucuauucuacagucgccucaagucuggugcuacucguuagccugggggcaauuuccuuuuggaugugcucuaauggaucgcuucaguguaggaucugcauuuga

SEQ ID NO: 130144 - RNA, 1698 nt, Artificial Sequence; identical to SEQ ID NO: 129978
  derived and/or modified CDS sequence (opt3) from hemagglutinin__InfluenzaA__ABW71371

SEQ ID NO: 130145 - RNA, 1698 nt, Artificial Sequence
  derived and/or modified CDS sequence (opt3) from hemagglutinin__InfluenzaA__ABW71382
augaaggugaaacugcucauccuucugugcaccuucacagccacuuacgcugacacgauuuguauaggcuaucacgcaaacaauagcaccgauacagucgacacuguuuuggagaagaacgugaccguaacacauuccgugaauuuacuggaagauucucacaacgggaaacuaugccuccugaagggaaucgcgccccuucagcuggguaauuguucagucgccggcuggauuuuggggaacccugagugcgaacuccugaucaguaaagagagcugguccuacauuguggaaaccccaaauccggagaacggaacuuguuaucccggcuacuuugcugacuaugaggaacugagagagcaacucucuucgguuagcucauucgaaagguuugagaucuucccuaaggagaguuccuggucuaaucauacaauaaccggugugagcgccuccugcucacacaacgggaagaguagcuuuuaccggaauuuacuguggcuuacgggcaaaaacggauuguauccaaaucugucuaaguccuacgcaaacaauaaagaaaaggagguccuagugcucuggggcguacaucaucccccuaacaucggggaucagcgcgcccuguaccacacugaaaacgcuuauguuucaguggucagcagucacuacucucgacguuucaccccagagauugcaaaaagacccaaggugagggaccaggaaggacggaucaauuauuacuggacacuucuggagccuggugauacuauuaucuuugaggccaacggcaauuugauagcuccacgcuucgccuuugcgcucuccagaggguucggaagcggcauuaucaccucgaacgcaccgauggacgaaugugaugccaagugccagacaccccaaggugcuauuaauucuucccugccuuuucagaacgugcacccagucaccaucggggagugucccaaauauguuaggucaacgaaguuacggauggugacuggacugcgcaauaucccuaguauucagagccgaggccucuucggcgccauagcaggguuuaucgaaggagguuggacaggcaugguagacgggugguacggauaucaucaccagaacgagcaaggcuccgguuacgcugccgaucagaaaucuacccagaaugcgauuaacgggaucacuaauaaggugaacagcgucauagaaaagaugaauacacaguucaccgccgugggcaaagaguucaacaaacuugagagaaggauggaaaaucugaacaagaagguugacgauggauuuuuggacauuuggacguacaacgcagagcuacuggugcuccuggaaaaugagcggacccuugacuuccacgauucaaacgucaaaaaucuguaugaaaaggugaaaagucaauugaagaacaaugcuaaagagaucggcaacgggugcuuugaguucuaccauaaguguaaugacgaaugcauggaguccguaaagaacggaacauaugauuacccaaaauauagcgaagagucuaagcucaaucgugagaaaaucgacgguguuaagcuggaaucaaugggcguguaccagauuuuagccaucuauaguacugucgcuagcucccuggugcuacucgucucucugggggccauuucguuuuggaugugcagcaacggaucccuucagugucgcauaugcaucuga

SEQ ID NO: 130146 - RNA, 1698 nt, Artificial Sequence
  derived and/or modified CDS sequence (opt3) from hemagglutinin__InfluenzaA__ABW71393
augaaggugaaacugcucguccuucugugcaccuucacagccacuuacgcugacacgaucuguauuggcuaucacgcaaacaauagcaccgauacaguugacacuguguuggagaagaacguaaccgugacacauuccgucaauuuacuggaagauucucacaacgggaaacuaugccuccugaagggaauagcgccccuucagcuggguaauuguucaguggccggcuggaucuuggggaacccugagugcgaacuccugauuaguaaagagagcugguccuacaucguugaaaccccaaauccggagaacggaacuuguuaucccggcuacuuuacagacuaugaggaacugagagagcaacucucuucggugagcucauucgaaagguuugagauuuucccuaaggagaguuccuggccaaaucauaccgucacgggugugucugcuagcugcucccacaacgggaagucaaguuuuuaccggaauuuacuguggcuuacuggcaaaaacggauuguaucccaaucugagcaagucuuacgccaacaauaaagaaaaggagguucuaguacucuggggcgugcaucacccuccaaacaucggggaucagcgcgcacuguaccacaccgaaaacgccuaugucuccguggugucaagccauuacagucgacguuucacacccgagauagcuaaaagaccuaaggucagggaccaggaaggacggaucaauuauuacuggacucuucuggagccaggugauaccauuaucuuugaggcaaacggcaauuugauugccccgcgcuucgcuuuugcccucucuagaggguucggauccggcaucauaacaagcaacgcgcccaugggugaaugugacgcaaagugccagaccccucaaggggccauuaauucgucucugccauuucagaacguucaccccgugacgaucggagaguguccuaaauauguaagguccgcuaaguuacggauggugacuggccugcgcaauauuccaucaauccagagucgaggccucuucggggccaucgcaggauuuauugaagguggcuggacagggauggucgauggaugguacggcuaucaucaccagaacgagcaagguagcggguacgcugccgaccagaaauccacccagaaugcgauaaacggcaucacuaauaaggugaacucuguuauugaaaagaugaauacacaguucaccgccgugggaaaagaguucaacaaacuugagagaaggauggaaaaucugaacaagaaggucgaugacggcuuuuuggauaucuggacguacaacgcagagcuacuggugcuccuggaaaaugagcggacccuugacuuccacgacagcaacguuaaaaaucuguaugaaaagguaaaaucacaauugaagaacaaugcuaaagagauagggaacggaugcuuugaguucuaccauaaguguaaugaugaaugcauggagagugugaagaacgguacauaugacuaccccaaauauuccgaagagagcaagcucaaucgugagaaaauugauggcgucaagcuggaaucuauggggguguaccagaucuuagccaucuauucaacugucgcuaguagccuggugcuacucguuucccugggagccauuucuuuuuggaugugcucgaacggcagccuucagugucgcaucugcauuuga

SEQ ID NO: 130147 - RNA, 1698 nt, Artificial Sequence; identical to SEQ ID NO: 130107
  derived and/or modified CDS sequence (opt3) from hemagglutinin__InfluenzaA__ABW71404

SEQ ID NO: 130148 - RNA, 1698 nt, Artificial Sequence; identical to SEQ ID NO: 129995
  derived and/or modified CDS sequence (opt3) from hemagglutinin__InfluenzaA__ABW71415

SEQ ID NO: 130149 - RNA, 1698 nt, Artificial Sequence
  derived and/or modified CDS sequence (opt3) from hemagglutinin__InfluenzaA__ABW71426
augaaggccaaacugcucauccuucugugcaccuucacagcuacuuacgcagacacgauuuguauaggcuaucacgccaacaauagcaccgauacaguggacacugucuuggagaagaacguuaccgugacacauuccguaaauuuacuggaagauucucacaacgggaaacuaugccuccugaagggaaucgcgccccuucagcuggguaauuguucaguggcuggcuggauuuuggggaacccugagugcgaacuccugaucaguaaagagagcugguccuacauugucgaaaccccaaauccggagaacggaacuuguuaucccggcuacuuugccgacuaugaggaacugagagagcaacucucuucggugagcucauucgaaagguuugagaucuucccuaaggagaguuccuggccaaaucauacaguuaccggugugucugcaagcugcucccacaacgggaagucaaguuuuuaccggaauuuacuguggcuuacgggcaaaaacggauuguaucccaaucugagcaagucuuacgccaacaauaaagaaaaggagguccuagugcucuggggcguacaucacccuccaaacauaggggaucagcgcgcucuguaccacacugaaaacgcauauguuuccguggucucaagccauuacagucgacguuucacccccgagaucgccaaaagaccuaaggugagggaccaggaaggacggauuaauuauuacuggacacuucuggagccaggugauacuaucauuuuugaggcuaacggcaauuugaucgccccgcgcuucgcguuugcacucucuagaggguucggauccggcauaauuaccagcaacgcccccauggacgaaugugaugcuaagugccagacaccucaaggugccaucaauucgucucugccauuucagaacgugcaccccgucaccauuggggaguguccuaaauauguuagguccacgaaguuacggauggugacuggacugcgcaauaucccaucaauccagagucgaggccucuucggcgcaauugcuggguuuauagaaggagguuggacaggcaugguagacgggugguacggauaucaucaccagaacgagcaaggcagcgguuacgccgcggaucagaaauccacccagaaugccaucaacgggauuacuaauaaggugaacucugucaucgaaaagaugaauacacaguucaccgcagugggcaaagaguucaacaaacuugagagaaggauggaaaaucugaacaagaagguugacgauggauuuuuggacauauggacguacaacgcugagcuacuggugcuccuggaaaaugagcggacccuugacuuccacgauagcaacgucaaaaaucuguaugaaaaggugaaaucacaauugaagaacaaugccaaagagauuggcaacgggugcuuugaguucuaccauaaguguaaugacgaaugcauggagaguguaaagaacggaacauaugauuaccccaaauauuccgaagagagcaagcucaaucgugagaaaaucgacgguguuaagcuggaaucuaugggcguguaccagaucuuagcuauuuauucaacugucgccaguagccuggugcuacucgucucccugggggcaaucucuuuuuggaugugcucgaacggaagccuucagugucgcauuugcauauga

SEQ ID NO: 130150 - RNA, 1698 nt, Artificial Sequence
  derived and/or modified CDS sequence (opt3) from hemagglutinin__InfluenzaA__ABW71448
augaaggugaaacugcucguccuucugugcaccuucacagccacuuacgcugacacgaucuguauuggcuaucacgcaaacaauagcaccgauacaguugacacuguguuggagaagaacguaaccgugacacauuccgucaauuuacuggaagauucucacaacgggaaacuaugccuccugaagggaauagcgccccuucagcuggguaauuguucaguggccggcuggaucuuggggaacccugagugcgaacuccugauuaguaaagagagcugguccuacaucguugaaaccccaaauccggagaacggaacuuguuaucccggcuacuuugcugacuaugaggaacugagagagcaacucucuucggugagcucauucgaaagguuugagauuuucccuaaggagaguuccuggccaaaucauacagucaccggugugucugccagcugcucccacaacgggaagucaaguuuuuaccggaauuuacuguggcuuacgggcaaaaacggauuguaucccaaucugagcaagucuuacgcaaacaauaaagaaaaggagguucuaguacucuggggcgugcaucacccuccaaacaucggggaucagcgcgcccuguaccacacugaaaacgcuuaugucuccguggugucaagccauuacagucgacguuucacccccgagauagcaaaaagaccuaaggucagggaccaggaaggacggaucaauuauuacuggacacuucuggagccaggugauacuauuaucuuugaggccaacggcaauuugauugcuccgcgcuucgccuuugcgcucucuagaggguucggauccggcaucauaaccagcaacgcacccauggacgaaugugaugccaagugccagacaccucaaggugcuauuaauucgucucugccauuucagaacguucaccccgugaccaucggggaguguccuaaauauguaagguccacgaaguuacggauggugacuggacugcgcaauauuccaucaauccagagucgaggccucuucggcgccaucgcaggguuuauugaaggagguuggacaggcauggucgacgggugguacggauaucaucaccagaacgagcaaggcagcgguuacgcugccgaucagaaauccacccagaaugcgauaaacgggaucacuaauaaggugaacucuguuauugaaaagaugaauacacaguucaccgccgugggcaaagaguucaacaaacuugagagaaggauggaaaaucugaacaagaaggucgacgauggauuuuuggacaucuggacguacaacgcagagcuacuggugcuccuggaaaaugagcggacccuugacuuccacgauagcaacguuaaaaaucuguaugaaaagguaaaaucacaauugaagaacaaugcuaaagagauaggcaacgggugcuuugaguucuaccauaaguguaaugacgaaugcauggagagugugaagaacggaacauaugauuaccccaaauauuccgaagagagcaagcucaaucgugagaaaauugacggugucaagcuggaaucuaugggcguguaccagaucuuagccaucuauucaacuauugcuaguagccugguccuacucgugucccugggggccaucucuuuuuggaugugcucgaacggaagccuucagugucgcauuugcauauga

SEQ ID NO: 130151 - RNA, 1698 nt, Artificial Sequence; identical to SEQ ID NO: 129978
  derived and/or modified CDS sequence (opt3) from hemagglutinin__InfluenzaA__ABW71459

SEQ ID NO: 130152 - RNA, 1698 nt, Artificial Sequence; identical to SEQ ID NO: 129962
  derived and/or modified CDS sequence (opt3) from hemagglutinin__InfluenzaA__ABW71470

SEQ ID NO: 130153 - RNA, 1707 nt, Artificial Sequence
  derived and/or modified CDS sequence (opt3) from hemagglutinin__InfluenzaA__ABW74702
auggagaagaucgugcugcuccuugccauugucagccugguuaaauccgaccagauaugcaucggcuaccacgcuaacaauucuaccgaacaaguggauacaauuauggagaagaacguaacugugacgcaugcacaggacaucuuggaaaagacccacaaugggaaauuaugugaucuggacggagucaaaccccuaauucucagagauugcucaguggccgguuggcugcuuggcaacccuaugugugacgaguucaucaauguuccagaauggaguuauauaguggagaaggcgaacccgacaaaugaucugugcuaccccgggagcuuuaacgacuaugaggaauugaagcaucuccuguccaggaucaaucacuucgagaaaauucagaucauuccuaagucuucguggucagaucaugaagcuagcaguggagucuccucugccuguccauaccugggcagcuccucauuuuuccggaacgugguauggcucaucaaaaagaauaguacuuaucccaccauuaaaaagagcuacaacaauacaaaccaggaggacuuacugguucuuugggguauacaccacccuaaugaugcagccgagcaaacccgcuuguaucagaacccaacuacauacaucucuauugggaccuccacgcugaaccagcggcuagugcccaagaucgcuacucguucaaaagucaauggacagagcggcagaauggaauuuuucuggaccauccucaagccuaacgacgcaauuaauuuugagaguaacggcaauuucauagccccagaauacgcuuauaaaaucgugaagaaaggggauucugccauuaugaaguccgagcuggaauacggaaacugcaauacaaaaugucaaacuccgaugggugcgaucaacagcucgaugcccuuucauaauauacacccucuuaccauuggcgagugcccaaaguaugugaagucuaacaggcuggucuuggcaacagggcuccgaaauucaccccagcgcgaguccagaaggaaaaagcggggacuguucggcgccaucgcugguuuuaucgaagggggauggcagggcaugguugacggcugguacggguaucaucacaguaacgagcagggaagcgguuacgccgcagacaaagaauccacccaaaaggcuauugauggcgugacgaauaaaguaaacucuaucauugacaagaugaauacucaguucgaggccguggggcgcgaauuuaacaacuuagagcgaagaauagagaaucugaacaagaaaauggaagauggauuccucgacgucuggacauauaaugcggagcuucugguguugauggaaaacgagaggacccuagauuuccacgacagcaauguuaagaaccuguacgauaaagugcggcuccagcugcgugacaaugccaaggaacuuggcaacgguuguuuugaguucuaccauaaaugcgauaaugaguguaucgaaucaauucgcaacgggacuuauaauuacccucaauauagugaggaagcaagacugaagagggaggagaucuccggcgucaaguuggaaagcaucggaacauaccagauucucucuauauauucaaccguggcuaguagccuggccuuagcuaucaugauggccggccugucccuauggaugugcucuaacgggucgcuccagugccggauuuguaucuga

SEQ ID NO: 130154 - RNA, 1707 nt, Artificial Sequence
  derived and/or modified CDS sequence (opt3) from hemagglutinin__InfluenzaA__ABW74703
auggagaagaucgugcugcuccuugccauugucagccugguuaaauccgaccagauaugcaucggcuaccacgcuaacaauucuaccgaacaaguggauacaauuauggagaagaacguaacugugacgcaugcacaggacaucuuggaaaagacccacaaugggaaauuaugugaucuggacggagucaaaccccuaauucucaaggauugcucaguggccgguuggcugcuuggcaacccuaugugugacgaguucaucaauguuccagaauggaguuauauaguggagaaggcgaacccgacaaaugaucugugcuaccccgggagcuuuaacgacuaugaggaauugaaacaucuccuguccagaaucaaucacuucgagaagauucagaucauuccuaaaucuucguggucagaucaugaagcuagcaguggagucuccucugccuguccauaccugggcagccccuccuuuuucaggaacgugguauggcucaucaagaaaaauucaacuuauccuaccauaaagaagaguuacaacaauacaaaccaggaggacuuacugguucuuugggguauucaccacccaaaugaugcagccgagcaaacccgguuguaucagaaccccacuacauacaucagcauugggaccucuacgcugaaccagcgccuagugccuaaaaucgcuacucgauccaaggucaauggacagucaggccguauggaauuuuucuggaccauccucaaaccaaacgacgcagugaauuuugagagcaacggcaauuucauugccccggaauacgcuuauaagauagugaaaaagggggauagugccaucaugaaaucugagcuggaauacggaaacugcaauacaaagugucaaacucccaugggugcgauuaacuccagcaugccuuuucauaauauccacccacuuaccauaggcgagugccccaaguaugucaaaucgaacagacugguuuuggcaacagggcucaggaacucuccucagcgggagucccgcagaaagaaaaggggacuguucggcgccauugcugguuuuaucgaagggggauggcagggcaugguggacggcugguacggguaucaucacucaaaugagcagggaagugguuacgccgcagacaaggaaagcacccaaaaagcuaucgauggcguaacgaauaaggugaacuccauuaucgacaagaugaauacucaguucgaggccgucgggcgggaauuuaacucuuuagagcgccgaauugagaaccugaauaaaaagauggaagauggauuccucgacguguggacauauaacgcggagcuucugguuuugauggaaaaugagagaacccuagauuuccacgacagcaacgugaaaaaucuguacgauaaggucaggcuccagcugcgggacaacgccaaagaacuuggcaaugguuguuuugaguucuaccauaagugcgauaacgaguguauggaaucaauacguaaugggacuuauaacuacccacaauauagugaggaagcacgccugaagagagaggagaucuccggcgugaaauuggaaagcauuggaacauaccagauccucucuaucuauucaaccguagcuaguagccuggccuuagcuauuaugauagccggccugucccuauggaugugcucuaaugggucgcuccagugcaggaucuguauuuga

SEQ ID NO: 130155 - RNA, 1707 nt, Artificial Sequence
  derived and/or modified CDS sequence (opt3) from hemagglutinin__InfluenzaA__ABW74705
auggagaagaucgugcugcuccuugccauugucagccugguuaaauccgaccagauaugcaucggcuaccacgcuaacaauucuaccgaacaaguggauacaauuauggagaagaacguaacugugacgcaugcacaggacaucuuggaaaagacccacaaugggaaauuaugugaucuggacggagucaaaccccuaauucucagagauugcucaguggccgguuggcugcuuggcaacccuaugugugacgaguucaucaauguuccagaauggaguuauauaguggagaaggcgaacccgacaaaugaucugugcuaccccgggagcuuuaacgacuaugaggaauugaagcaucuccuguccaggaucaaucacuucgagaaaauucagaucauuccuaagucuucguggucagaucaugaagcuagcaguggagucuccucugccuguccauaccugggcagccccuccuuuuuccggaacgugguauggcucaucaaaaagaacucaacuuauccuaccauuaaaaagaguuacaauaauacaaaccaggaggacuuacugguucuuugggguauacaccacccaaaugaugcagccgagcaaacccgcuuguaucagaaccccacuacauacaucagcauugggaccucuacgcugaaccagcggcuagugccuaagaucgcuacucguuccaaagucaauggacagucaggcagaauggaauuuuucuggaccauccucaagccaaacgacgcaauuaauuuugagagcaacggcaauuucauagccccggaauacgcuuauaaaaucgugaagaaaggggauagugccauuaugaagucugagcuggaauacggaaacugcaauacaaaaugucaaacucccaugggugcgaucaacuccagcaugccuuuucauaauauacacccacuuaccauuggcgagugccccaaguaugugaagucgaacaggcuggucuuggcaacagggcuccgaaauucuccucagcgcgaguccagaaggaaaaagcggggacuguucggcgccaucgcugguuuuaucgaagggggauggcagggcaugguugacggcugguacggguaucaucacucaaacgagcagggaagugguuacgccgcagacaaagaaagcacccaaaaggcuauugauggcgugacgaauaaaguaaacuccaucauugacaagaugaauacucaguucgaggccguggggcgcgaauuuaacaacuuagagcgaagaauagagaaucugaacaagaaaauggaagauggauuccucgacgucuggacauauaaugcggagcuucugguguugauggaaaacgagaggacccuagauuuccacgacucuaauguuaagaaccuguacgauaaagugcggcuccagcugcgugacaaugccaaggaacuuggcaacgguuguuuugaguucuaccauaaaugcgauaaugaguguauggaaagcauccgcaacgggacuuauaauuacccacaauauucagaggaagcaagacugaagagggaggagauuaguggcgucaaguuggaauccaucggaacauaccagauccucagcauuuauucuaccguggcuucaagucuggccuuagcuauaaugaucgccggccugagccuauggaugugcuccaacgggucucuccagugccggauuuguaucuga

SEQ ID NO: 130156 - RNA, 1707 nt, Artificial Sequence
  derived and/or modified CDS sequence (opt3) from hemagglutinin__InfluenzaA__ABW74707
auggagaagaucgugcugcuccuugccauugucagccugguuaaauccgaccagauaugcaucggcuaccacgcuaacaauucuaccgaacaaguggauacaauuauggagaagaacguaacugugacgcaugcacaggacaucuuggaaaagacccacaaugggaaauuaugugaucuggacggagucaaaccccuaauucucagagauugcucaguggccgguuggcugcuuggcaacccuaugugugacgaguucaucaauguuccagaauggaguuauauaguggagaaggcgaacccgacaaaugaucugugcuaccccgggagcuuuaacgacuaugaggaauugaagcaucuccuguccaggaucaaucacuucgagaaaauucagaucauuccuaagucuucguggucagaucaugaagcuagcaguggagucuccucugccuguccauaccugggcagccccuccuuuuuccggaacgugguauggcucaucaaaaagaacucaacuuauccuaccauuaaaaagaguuacaauaauacaaaccaggaggacuuacugguucuuugggguauacaccacccaaaugaugcagccgagcaaacccgcuuguaucagaaccccacuacauacaucagcauugggaccucuacgcugaaccagcggcuagugccuaagauggcuacucguuccaaagucaauggacagucaggcagaauggaauuuuucuggaccauccucaagccaaacgacgcaaucaauuuugagagcaacggcaauuucauugccccggaauacgcuuauaaaauagugaagaaaggggauagugccaucaugaagucugagcuggaauacggaaacugcaauacaaaaugucaaacucccaugggugcgauuaacuccagcaugccuuuucauaauauccacccacuuaccauaggcgagugccccaaguaugugaagucgaacaggcuggucuuggcaacagggcuccgaaauucuccucagcgcgaguccagaaggaaaaagcggggacuguucggcgccauugcugguuuuaucgaagggggauggcagggcaugguugacggcugguacggguaucaucacucaaacgagcagggaagugguuacgccgcagacaaagaaagcacccaaaaggcuaucgauggcgugacgaauaaaguaaacuccauuaucgacaagaugaauacucaguucgaggccguggggcgcgaauuuaacaacuuagagcgaagaauugagaaucugaacaagaaaauggaagauggauuccucgacgucuggacauauaaugcggagcuucugguguugauggaaaacgagaggacccuagauuuccacgacucuaauguuaagaaccuguacgauaaagugcggcuccagcugcgugacaaugccaaggaacuuggcaacgguuguuuugaguucuaccauaaaugcgauaaugaguguauggaaagcauacgcaacgggacuuauaauuacccacaauauucagaggaagcaagacugaagagggaggagaucaguggcgucaaguuggaauccauuggaacauaccagauccucagcaucuauucuaccguggcuucaagucuggccuuagcuauuaugauagccggccugagccuauggaugugcuccaacgggucucuccagugccggaucuguauuuga

SEQ ID NO: 130157 - RNA, 1707 nt, Artificial Sequence
  derived and/or modified CDS sequence (opt3) from hemagglutinin__InfluenzaA__ABW74708
auggagaagaucgugcugcuccuugccauugucagccugguuaaauccgaccagauaugcaucggcuaccacgcuaacaauucuaccgaacaaguggauacaauuauggagaagaacguaacugugacgcaugcacaggacaucuuggaaaagacccacaaugggaaauuaugugaucuggacggagucaaaccccuaauucucagagauugcucaguggccgguuggcugcuuggcaacccuaugugugacgaguucaucaauguuccagaauggaguuauauaguggagaaggcgaacccgacaaaugaucugugcuaccccgggagcuuuaacgacuaugaggaauugaagcaucuccuguccaggaucaaucacuucgagaaaauucagaucauuccuaagucuucguggucagaucaugaagcuagcaguggagucuccucugccuguccauaccugggcagccccuccuuuuuccggaacgugguauggcucaucaaaaagaacucaacuuauccuaccauuaaaaagaguuacaauaauacaaaccaggaggacuuacugguucuuugggguauacaccacccaaaugaugcagccgagcaaacccgcuuguaucagaaccccacuacauacaucagcauugggaccucuacgcugaaccagcggcuagugccuaagaucgcuacucguuccaaagucaauggacagucaggcagaauggaauuuuucuggaccauccucaagccaaacgacgcaauuaauuuugagagcaacggcaauuucauagccccggaauacgcuuauaaaaucgugaagaaaggggauagugccauuaugaagucugagcuggaauacggaaacugcaauacaaaaugucaaacucccaugggugcgaucaacuccagcaugccuuuucauaauauacacccacuuaccauuggcgagugccccaaguaugugaagucgaacaggucuguccuggcaacaggguugcgaaauuccccucagcgcgagucaagaaggaaaaagcggggacucuucggcgccaucgcugguuuuaucgaagggggauggcagggcaugguugacggcugguacggguaucaucacaguaacgagcagggaagcgguuacgccgcagacaaagaauccacccaaaaggcuauugauggcgugacgaauaaaguaaacucuaucauugacaagaugaauacucaguucgaggccguggggcgcgaauuuaacaaccuggagcgaagaauagagaauuuaaacaagaaaauggaagauggauuccuggacgucuggacauauaaugcggagcuccuugugcugauggaaaacgagaggaccuuggauuuccacgacagcaauguuaagaaccuauacgauaaagugcggcugcagcuccgugacaaugccaaggaacugggcaacgguuguuuugaguucuaccauaaaugcgauaaugaguguauggaaucaauccgcaacgggacuuauaauuacccacaauauagugaggaagcaagacuuaagagggaggagauuuccggcgucaagcuggaaagcaucggaacauaccagaucuugucuauuuauucaaccguggcuaguagccucgcccuggcuauaaugauggccggcuuaucccuguggaugugcucuaacgggucgcuacagugccggaucuguauuuga

SEQ ID NO: 130158 - RNA, 1707 nt, Artificial Sequence; identical to SEQ ID NO: 130155
  derived and/or modified CDS sequence (opt3) from hemagglutinin__InfluenzaA__ABW74710

SEQ ID NO: 130159 - RNA, 1707 nt, Artificial Sequence; identical to SEQ ID NO: 130155
  derived and/or modified CDS sequence (opt3) from hemagglutinin__InfluenzaA__ABW74711

SEQ ID NO: 130160 - RNA, 1707 nt, Artificial Sequence
  derived and/or modified CDS sequence (opt3) from hemagglutinin__InfluenzaA__ABW74712
auggagaagaucgugcugcuccuuagcauugucucccugguuaaaucugaccagauaugcaucggcuaccacgccaacaauucaaccgaacaaguggauacaauuauggagaagaacguaacugugacgcaugcucaggacaucuuggagaaaacccacaaugggaaguuaugugaucuggacggagucaaaccccuaauucucagagauugcaguguggcagguuggcugcuuggcaacccuaugugugacgaguucaucaauguuccagaauggagcuauauaguggagaaggccaacccgacaaaugaucugugcuaccccggguccuuuaacgacuaugaggaauugaagcaucuccugucuaggaucaaucacuucgagaaaauucagaucauuccuaagucgucauggagcgaucaugaagcgaguuccggagucucuagcgcuuguccauaccugggcucccccucauuuuuccggaacgugguauggcucaucaaaaagaauaguacuuauccuaccauuaaaaagagcuacaacaauacaaaccaggaggacuuacugguucuuugggguauacaccacccaaauaacgaggaagaacaaacccgcuuguaucagaaccccacuacauacaucucuauugggaccuccacgcugaaucagcgucuagugccuaagaucgccacucgaucaaaagucaacggacagagcggcagaauggaauuuuucuggaccauccucaagccaaaugaugcaauuaacuuugagaguaauggcaacuucauagccccggaauacgcuuauaaaaucgugaagaaaggggacucugcaauuaugaaguccgagcuggaguacagcaauugcaacacaaaaugucaaacucccaugggagccaucaauucgucuaugccuuuucauaacauacacccacuuaccauuggugaaugccccaaguaugugaaguccucaaggcuggucuuggcuacaggccuccggaauaguccucagcgcgagagcagaaggaaaaagcgggggcuguucggagccaucgcgggcuuuaucgaagguggguggcagggaaugguugauggcugguacggcuaucaucacuccaacgagcaggggucuggauacgcagccgacaaagaaagcacccaaaaggcuauugacggugugacgaauaaaguaaacucaaucauugauaagaugaauacucaguucgaggccgugggccgcgaguuuaacaacuuagaacgaagaauagagaaucugaacaagaaaauggaagacggguuccucgaugucuggacauauaaugcagagcuucugguguugauggaaaacgagaggacccuagacuuccacgauaguaauguuaagaaccuguacgacaaagugcggcuccagcugcgugauaaugcuaaggagcuuggaaacggcuguuuugaguucuaccauaaaugcgacaaugaauguauggaauccauccgcaacgguacuuauaauuacccacaauauagcgaggaggccagacugaagagggaagagauuucuggggucaaguuggaaucaaucggcacauaccagauccucaguauuuauagcaccguggcguccucucuggccuuagcaauaaugaucgcuggacugucgcuauggaugugcagcaacggcucccuccagugccggauuuguaucuga

SEQ ID NO: 130161 - RNA, 1701 nt, Artificial Sequence
  derived and/or modified CDS sequence (opt3) from hemagglutinin__InfluenzaA__ABW80976
augaagaccaucauugcccugagcuacauacucugccuuguguucgcucagaaacugcccggcaacgacaauuccacagcaacuuuguguuuagggcaccaugccgucccuaacggaacgcugguuaagaccaucacaaaugaucaaauugaggugacuaacgcgaccgaacuuguacagucuucaaguacaagcagaaucugcgacuccccacaccagauucucgauggugagaauuguacccugaucgacgcccuucugggcgauccgcauugcgacggguuucagaacaaagaaugggauuuguucguggagaggucuaaggcuuauucgaauuguuaccccuaugacgucccugauuacgugucacuccggagccugguugcaaguuccggaacucuggaauuuaacaaugagucuuucaacuggacaggcguggcccaaaaugguaccagcuccgcuugcaaacgccgaucagacaagagcuuuuucagucgucucaacugguuacaccagcugaaguauaaauacccagcacuuaaugucacgaugcccaacaaugagaaguuugauaaauuguauauauggggagugcaucacccugggacugacucugaucagaucuccauuuacgcccaggcuucaggcagaguaaccguuagcacaaagaggagucaacagacugugaucccaaacauuggcucucggcccuggguccgcgggguguccagcggaaucucgauauacuggaccauugugaaaccuggugacauccugcuaauuaacucuacaggcaaucucaucgccccaagaggguauuucaagaucagguccggaaagucaaguauuaugcggagcgacgcgccgauaggcaaauguaacuccgaaugcaucacccccaaugguucuauuccuaacgauaagccauuucagaaugucaaccgcaucacguacggggcauguccccgauauguuaaacagaauacucugaagcuagccacaggaaugagaaacgugccugagaaacaaaccaggggcauauucggcgcuauugccggguuuaucgaaaauggaugggaggguaugauggacggcugguacggguuccggcaccagaacagcgagggaacuggccaggcagcugaucugaagucaacacaagccgcgaucaaucagauuaacgguaaauugaaucgucucaucgaaaagaccaacgagaaguuucaucagauugaaaaagaguucagugaaguagaggggcgcauacaggaccuggagaaguauguggaagauacgaaaaucgacuuaugguccuacaaugccgagcugcucgucgcacuugaaaaccaacacaccauugaucugacagacagcgagaugaacaaguuguucgaaagaacuaaaaagcagcuaagggagaaugcugaggauaugggcaacggaugcuuuaagaucuaucauaaaugugacaaugccugcaucggcucuauucggaacgggaccuacgaucacgacguguaccgagacgaagcucugaauaaccgcuuccagauaaagggaguugagcucaaaucagguuauaaggauuggauccuguggauuaguuuugccaucagcugcuuccuucuguguauuguguugcucggcuuuaucaugugggcaugccagaaagggaauauaagauguaacaucugcauuuga

SEQ ID NO: 130162 - RNA, 1701 nt, Artificial Sequence
  derived and/or modified CDS sequence (opt3) from hemagglutinin__InfluenzaA__ABW80977
augaagaccaucauugcccugagcuacauacucugccuuguguucgcucagaaacugcccggcaacgacaauuccacagcaacuuuguguuuagggcaccaugccgucccuaacggaacgaucguuaagaccauuacaaaugaucaaaucgaggugacuaacgcgaccgaacugguacagucuucaaguacagguggcauuugcgacagcccacaccagauccuagauggggagaauuguacccucauagacgcucugcuuggagauccgcagugcgacggcuuucaaaacaaaaagugggaucuguucguggaaagauccaaagccuauucuaauuguuaccccuaugacgucccugauuacgcaucguugaggucacucguggccagcagugguacucuggaguuuaacaaugaauccuucaacuggacagggguuacccagaauggaacgucuagcgcuugcaagcggcgcuccaacaagucauuuuucagucgacugaauuggcucacucauuuaaaauuuaaguauccagcacugaacgugaccaugcccaauaacgagaaauucgacaaacuuuacaucuggggcguccaccauccuggcacagauaacgaccagauuaauuuguaugcccaggcuagcgggcguaucacugugucuaccaagagaucccaacagacaguaauuccaaacaucggaucaaggccccggguucgcgaugugccuagcagaauaaguauuuacuggaccaucgucaagccaggugacauucugcuaaucucuuccacgggcaaucucaucgccccgaggggguacuuuaagauucggagcggaaaaucgucuauaaugcgcuccgacgcgcccaucggcaaguguaacucagagugcauuacuccuaaugguaguaucccaaacgauaaacccuuccagaaugugaaccgaauaacauauggggcauguccuagauacgugaagcagaauacccugaaacuugccacuggaaugaggaacgucccagaaaagcaaacacggggcauuuuuggcgcuaucgccggguucaucgagaauggaugggaagguaugguugacggcugguauggguuucgucaccagaacagcgagggaaccggccaggcagcugaucugaaauccacgcaagccgcgauuaaucagaucaacgguaaguugaaucgccucauugggaagaccaacgagaaauuccaccagauagaaaaggaguucucugaaguggagggcagaauccaggaccuggaaaaauacguagaggauacaaagauugacuuauggagcuauaacgccgagcugcucguggcacuugaaaaucaacauacuaucgaucugaccgacucagagaugaacaaauuguuugaaaggacaaagaagcagcuacgggagaaugcugaagauaugggaaacggcugcuucaaaaucuaccacaagugugacaaugccugcauugggaguauacgaaacggaacuuaugaucaugacgucuaccgcgacgaggcucugaauaacagauuucagaucaaagguguggagcucaaguccggcuacaaagauuggauucuguggaucagcuucgccauuucuugcuuucuucuguguguugcauugcucggguucaucaugugggccugccagaagggaaauauaagguguaacaucugcauuuga

SEQ ID NO: 130163 - RNA, 1698 nt, Artificial Sequence
  derived and/or modified CDS sequence (opt3) from hemagglutinin__InfluenzaA__ABW80979
augaaggccaaacugcucgugcuucugugcaccuucacagcuacuuacgcagacacgaucuguauuggcuaucacgccaacaauagcaccgauacagucgacacuguuuuggagaagaacgugaccguaacacauuccgugaauuuacuggaagauucucacaacgggaaacuaugccuccugaagggaauagcgccccuucagcuggguaauuguucagucgcuggcuggaucuuggggaacccugagugcgaacuccugauuaguaaagagagcugguccuacaucguggaaaccccaaauccggagaacggaacuuguuaucccggcuacuuugccgacuaugaggaacugagagagcaacucucuucgguuagcucauucgaaagguuugagauuuucccuaaggagaguuccuggccaaaucauacagugaccggugucucugcaagcugcucccacaacgggaagucaaguuuuuaccggaauuuacuguggcuuacgggcaaaaacggauuguaucccaaucugagcaagucuuacgugaacaauaaagaaaaggaggugcuaguucucuggggcgugcaucacccuccaaacaucgggaaccagcgcgcccuguaccacacugaaaaugcuuaugucuccguggugucaagccauuacagucgacguuucacccccgagauagcaaaaagaccuaaggucagggaucaggaaggacggaucaacuauuacuggacacuucuggagccaggugacacuauuaucuuugaggccaauggcaacuugauugcuccgugguaugccuucgcgcucucucgcggguuuggauccggcaucauaaccagcaaugcacccauggaugaaugugacgccaagugccagacaccucaaggugcuauuaacucgucucugccauuccagaauguucaccccgugaccaucggggaguguccuaaauacguaagauccgccaaguuaaggauggugacgggacugcggaacauuccaucaauccagagucgcggccucuuuggcgcaaucgcuggguucauugaaggagguuggacuggcauggucgaugggugguauggauaccaucaccagaaugagcaaggcagcgguuacgccgcggaccagaaauccacacagaacgccauaaaugggaucaccaacaagguaaauucuguuauugaaaagaugaacacucaguuuacagcagugggcaaagaguucaauaaacuugagcgaagaauggaaaaccugaacaagaaggucgaugacggauucuuggauaucuggaccuauaaugcugagcuacuggugcuccuggaaaacgagaggacgcuugacuuucacgacagcaauguuaaaaaccuguacgaaaagguaaaaucacaauugaagaauaacgccaaagagauaggcaaugggugcuucgaguuuuaucauaaguguaacaaugaaugcauggagagugugaagaacggaaccuacgauuaucccaaauacuccgaagagagcaagcucaaucgggagaaaauugacggugucaagcuggaaucuaugggcguguaucagaucuuagcuaucuacucaacagucgccaguagccuggugcuacucguuucccugggggcaauuucuuucuggaugugcucgaacggaagccuucagugucguaucugcauuuga

SEQ ID NO: 130164 - RNA, 1701 nt, Artificial Sequence
  derived and/or modified CDS sequence (opt3) from hemagglutinin__InfluenzaA__ABW81505
augaaggccaaacugcucgugcuucugugcaccuucacagcuacuuacgcagacacgaucuguauuggcuaucacgccaacaauagcaccgauacagucgacacuguuuuggagaagaacgugaccguaacacauuccgugaauuuacuggaagauucucacaacgggaaacuaugcagacucaagggaaccgcgccccugcagcuugguaauuguucaauagcuggcuggauccuggggaacccugagugcgaaaguuuguuuagcaaagaguccuggucuuacauugccgaaacuccaaauccgaagaacggaacauguuaucccggcuacuucgcagacuaugaggagcucagggaacaacugucgucagucagcaguuuugagcgguucgaaaucuuuccuaaggauuccucuuggccaaaucauaccgugacgaaagguguuacugccagcugcucccacaacgggaagucaaguuucuacaaaaaucugcucugguuaaccgagaagaacggacuguaucccaaucuuagcaaaucuuacgugaacaagaagggcaaagaggucuuggugcuguggggcguacaucacccuuccaauaugggggaccagcgcgcuauuuaccacaaggaaaacgcauauguuucagugcuaagcagucauuacucucgacguuuuacaccagagaucgccaaaagacccaaggucagggaucaggaaggacggauaaacuauuacuggacucuccuggagccuggugacaccaucauuuucgaagcuaauggcaaccuuaucgccccaugguaugcguuugcacugucccgcggguucggaagcggcauuaucauaucgaaugccucuaugggugagugugaugcuaaaugccagacaccgcaaggggccauuaacuccucauugcccuuucagaaugugcacccugugaccaucggagaguguccaaaguacgucagaaguacgaaacucaggaugguuacuggccugcggaacgugcccagcauucagucccgcggcuuauucggggcaaucgcuggauuuaucgaagguggcuggacagggaugauugacggaugguauggcuaccaucaccagaaugagcaagguucuggguacgccgcggaucagaaaagcacccagaacgccauaaauggcaucacuaacaagguaaauucaauuaucgaaaagaugaacacacaguucaccgcagugggaaaggaguucaauaaacuggaacgaagaauggagaaccucaauaagaaagucgacgauggcuuucuugacauauggacguauaacgcugagcuguuggugcuacuggaaaacgagaggacccucgacuuccacgauaguaauguuaagaaccuguacgaaaaggugaaaacacaacuuaagaauaacgccaaagagauugggaauggaugcuuugaguucuaucauaaguguaacaaugaaugcauggaguccgucaaaaacgguacuuacgacuauccuaaguacagcaaggaaucuaaacugaaucgggagaagaucgauggcgugaaauuggaaucaauggggguauaucagauccucgcuauuuacaguaccguugccagcucccugguguuacuggucucucuaggagcaaucucguuuuggaugugcagcaacggcucccuccagugucguauuugcauauga

SEQ ID NO: 130165 - RNA, 1698 nt, Artificial Sequence
  derived and/or modified CDS sequence (opt3) from hemagglutinin__InfluenzaA__ABW81506
augaaggugaaacugcucguccuucugugcaccuucacagccacuuacgcugacacgaucuguauuggcuaucacgcaaacaauagcaccgauacaguugacacuguguuggagaagaacguaaccgugacacauuccgucaauuuacuggaagauucucacaacgggaaacuaugccuccugaagggaauagcgccccuucagcuggguaauuguucaguggccggcuggaucuuggggaacccugagugcgaacuccugauuaguaaagagagcugguccuacaucguugaaaccccaaauccggagaacggaacuuguuaucccggcuacuuugcugacuaugaggaacugagagagcaacucucuucggugagcucauucgaaagguuugagauuuucccuaaggagaguuccuggccaaaucauacagucaccggugugucugccagcugcucccacaacgggaagucaaguuuuuaccggaauuuacuguggcuuacgggcaaaaacggauuguaucccaaucugagcaagucuuacgcaaacaauaaagaaaaggaggugcuaguucucuggggcgugcaucacccuccaaacaucgggaaccagcgcgcccuguaccacacugaaaaugcuuaugucuccguggugucaagccauuacagucgacguuucacccccgagauagcaaaaagaccuaaggucagggaucaggaaggacggaucaacuauuacuggacacuucuggagccaggugacacuauuaucuuugaggccaauggcaacuugauugcuccgugguaugccuucgcgcucucucgcggguuuggauccggcaucauaaccagcaaugcacccauggaugaaugugacgccaagugccagacaccucaaggugcuauuaacucgucucugccauuccagaauguucaccccgugaccaucggggaguguccuaaauacguaagauccgccaaguuaaggauggugacgggacugcggaacauuccaucaauccagagucgcggccucuuuggcgcaaucgcuggguucauugaaggagguuggacuggcauggucgaugggugguauggauaccaucaccagaaugagcaaggcagcgguuacgccgcggaccagaaauccacacagaacgccauaaaugggaucaccaacaagguaaauucuguuauugaaaagaugaacacucaguuuacagcagugggcaaagaguucaauaaacuugagcgaagaauggaaaaccugaacaagaaggucgaugacggauucuuggauaucuggaccuauaaugcugagcuacuggugcuccuggaaaacgagaggacgcuugacuuucacgacagcaauguuaaaaaccuguacgaaaagguaaaaucacaauugaagaauaacgccaaagagauaggcaaugggugcuucgaguuuuaucauaaguguaacaaugaaugcauggagagugugaagaacggaaccuacgauuaucccaaauacuccgaagagagcaagcucaaucgggagaaaauugacggugucaagcuggaaucuaugggcaucuaucagaucuuagcuauuuacucaacaguggccaguagccugguccuacucgugucccugggggcaaucucuuucuggaugugcucgaacggaagccuucagugucguauuugcauauga

SEQ ID NO: 130166 - RNA, 1701 nt, Artificial Sequence
  derived and/or modified CDS sequence (opt3) from hemagglutinin__InfluenzaA__ABW81507
augaaggccaaacugcucgugcuucugugcaccuucacagcuacuuacgcagacacgaucuguauuggcuaucacgccaacaauagcaccgauacagucgacacuguuuuggagaagaacgugaccguaacacauuccgugaauuuacuggaagauucucacaacgggaaacuaugcagacucaagggaaccgucccccugcagcuugguaauuguucaauagcgggcuggauccuggggaacccugagugcgaaaguuuguuuagcaaagaguccuggucuuacauugcugaaacuccaaauccgaagaacggaacauguuaucccggcuacuucgccgacuaugaggagcucagggaacaacugucgucagugagcaguuuugagcgguucgaaaucuuuccuaaggauuccucuuggccaaaucauaccguuacgaaaggugugacugcaagcugcucccacaacgggaagucaaguuucuacaaaaaucugcucugguuaaccgagaagaacggacuguaucccaaucuuagcaaaucuuacgucaacaagaagggcaaagagguguugguacuguggggcguucaucacccuuccaauaugggggaccagcgcgccauuuaccacaaggaaaacgcuuaugugucaguccuaagcagucauuacucucgacguuuuacaccagagaucgcaaaaagacccaaggugagggaucaggaaggacggauaaacuauuacuggacucuccuggagccuggugacaccaucauuuucgaagccaauggcaaccuuaucgcuccaugguaugccuuugcgcugucccgcggguucggaagcggcauuaucauaucgaaugcaucuaugggugagugugaugccaaaugccagacaccgcaaggggcuauuaacuccucauugcccuuucagaaugugcacccugucaccaucggagaguguccaaaguacguuagaaguacgaaacucaggauggugacuggccugcggaacguacccagcauucagucccgcggcuuauucggggccaucgcaggauuuaucgaagguggcuggacagggaugauugacggaugguauggcuaccaucaccagaaugagcaagguucuggguacgcugccgaucagaaaagcacccagaacgcgauaaauggcaucacuaacaaggucaauucaauuaucgaaaagaugaacacacaguucaccgccgugggaaaggaguucaauaaacuggaacgaagaauggagaaccucaauaagaaaguggacgauggcuuucuugacauauggacguauaacgcagagcuguugguucuacuggaaaacgagaggacccucgacuuccacgauaguaaugugaagaaccuguacgaaaaggucaaaacacaacuuaagaauaacgcuaaagagauugggaauggaugcuuugaguucuaucauaaguguaacaaugaaugcauggaguccgugaaaaacgguacuuacgacuauccuaaguacagcaaggaaucuaaacugaaucgggagaagaucgauggcguaaaauuggaaucaauggggguuuaucagauccucgccauuuacaguaccguggcuagcucccuggucuuacuggugucucuaggagccaucucguuuuggaugugcagcaacggcucccuccagugucguauuugcauauga

SEQ ID NO: 130167 - RNA, 1698 nt, Artificial Sequence
  derived and/or modified CDS sequence (opt3) from hemagglutinin__InfluenzaA__ABW81508
augaaggugaaacugcucguccuucugugcaccuucacagccacuuacgcugacacgaucuguauuggcuaucacgcaaacaauagcaccgauacaguugacacuguguuggagaagaacguaaccgugacacauuccgucaauuuacuggaagauucucacaacgggaaacuaugccuccugaagggaauagcgccccuucagcuggguaauuguucaguggccggcuggaucuuggggaacccugagugcgaacuccugauuaguaaagagagcugguccuacaucguugaaaccccaaauccggagaacggaacuuguuaucccggcuacuuugcugacuaugaggaacugagagagcaacucucuucggugagcucauucgaaagguuugagauuuucccuaaggagaguuccuggccaaaucauacagucaccggugugucugccagcugcucccacaacgggaagucaaguuuuuaccggaauuuacuguggcuuacgcgcaaaaacggauuguaucccaaucugagcaagucuuacgcaaacaauaaagaaaaggagguucuaguacucuggggcgugcaucacccuccaaacaucggcgaucagcgagcccuguaccacacugaaaacgcuuaugucuccguggugucaagccauuacagucguagauucacccccgagauagcaaaaaggccuaagguccgggaccaggaagggcgcaucaauuauuacuggacacuucuggagccaggagauacuauuaucuuugaggccaacgguaauuugauugcuccgagauaugccuucgcgcucucuaggggcuuuggguccggaaucauaaccagcaacgcacccauggacgaaugugaugccaagugccagacaccucaaggcgcuauuaauucgucucugccauuccagaacguucaccccgugaccaucggugaguguccuaaauacguacgguccgccaaguuacgcauggugacggggcugcgaaauauuccaucaauccagaguagaggacucuuuggcgcaaucgcuggcuucauugaagggggauggacugguauggucgacggcugguauggguaccaucaccagaacgagcaaggaagcggcuacgccgcggaucagaaauccacacagaaugccauaaacgguaucaccaauaaggugaacucuguuauugaaaagaugaauacucaguuuacagcaguggggaaagaguucaacaaacuugagaggcggauggaaaaucugaacaagaaggucgacgauggcuucuuggacaucuggaccuauaacgcugagcuacuggugcuccuggaaaaugagcguacgcuugacuuucacgauagcaacguuaaaaaucuguacgaaaagguaaaaucacaauugaagaacaaugccaaagagauaggaaacggcugcuucgaguuuuaucauaaguguaaugacgaaugcauggagagugugaagaacgggaccuacgauuaucccaaauacuccgaagagagcaagcucaaucgcgagaaaauugacggagucaagcuggaaucuauggguguguaucagaucuuagcuaucuacucaacagucgccaguagccuggugcuacucguuucccugggcgcaauuucuuucuggaugugcucgaacgggagccuucaguguagaaucugcauuuga

SEQ ID NO: 130168 - RNA, 1701 nt, Artificial Sequence; identical to SEQ ID NO: 130164
  derived and/or modified CDS sequence (opt3) from hemagglutinin__InfluenzaA__ABW81509

SEQ ID NO: 130169 - RNA, 1698 nt, Artificial Sequence
  derived and/or modified CDS sequence (opt3) from hemagglutinin__InfluenzaA__ABW81511
augaaggccaaacugcucgugcuucugugcaccuucacagcuacuuacgcagacacgaucuguauuggcuaucacgccaacaauagcaccgauacagucgacacuguuuuggagaagaacgugaccguaacacauuccgugaauuuacuggaagauucucacaacgggaaacuaugccuccugaagggaauagcgccccuucagcuggguaauuguucagucgcuggcuggaucuuggggaacccugagugcgaacuccugauuaguaaagagagcugguccuacaucguggaaaccccaaauccggagaacggaacuuguuaucccggcuacuuugccgacuaugaggaacugagagagcaacucucuucgguuagcucauucgaaagguuugagauuuucccuaaggguaguuccuggccaaaucauacagugaccggggucucugcaagcugcucccacaacggaaagucaaguuuuuaccggaauuuacuguggcuuacgggcaaaaacggcuuguaucccaaucugagcaugucuuacgugaacaauaaggagaaagaaguacuuguucucuggggagugcaucacccuccaaacaucgggaaccagcgcgcccuguaccacacugagaaugcuuaugucuccguggugucaagccauuacagucgacguuucacccccgaaauagcaaagagaccuaaagucagggaucaggagggucggaucaacuauuacuggacacuucuggaaccaggcgacucuauuaucuuugaggccaaugggaacuugauugcuccgugguaugccuucgcgcucucccgcggauuuggcagcgguaucauaacuucgaaugcacccauggaugagugugacgccaagugccagaccccucaaggggcuauuaacucuucccugccauuccagaauguucaccccgugacaaucggagaauguccuaaguacguaagaucagccaaauuaaggauggugaccggccugcggaacauuccaaguauccagagccgcggccucuuuggggcaaucgcuggauucauugaggguggcuggacggggauggucgauggaugguauggcuaccaucaccagaaugaacaagguuccggguacgccgcggaccagaagucuacucagaacgccauaaauggcaucacaaacaaagugaauagcguuauugagaagaugaacacccaguuuacugcagugggaaaagaguucaauaagcuagaacgaagaauggagaaccugaacaaaaaggucgaugacggcuucuuggauaucuggacauauaaugcugaacuacuggugcuccuggagaacgaaaggacccuugacuuucacgacucaaauguaaagaaccuguacgagaaaguuaagagucaauugaaaaauaacgccaaggaaauagggaauggaugcuucgaguuuuaucauaaauguaacaaugagugcauggaauccgugaagaacgguacguacgauuaucccaaguacagcgaggaaucuaaacucaaucgggagaagauugacggcgucaaacuggagucaauggggguguaucagaucuuagcuaucuacaguaccgucgccagcucccuggugcuacucguuucucugggagcaauuucguucuggaugugcagcaacggcucccuucagugucguaucugcauuuga

SEQ ID NO: 130170 - RNA, 1698 nt, Artificial Sequence; identical to SEQ ID NO: 128344
  derived and/or modified CDS sequence (opt3) from hemagglutinin__InfluenzaA__ABW81512

SEQ ID NO: 130171 - RNA, 1698 nt, Artificial Sequence; identical to SEQ ID NO: 129433
  derived and/or modified CDS sequence (opt3) from hemagglutinin__InfluenzaA__ABW81513

SEQ ID NO: 130172 - RNA, 1698 nt, Artificial Sequence
  derived and/or modified CDS sequence (opt3) from hemagglutinin__InfluenzaA__ABW81514
augaaggugaaacugcucguccuucugugcaccuucacagccacuuacgcugacacgaucuguauuagcuaucacgcaaacaauuccaccgauacaguugacacuguguuggagaagaacguaaccgugacacauucugucaauuuacuggaagauucacacaacggcaaacuaugccuccugaaggggauagcgccccuucagcugggaaauuguaguguggccgguuggaucuugggcaacccugagugcgaacuccugauuagcaaagaguccuggucuuacaucguugaaaccccaaauccggagaacgggacuuguuaucccggauacuuugcugacuaugaggaacugagagagcaacucucgucagugagcaguuucgaaagguuugagauuuucccuaaggaguccucuuggccaaaucauacagucaccggcgugagcgccuccugcucacacaacgguaagaguagcuuuuaccggaauuuacuguggcuuacggggaaaaacggauuguaucccaaucugucuaaguccuacgcaaacaauaaagaaaaggagguucuaguacucuggggcgugcaucacccuccaaacaucggcgaucagcgcgcccuguaccacacugaaaacgcuuaugucucaguggugagcagucauuacucucgacguuucacccccgagauagcaaaaagaccuaaggucagggaccaggaagggcggaucaauuauuacuggacacuucuggagccaggagauacuauuaucuuugaggccaacgguaauuugauugcuccgcgcuucgccuuugcgcucuccagaggcuucgggagcggaaucauaaccucgaacgcacccauggacgaaugugaugccaagugccagacaccucaaggcgcuauuaauucuucccugccauuucagaacguucaccccgugaccaucggugaguguccuaaauauguaaggucagccaaguuacggauggcaacggggcugcgcaauauuccaaguauccagagccgaggacucuucggcgcuaucgccggcuuuauugaagggggauggacugguaugguggacggcugguacggguaucaucaccagaacgagcaaggauccggcuacgcggccgaucagaaaucuacacagaaugcaauaaacgguaucaccaauaaggucaacagcgugauugaaaagaugaauacucaguucacagcuguugggaaagaguucucaaaacuugagagaaggauggaaaaccugaauaagaagguggacgauggcuuuuuggacaucuggaccuacaacgccgagcuacugguccuccuggaaaacgagcggacgcuugacuuccacgauaguaaugugaaaaaccuguaugaaaagguaaaaucccaauugaagaauaacgcuaaagagauaggaaauggcugcuuugaguucuaccauaaguguaacgacgaaugcauggagagcguuaagaaugggaccuaugauuaccccaaauauucugaagagucaaagcucaaccgugagaaaauugacggagugaagcuggaaaguaugggugucuaccagaucuuagccaucuauagcacaguggcauccucucugguccuacucgugucgcugggcgccauuagcuuuuggaugugcuccaaugggucacuucagugucgcaucugcauuuga

SEQ ID NO: 130173 - RNA, 1698 nt, Artificial Sequence; identical to SEQ ID NO: 129433
  derived and/or modified CDS sequence (opt3) from hemagglutinin__InfluenzaA__ABW81515

SEQ ID NO: 130174 - RNA, 1698 nt, Artificial Sequence; identical to SEQ ID NO: 129433
  derived and/or modified CDS sequence (opt3) from hemagglutinin__InfluenzaA__ABW81516

SEQ ID NO: 130175 - RNA, 1698 nt, Artificial Sequence
  derived and/or modified CDS sequence (opt3) from hemagglutinin__InfluenzaA__ABW81517
augaaggugaaacugcucguccuucugugcaccuucacagccacuuacgcugacacgaucuguauuggcuaucacgcaaacaauagcaccgauacaguugacacuguguuggagaagaacguaaccgugacacauuccgucaauuuacuggaagauucucacaacgggaaacuaugccuccugaagggaauagcgccccuucagcuggguaauuguucaguggccggcuggaucuuggggaacccugagugcgaacuccugauuaguaaagagagcugguccuacaucguugaaaccccaaauccggagaacggaacuuguuaucccggcuacuuugcugacuaugaggaacugagagagcaacucucuucgauuagcucauucgaaagguuugagaucuucccuaaggagaguuccuggccaaaucauacagugaccggugucucugccagcugcucccacaacgggaagucaaguuuuuaccggaauuuacuguggcuuacgggcaaaaacggauuguaucccaaucugagcaagucuuacgcaaacaauaaagaaaaggaggugcuaguacucuggggcguucaucacccuccaaacauaggggaucagcgcgcccuguaccacacugaaaacgcuuauguguccgucgugucaagccauuacagucgacguuucacccccgagaucgcaaaaagaccuaaggugagggaccaggaaggacggauuaauuauuacuggacacuucuggagccaggugauacuaucauuuuugaggccaacggcaauuugaucgcuccgcgcuucgccuuugcgcucucuagaggguucggauccggcauaauuaccagcaacgcacccauggacgaaugugaugccaagugccagacaccucaaggugcuaucaauucgucucugccauuucagaacguccaccccguuaccauuggggaguguccuaaauaugugagguccgccaaguuacggauggcaacgggacugcgcaauaucccaucaauccagagucgaggccucuucggcgcuauugccggguuuauagaaggagguuggacuggcaugguagacgggugguacggauaucaucaccagaacgagcaaggcagcgguuacgcggccgaucagaaauccacacagaaugcaaucaacgggauuaccaauaaggugaacucugucaucgaaaagaugaauacucaguucacagcugugggcaaagaguucagcaaacuugagagaaggauggaaaaccugaauaagaagguugacgauggauuuuuggacauauggaccuacaacgccgagcuacuggugcuccuggaaaacgagcggacgcuugacuuccacgauucaaaugucaaaaaccuguaugaaaaggugaaaagucaauugaagaauaacgcuaaagagauuggcaaugggugcuuugaguucuaccauaaguguaacgacgaaugcauggaguccguaaagaauggaaccuaugauuaccccaaauauagcgaagagucuaagcucaaccgugagaaaaucgacgguguuaagcuggaaucaaugggcguguaccagaucuuagccauuuauaguacagucgcaagcucccuggugcuacucgucucucugggggccaucucguuuuggaugugcagcaauggaucccuucagugucgcauuugcauauga

SEQ ID NO: 130176 - RNA, 1698 nt, Artificial Sequence
  derived and/or modified CDS sequence (opt3) from hemagglutinin__InfluenzaA__ABW81518
augaaggugaaacugcucguccuucugugcaccuacacagccacuuaugcugacacgaucuguauuggcuaccacgcaaacaauagcaccgauacaguugacacuguguuggagaagaacguaaccgugacacauuccgucaauuuacuggaagauucucacaacgggaaacuaugccuccugaagggaauagcgccccuucagcuggguaauuguucaguggccggcuggaucuuggggaacccugagugcgaacuccugauuaguaaagagagcugguccuauaucguugaaaccccaaauccggagaacggaacuuguuaccccggcuauuucgcugacuacgaggaacugagagagcaacucucuucggugagcucauuugaaagguucgagauuuuuccuaaggagaguuccuggccaaaucauacagucaccggugugucugccagcugcucccacaacgggaagucaaguuucuaucggaauuuacuguggcuuacgggcaaaaacggauuguaccccaaucugagcaagucuuacgcaaacaauaaagaaaaggagguucuaguacucuggggcgugcaucacccuccaaacaucggggaucagcgcgcccuguaucacacugaaaacgcuuacgucuccguggugucaagccauuauagucgacguuuuacccccgagauagcaaaaagaccuaaggucagggaccaggaaggacggaucaauuacuauuggacacuucuggagccaggugauacuauuaucuucgaggccaacggcaauuugauugcuccgcgcuuugccuucgcgcucucuagaggguuuggauccggcaucauaaccagcaacgcacccauggacgaaugugaugccaagugccagacaccucaaggugcuauuaauucgucucugccauuccagaacguucaccccgugaccaucggggaguguccuaaauacguaagguccgccaaguuacggauggcaacgggacugcgcaauauuccaucaauccagagucgaggccucuuuggcgcuaucgccggguucauugaaggagguuggacuggcaugguggacgggugguauggauaccaucaccagaacgagcaaggcagcgguuacgcggccgaucagaaauccacacagaaugcaauaaacgggaucaccaauaaggucaacucugugauugaaaagaugaauacucaguuuacagcuguuggcaaagaguucagcaaacuugagagaaggauggaaaaccugaauaagaagguggacgauggauucuuggacaucuggaccuauaacgccgagcuacugguccuccuggaaaacgagcggacgcuugacuuucacgauucaaaugugaaaaaccuguacgaaaagguaaaaagucaauugaagaauaacgcuaaagagauaggcaaugggugcuucgaguuuuaucauaaguguaacgacgaaugcauggaguccguuaagaauggaaccuacgauuaucccaaauacagcgaagagucuaagcucaaccgugagaaaauugacggugugaagcuggaaucaaugggcgucuaucagaucuuagccaucuacaguacaguggcaagcucccugguccuacucgugucucugggggccauuucguucuggaugugcagcaauggaucccuucagugucgcaucugcauuuga

SEQ ID NO: 130177 - RNA, 1698 nt, Artificial Sequence
  derived and/or modified CDS sequence (opt3) from hemagglutinin__InfluenzaA__ABW81519
augaaggugaaacugcucguccuucugugcaccuucacagccacuuacgcugacacgaucuguauuggcuaucacgcaaacaauagcaccgauacaguugacacuguguuggagaagaacguaaccgugacacauuccgucaauuuacuggaagauucucacaacgggaaacuaugccuccugaagggaauagcgccccuucagcuggguaauuguucaguggccggcuggaucuuggggaacccugagugcgaacuccugauuaguaaagagagcugguccuacaucguugaaaccccaaauccggagaacggaacuuguuaucccggcuacuuugcugacuaugaggaacugagagagcaacucucuucggugagcucauucgaaagguuugagauuuucccuaaggagaguuccuggccaaaucauacagucaccggugugucugccagcugcucccacaacgggaagucaaguuuuuaccggaauuuacuguggcuuacgggcaaaaacggauuguaucccaaucugagcaagucuuacgcaaacaauaaagaaaaggagguucuaguacucuggggcgugcaucacccuccaaacaucggggaucagcgcgcccuguaccacacugaaaacgcucaugucuccguggugucaagccacuauagucgacguuucacccccgagauagcaaaaagaccuaaggucagggaccaggaaggacggaucaauuacuauuggacacuucuggagccaggugauacuauuaucuuugaggccaacggcaauuugauugcuccgcgcuucgccuuugcgcucucuagaggguucggauccggcaucauaaccagcaacgcacccauggacgaaugugaugccaagugccagacaccucaaggugcuauuaauucgucucugccauuucagaacguucaucccgugaccaucggggaguguccuaaauacguaagguccgccaaguuacggauggcaacgggacugcgcaauauuccaucaauccagagucgaggccucuucggcgcuaucgccggguuuauugaaggagguuggacuggcaugguggacgggugguauggauaccaccaccagaacgagcaaggcagcgguuaugcggccgaucagaaauccacacagaaugcaauaaacgggaucaccaauaaggucaacucugugauugaaaagaugaauacucaguucacagcuguuggcaaagaguucagcaaacuugagagaaggauggaaaaccugaauaagaagguggacgauggauuuuuggacaucuggaccuacaacgccgagcuacugguccuccuggaaaacgagcggacgcuugacuuccaugauucaaaugugaaaaaccuguacgaaaagguaaaaagucaauugaagaauaacgcuaaagagauaggcaaugggugcuuugaguucuaucacaaguguaacgacgaaugcauggaguccguuaagaauggaaccuacgauuaucccaaauacagcgaagagucuaagcucaaccgugagaaaauugacggugugaagcuggaaucaaugggcgucuaucagaucuuagccaucuacaguacaguggcaagcucccugguccuacucgugucucugggggccauuucguuuuggaugugcagcaauggaucccuucagugucgcaucugcauuuga

SEQ ID NO: 130178 - RNA, 1698 nt, Artificial Sequence
  derived and/or modified CDS sequence (opt3) from hemagglutinin__InfluenzaA__ABW81520
augaaggugaaacugcucguccuucugugcaccuucacagccacuuacgcugacacgaucuguauuggcuaucacgcaaacaauagcaccgauacaguugacacuguguuggagaagaacguaaccgugacacauuccgucaauuuacuggaagauucucacaacgggaaacuaugccuccugaagggaauagcgccccuucagcuggguucauguaguguggccggcuggaucuuggggaauccugagugcgaacuccugauuagcaaagaguccuggucuuacaucguugaaaccccaaacccggagaauggaacuuguuaucccggcuacuuugcugacuaugaggaacugagagagcaacucucgucagugagcaguuucgaaagguuugagauuuucccuaaggaguccucuuggccaaaccauacagucaccggugugagcgccuccugcucacacaaugggaagaguagcuuuuaccggaacuuacuguggcuuacgggcaaaaauggauuguaucccaaccugucuaaguccuacgcaaauaacaaagaaaaggagguucuaguacucuggggcgugcaucacccuccaaauaucggggaucagcgcgcccuguaccacacugaaaacgcuuaugucucaguggugagcagucauuacucucgacguuucacccccgagauagcaaaaagaccuaaggucagggaccaggaaggacggaucaacuauuacuggacacuucuggagccaggugauacuauuaucuuugaggccaauggcaacuugauugcuccgcgcuucgccuuugcgcucuccagaggguucggaagcggcaucauaaccucgaaugcacccauggacgaaugugaugccaagugccagacaccucaaggugcuauuaacucuucccugccauuucagaauguucaccccgugaccaucggggaguguccuaaauauguaaggucagccaaguuacggauggcaacgggacugcgcaacauuccaaguauccagagccgaggccucuucggcgcuaucgccggguuuauugaaggagguuggacuggcaugguggacgggugguacggauaucaucaccagaaugagcaaggcuccgguuacgcggccgaucagaaaucuacacagaacgcaauaaaugggaucaccaacaaggucaauagcgugauugaaaagaugaacacucaguucacagcuguuggcaaagaguucucaaaacuugagagaaggauggaaaaucugaacaagaagguggacgauggauuuuuggacaucuggaccuacaaugccgagcuacugguccuccuggaaaacgagcggacgcuugacuuccacgauaguaacgugaaaaaucuguaugaaaagguaaaaucccaauugaagaacaaugcuaaagagauaggcaacgggugcuuugaguucuaccauaaguguaaugacgaaugcauggagagcguuaagaacggaaccuaugauuaccccaaauauucugaagagucaaagcucaaucgugagaaaauugacggugugaagcuggaaaguaugggcgucuaccagaucuuagccaucuauagcacaguggcauccucucugguccuacucgugucgcugggggccauuagcuuuuggaugugcuccaacggaucacuucagugucgcaucugcauuuga

SEQ ID NO: 130179 - RNA, 1698 nt, Artificial Sequence
  derived and/or modified CDS sequence (opt3) from hemagglutinin__InfluenzaA__ABW81521
augaaggugaaacugcucguccuucugugcaccuucacagccacuuacgcugacacgaucuguauuggcuaucacgcaaacaauagcaccgauacaguugacacuguguuggagaagaacguaaccgugacacauuccgucaauuuacuggaagauucucacaacgggaaacuaugccuccugaagggaauagcgccccuucagcuggguaauuguucaguggccggcuggaucuuggggaacccugagugcgaacuccugauuaguaaagagagcugguccuacaucguugaaaccccaaauccggagaacggaacuuguuaucccggcuacuuugcugacuaugaggaacugagagagcaacucucuucggugagcucauucgaaagguuugagauuuucccuaaggagaguuccuggccaaaucauacagucaccggugugucugccagcugcucccacaacgggaagucaaguuuuuaccggaauuuacuguggcuuacgggcaaaaacggauuguaucccaaucugagcaagucuuacgcaaacaauaaagaaaaggagguucuaguacucuggggcgugcaucacccuccaaacaucggggaucagcgcgcccuguaccacacugaaaacgcuuaugucuccguggugucaagccauuacagucgacguuucacccccgagauagcaaaaagaccuaaggucagggaccaggaaggacggaucaauuauuacuggacacuucuggagccaggugauacuauuaucuuugaggccaacggcaauuugauugcuccgcgcuucgccuuugcgcucucuagaggguucggauccggcaucauaagcucgaacgcacccauggacgaaugugaugccaagugccagaccccucaaggugcuauuaauucuucccugccauuucagaacguucaccccgugacaaucggggaguguccuaaauauguaaggucagccaaguuacggauggcaaccggacugcgcaauauuccaaguauccagagccgaggccucuucggcgcuaucgccggguuuauugaaggagguuggacgggcaugguggacgggugguacggauaucaucaccagaacgagcaaggcuccgguuacgcggccgaucagaaaucuacucagaaugcaauaaacgggaucacaaauaaggucaacagcgugauugaaaagaugaauacccaguucacugcuguuggcaaagaguucucaaaacuugagagaaggauggaaaaccugaauaagaagguggacgauggauuuuuggacaucuggacauacaacgccgagcuacugguccuccuggaaaacgagcggacccuugacuuccacgauaguaaugugaaaaaccuguaugaaaagguaaaaucccaauugaagaauaacgcuaaagagauaggcaaugggugcuuugaguucuaccauaaguguaacgacgaaugcauggagagcguuaagaauggaacguaugauuaccccaaauauucugaagagucaaagcucaaccgugagaaaauugacggugugaagcuggaaaguaugggcgucuaccagaucuuagccaucuauagcaccguggcauccucucugguccuacucgugucgcugggggccauuagcuuuuggaugugcuccaauggaucacuucagugucgcaucugcauuuga

SEQ ID NO: 130180 - RNA, 1698 nt, Artificial Sequence; identical to SEQ ID NO: 129433
  derived and/or modified CDS sequence (opt3) from hemagglutinin__InfluenzaA__ABW81522

SEQ ID NO: 130181 - RNA, 1698 nt, Artificial Sequence; identical to SEQ ID NO: 129433
  derived and/or modified CDS sequence (opt3) from hemagglutinin__InfluenzaA__ABW81523

SEQ ID NO: 130182 - RNA, 1698 nt, Artificial Sequence
  derived and/or modified CDS sequence (opt3) from hemagglutinin__InfluenzaA__ABW81524
augaaggugaaacugcucguccuucugugcaccuucacagccacuuacgcugacacgaucuguauuggcuaucacgcaaacaauagcaccgauacaauagacacuguuuuggagaagaacgugaccguaacacauuccgugaauuuacuggaagauucucacaacgggaaacuaugccuccugaagggaaucgcgccccuucagcuggguaauuguucagucgccggcuggauuuuggggaacccugagugcgaacuccugaucaguaaagagagcugguccuacauuguggaaaccccaaauccggagaacggaacuuguuaucccggcuacuuugcugacuaugaggaacugagagagcaacucucuucgguuagcucauucgaaagguuugagaucuucccuaaggagaguuccuggccaaaucauacagugaccggugucucugccagcugcucccacaacgggaagucaaguuuuuaccggaauuuacuguggcuuacgggcaaaaacggauuguaucccaaucugagcaagucuuacgcaaacaauaaagaaaaggaggugcuaguacucuggggcguucaucacccuccaaacauaggggaucagcgcgcccuguaccacacugaaaacgcuuauguguccgucgugucaagccauuacagucgacguuucacccccgagaucgcaaaaagaccuaaggugagggaccaggaaggacggauuaauuauuacuggacacuucuggagccaggugauacuaucauuuuugaggccaacggcaauuugaucgcuccgcgcuucgccuuugcgcucucuagaggguucggauccggcauaauuaccagcaacgcacccauggacgaaugugaugccaagugccagacaccucaaggugcuaucaauucgucucugccauuucagaacguccaccccguuaccauuggggaguguccuaaauaugugagguccgccaaguuacggauggcaacgggacugcgcaauaucccaucaauccagagucgaggccucuucggcgcuauugccggguuuauagaaggagguuggacuggcaugguagacgggugguacggauaucaucaccagaacgagcaaggcagcgguuacgcggccgaucagaaauccacacagaaugcaaucaacgggauuaccaauaaggugaacucugucaucgaaaagaugaauacucaguucacagcugugggcaaagaguucagcaaacuugagagaaggauggaaaaccugaauaagaagguugacgauggauuuuuggacauauggaccuacaacgccgagcuacuggugcuccuggaaaacgagcggacgcuugacuuccacgauucaaaugucaaaaaccuguaugaaaaggugaaaagucaauugaagaauaacgcuaaagagauuggcaaugggugcuuugaguucuaccauaaguguaacgacgaaugcauggaguccguaaagaauggaaccuaugauuaccccaaauauagcgaagagucuaagcucaaccgugagaaaaucgacgguguuaagcuggaaucaaugggcguguaccagaucuuagccauuuauaguacagucgcaagcucccuggugcuacucgucucucugggggccaucucguuuuggaugugcagcaauggaucccuucagugucgcauuugcauauga

SEQ ID NO: 130183 - RNA, 1698 nt, Artificial Sequence
  derived and/or modified CDS sequence (opt3) from hemagglutinin__InfluenzaA__ABW81526
augaaggugaaacugcucguccuucugugcaccuucacagccacuuacgcugacacgaucuguauuggcuaucacgcaaacaauagcaccgauacaguugacacuguguuggagaagaacguaaccgugacacauuccgucaauuuacuggaagauucucacaacgggaaacuaugccuccugaagggaauagcgccccuucagcuggguaauuguucaguggccggcuggaucuuggggaacccugagugcgaacuccugauuaguaaagagagcugguccuacaucguugaaaagccaaauccggagaacggaaccuguuaucccggccauuuugcugacuacgaggaacugagagagcaacucucuucggugagcucauucgaaagguuugagauuuucccuaaggagaguuccuggccaaaucacacugucacaggugugucugccagcugcucccauaacgggaaaucaaguuuuuauaagaauuuacuguggcuuaccggcaaaaacggauuguaccccaaucugagcaagucuuaugcaaacaauaaagaaaaggaggugcuaguucucuggggcgugcaccacccuccaaacaucggggaucagaaggcccuguaccauacggaaaacgcuuacgucuccguggugucaagccacuauagucggaaauucacucccgagauagcaaagcgcccuaaaguccgagaccaggaaggacguaucaauuacuauuggacccuucuggagccaggugauacaauuaucuuugaggccaacggcaauuugauugcuccgagauacgccuucgcgcucucuaggggguuuggauccggcaucauaaacagcaaugcacccauggguaagugugacgccaaaugccagacuccucaaggggcuauuaacucgucucugccauuccagaauguucaucccgugaccaucggagaauguccuaaguauguacgguccgccaaauuacgcauggugacaggccugagaaacauuccaucaauccagaguaggggccucuuuggggcaaucgcuggauucauugaggguggcuggaccgggauggucgauggaugguacggcuaucaccaccagaaugaacaagguagcggguacgccgcggaccagaaguccacgcagaacgccauaaauggcaucacuaacaagguaaauucuguuauugagaaaaugaacacacaguuuaccgcagugggaaaggaguucaauaaacuugaacggcgcauggagaaccugaacaagaaagucgaugacggcuucaucgauauauggacuuacaaugcugaauugcuagugcugcucgagaacgaacgaacacuggaccuucaugacagcaauguaaagaaccuguaugagaagguuaaaucacaauugaagaauaacgccaaagaaauugggaauggaugcuuugaguucuaccacaaguguaacgaugagugcauggaaagugugaaaaaugguaccuaugacuaccccaaguauuccgaggaaagcaagcucaacagagagaaaaucgauggcgucaagcuggagucuauggggguguaccagaucuuagcuauuuauucaacggucgccaguagccuggugcuacucguuucccugggagcaaucucuuuuuggaugugcucgaauggcagccuucaguguaggauuugcauauga

SEQ ID NO: 130184 - RNA, 1698 nt, Artificial Sequence
  derived and/or modified CDS sequence (opt3) from hemagglutinin__InfluenzaA__ABW81527
augaaggugaaacugcucguccuucugugcaccuucacagccacuuacgcugacacgaucuguauuggcuaucacgcaaacaauagcaccgauacaguugacacuguguuggagaagaacguaaccgugacacauuccgucaauuuacuggaagauucucacaacgggaaacuaugccuccugaagggaauagcgccccuucagcuggguaauuguucaguggccggcuggaucuuggggaacccugagugcgaacuccugauuaguaaagagagcugguccuacaucguugaaaccccaaauccggagaacggaacuuguuaucccggcuacuuugcugacuaugaggaacugagagagcaacucucuucggugagcucauucgaaagguuugagauuuucccuaaggagaguuccuggccaaaucauacagucaccggugugucugccagcugcucccacaacgggaagucaaguuuuuaccggaauuuacuguggcuuacgggcaaaaacggauuguaucccaaucugagcaagucuuacgcaaacaauaaagaaaaggagguucuaguacucuggggcgugcaucacccuccaaacaucggggaucagcgcgcccuguaccacacugaaaacgcuuaugucuccguggugucaagccauuacagucgacguuucacccccgagauagcaaaaagaccuaaggucaggaaucaggaaggacggaucaacuauuacuggacacuucuggagccaggugacacuauuaucuuugaggccaauggcaacuugauugcuccgcgcuucgccuuugcgcucucuagaggguucggauccggcaucauaaccagcaaugcacccauggaugaaugugacgccaagugccagacaccucaaggugcuauuaacucgucucugccauuucagaauguucaccccgugaccaucggggaguguccuaaauauguaagguccgccaaguuacggauggcaacgggacugcgcaacauuccaucaauccagagucgaggccucuucggcgcuaucgccggguuuauugaaggagguuggacuggcaugguggaugggugguacggauaucaucaccagaaugagcaaggcagcgguuacgcggccgaccagaaauccacacagaacgcaauaaaugggaucaccaacaaggucaauucugugauugaaaagaugaacacucaguucacagcuguuggcaaagaguucagcaaacuugagagaaggauggaaaaucugaacaagaagguggaugacggauuuuuggauaucuggaccuacaacgccgagcuacugguccuccuggaaaaugagcggacgcuugacuuccacgacucaaacgugaaaaaucuguaugaaaagguaaaaagucaauugaagaacaaugcuaaagagauaggcaacgggugcuuugaguucuaccauaaguguaaugaugaaugcauggaguccguuaagaacggaaccuaugacuaccccaaauauagcgaagagucuaagcucaaucgugagaaaauugauggugugaagcuggaaucaaugggcgucuaccagaucuuagccaucuauaguacaguggcaagcucccugguccuacucgugucucugggggccauuucguuuuggaugugcagcaacggaucccuucagugucgcaucugcauuuga

SEQ ID NO: 130185 - RNA, 1698 nt, Artificial Sequence
  derived and/or modified CDS sequence (opt3) from hemagglutinin__InfluenzaA__ABW81528
augaaggugaaacugcucguccuucugugcaccuucacagccacuuacgcugacacgaucuguauuggcuaucacgcaaacaauagcaccgauacaguugacacuguguuggagaagaacguaaccgugacacauuccgucaauuuacuggaagauucucacaacgggaaacuaugccuccugaagggaauagcgccccuucagcuggguaauuguucaguggccggcuggaucuuggggaacccugagugcgaacuccugauuaguaaagagagcugguccuacaucguugaaaccccaaauccggagaacggaacuuguuaucccggccauuuugcugacuacgaggaacugagagagcaacucucuucggugagcucauucgaaagguuugagauuuucccuaaggagaguuccuggccaaaucacacagucaccggugugucugccagcugcucccauaacgggaagucaaguuuuuaucggaauuuacuguggcuuacgggcaaaaacggauuguaccccaaucugagcaagucuuaugcaaacaauaaagaaaaggagguucuaguacucuggggcauccaccacccuccaaacauaggggaucagcgcgcccuguaccauacugaaaacgcuuacguguccgucgugucaagccacuauagucgacguuucacccccgagaucgcaaaaagaccuaaggugagggaccaggaaggacggauuaauuacuauuggacacuucuggagccacgcgauacuaucauuuuugaggccaacgguaauuugaucgcuccgagauucgccuuugcgcucucuaggggcuucggguccggaauaauuaccagcaacgcacccauggacgaaugugaugccaagugccagacaccucaaggcgcuaucaauucgucucugccauuucagaacguccaucccguuaccauuggugaguguccuaaauacgugcgguccgccaaguuacgcaugguaacggggcugcgaaauaucccaucaauccagaguagaggacucuucggcgcaauugcuggcuuuauagaagggggauggacugguaugguggacggcugguauggguaccaccaccagaacgagcaaggaagcggcuaugccgcggaucagaaauccacacagaaugccaucaacgguauuaccaauaaggucaacucugugaucgaaaagaugaauacucaguucacagcaguugggaaagaguucaacaaacuugagaggcggauggaaaaucugaacaagaagguggacgauggcuuuuuggacauauggaccuacaacgcugagcuacugguccuccuggaaaaugagcguacgcuugacuuccaugauagcaacgugaaaaaucuguacgaaaagguaaaaucacaauugaagaacaaugccaaagagauuggaaacggcugcuuugaguucuaucacaaguguaaugacgaaugcauggagaguguuaagaacgggaccuacgauuaucccaaauacuccgaagagagcaagcucaaucgcgagaaaaucgacggagugaagcuggaaucuaugggugucuaucagaucuuagcuauuuacucaacaguggccaguagccugguccuacucgugucccugggcgcaaucucuuuuuggaugugcucgaacgggagccuucaguguagaauuugcauauga

SEQ ID NO: 130186 - RNA, 1698 nt, Artificial Sequence
  derived and/or modified CDS sequence (opt3) from hemagglutinin__InfluenzaA__ABW81529
augaaggugaaacugcucauccuucugugcaccuucacagccacuuacgcugacacgauuuguauaggcuaucacgcaaacaauagcaccgauacagucgacacuguuuuggagaagaacgugaccguaacacauuccgugaauuuacuggaagauucucacaacgggaaacuaugccuccugaagggaaucgcgccccuucagcuggguaauuguucagucgccggcuggauuuuggggaacccugagugcgaacuccugaucaguagagagagcugguccuacauuguggaaaccccaaauccggagaacggaacuuguuaucccggcuacuuugcugacuaugaggaacugagggagcaacucucuucgguuagcucauucgaacgguuugagaucuucccuaaagagaguuccuggccaaaucauacagugaccggugucucugccagcugcucccacaacgggaagucaaguuuuuaccgcaauuuacuguggcuuacgggaaagaacggcuuguaucccaaucugagcaaaucuuacgcaaacaauaaggaaaaagaggugcuaauacucuggggcguacaucacccuccaaacauccgagaucagaugacucuguaccacaccgaaaacgccuauguuuccguggucucaagccauuacagucguagauucacacccgagauuacuaagaggccuaaagugcgggaccaggaagggcgcaucaauuauuacuggacccuucuggagccaggagauacaauuaucuuugaggcuaacgguaauuugauagcaccgugguaugccuucgcucucucuagaggcuuuggguccggaauuaucaccagcaacgcccccauggacgaaugugaugcgaagugccagacgccuaagggcgcaauuaauucgucucugccauuccaaaacgugcaccccgucacuaucggugaguguccuaaauacguuagguccgccaaguuacggauggugacagggcugcgcaauaucccaucaauucagagucgaggacucuuuggcgcuauagccggcuucaucgaagggggauggaccgguaugguagacggcugguauggguaccaucaccagaacgagcagggaagcggcuacgcagcugaucaaaaauccacucagaaugccauuaacgguaucacaaauaaggugaacucugucauagaaaagaugaauacccaguuuacggcgguggggaaagaguucaacaaacuugagagaaggauggaaaaucugaacaagaagguugacgauggcuucuuggacauuuggaccuauaacgccgagcuacuggugcuccuggaaaaugagcggacacuugacuuucacgauagcaacgucaaaaaucuguacgaaaaggugaaaucacaguugaagaacaaugcaaaagagaucggaaacggcugcuucgaguuuuaucauaaguguaauaacgaaugcauggagaguguaaagaaugggacuuacgacuaucccaaauacuccgaagagagcaagcucaaccgugagaaaaucgauggaguuaagcuggaaucuauggguguguaucaaauuuuagcuaucuacucaaccgucgccaguagccuggugcuacucgucucccugggcgcuauuucuuucuggaugugcucgaaugggagccuucagugucgcauaugcaucuga

SEQ ID NO: 130187 - RNA, 1698 nt, Artificial Sequence
  derived and/or modified CDS sequence (opt3) from hemagglutinin__InfluenzaA__ABW81530
augaaggugaaacugcucauccuucugugcaccuucacagccacuuacgcugacacgauuuguauaggcuaucacgcaaacaauagcaccgauacagucgacacuguuuuggagaagaacgugaccguaacacauuccgugaauuuacuggaagauucucacaacgggaaacuaugccuccugaagggaaucgcgccccuucagcuggguaauuguucagucgccggcuggauuuuggggaacccugagugcgaacuccugaucaguaaagagagcugguccuacauuguggaaaccccaaauccggagaacggagcuuguuaucccggcuacuuugccgacuaugaggaacugagagagcaacucucuucgguuagcucauucgaaagguuugagaucuucccuaaggagaguuccuggccaaaucauacugugacaggugucucugcaagcugcucccacaacgggaagucaaguuuuuaccggaauuuacuguggcuuaccggcaaaaacggauuguaucccaaucugagcaagucuuacgccaacaauaaagaaaaggaggugcuaauacucuggggcguacaucacccuccaaacaucggggaucagcgcacgcuguaccacacugaaaacgcuuauguuuccguggucucaagccauuacagucgacguuucacccccgagauuacaaaaagaccuaaggugagggaccaggaaggacggaucaauuauuacuggacucuucuggagccaggugauaccauuaucuuugaggcaaacggcaauuugauagccccgugguaugcuuucgcccucucucgcggguuuggauccggcauuaucacaagcaacgcgcccauggacgaaugugaugcaaagugccagaccccucaaggugccauuaauucgucucugccauuccagaacgugcaccccgucacgaucggggaguguccuaaauacguuagauccgcuaaguuaaggauggugacuggacugcggaauaucccaucaauucagagucgcggccucuuuggcgccauagcaggguucaucgaaggagguuggacaggcaugguagacgggugguauggauaccaucaccagaacgagcaaggcagcgguuacgcugccgaucagaaauccacccagaaugcgauuaaccgaaucacuaauaaggugaacucugucauagaaaagaugaauacacaguuuaccgccguggggaaagaguucaacaaacuugagagaaggauggaaaaucugaacaagaagguugacgauggcuucuuggacauuuggacguauaacgcagagcuacuggugcuccuggaaaaugagcggacccuugacuuucacgauagcaacgucaaaaaucuguacgaaaaggugaaaucacaauugaagaacaaugcuaaagagaucggaaacggcugcuucgaguuuuaucauaaguguaauaacgaaugcauggagaguguaaagaaugggacauacgacuaucccaaauacuccgaagagagcaagcucaaccgugagaaaaucgauggaguuaagcuggacucuauggguguguaucagauuuuagccaucuacucaacugucgcuaguagccuggugcuacucgucucccugggcgccauuucuuucuggaugugcucgaaugggagccuucagugucgcauaugcaucuga

SEQ ID NO: 130188 - RNA, 1698 nt, Artificial Sequence; identical to SEQ ID NO: 128374
  derived and/or modified CDS sequence (opt3) from hemagglutinin__InfluenzaA__ABW81531

SEQ ID NO: 130189 - RNA, 1698 nt, Artificial Sequence
  derived and/or modified CDS sequence (opt3) from hemagglutinin__InfluenzaA__ABW81532
augaaggugaaacugcucauccuucugugcaccuucacagccacuuacgcugacacgauuuguauaggcuaucacgcaaacaauagcaccgauacagucgacacuguuuuggagaagaacgugaccguaacacauuccgugaauuuacuggaagauucucacaacgggaaacuaugccuccugaagggaaucgcgccccuucagcuggguaauuguucagucgccggcuggauuuuggggaacccugagugcgaacuccugaucaguaaagagagcugguccuacauuguggaaaccccaaauccggagaacggagcuuguuaucccugguacuuugccgacuaugaggaacugagagagcaacucucuucgguuucaucuuucgaaagguuugagaucuucccuaaggagaguuccuggccaaaucauacugugacaggcgucucugcaagcugcucccacaacgguaagucaaguuuuuaccggaauuuacuguggcuuaccgggaaaaacggauuguaucccaaucugagcaagucuuacgccaacaauaaagaaaaggaggugcuaauacucuggggcguacaucacccuccaaacaucggcaaccagcgcacgcuguaccacacugaaaaugcuuauguuuccguggucucaagccauuacagucgacguuucacccccgagauuacaaaaagaccuaaggugagggaucaggaagggcggaucaacuauuacuggacucuucuggagccaggagacaccauuaucuuugaggcaaaugguaacuugauagccccgugguaugcuuucgcccucucucgcggcuuuggguccggaauuaucacaagcaaugcgcccauggaugaaugugacgcaaagugccagaccccucaaggcgccauuaacucgucucugccauuccagaaugugcaccccgucacgaucggugaguguccuaaauacguuagauccgcuaaguuaaggauggugacugggcugcggaacaucccaucaauucagagucgcggacucuuuggcgccauagcaggcuucaucgaagggggauggacagguaugguagauggcugguauggguaccaucaccagaaugagcaaggaagcggcuacgcugccgaccagaaauccacccagaacgcgauuaaugguaucacuaacaaggugaauagcgucauagaaaagaugaacacacaguuuaccgccguggggaaagaguucaauaaacuugagcgaagaauggaaaaccugaacaagaagguugaugacggcuucuuggauauuuggacguauaaugcagagcuacuggugcuccuggaaaacgagaggacccuugacuuucacgacagcaaugucaaaaaccuguacgaaaaggugaaaucacaauugaagaauaacgcuaaagagaucggaaauggcugcuucgaguuuuaucauaaguguaacaaugaaugcauggagaguguaaagaacgggacauacgauuaucccaaauacuccgaagagagcaagcucaaucgggagaaaaucgacggaguuaagcuggauucuauggguguguaucagauuuuagccaucuacucaacugucgcuaguagccuggugcuacucgucucccugggcgccauuucuuucuggaugugcucgaacgggagccuucagugucguauaugcaucuga

SEQ ID NO: 130190 - RNA, 1698 nt, Artificial Sequence; identical to SEQ ID NO: 130004
  derived and/or modified CDS sequence (opt3) from hemagglutinin__InfluenzaA__ABW86321

SEQ ID NO: 130191 - RNA, 1698 nt, Artificial Sequence; identical to SEQ ID NO: 129969
  derived and/or modified CDS sequence (opt3) from hemagglutinin__InfluenzaA__ABW86332

SEQ ID NO: 130192 - RNA, 1698 nt, Artificial Sequence; identical to SEQ ID NO: 129958
  derived and/or modified CDS sequence (opt3) from hemagglutinin__InfluenzaA__ABW86343

SEQ ID NO: 130193 - RNA, 1698 nt, Artificial Sequence; identical to SEQ ID NO: 129962
  derived and/or modified CDS sequence (opt3) from hemagglutinin__InfluenzaA__ABW86354

SEQ ID NO: 130194 - RNA, 1698 nt, Artificial Sequence; identical to SEQ ID NO: 129962
  derived and/or modified CDS sequence (opt3) from hemagglutinin__InfluenzaA__ABW86365

SEQ ID NO: 130195 - RNA, 1698 nt, Artificial Sequence; identical to SEQ ID NO: 129978
  derived and/or modified CDS sequence (opt3) from hemagglutinin__InfluenzaA__ABW86376

SEQ ID NO: 130196 - RNA, 1698 nt, Artificial Sequence; identical to SEQ ID NO: 129962
  derived and/or modified CDS sequence (opt3) from hemagglutinin__InfluenzaA__ABW86387

SEQ ID NO: 130197 - RNA, 1698 nt, Artificial Sequence; identical to SEQ ID NO: 129958
  derived and/or modified CDS sequence (opt3) from hemagglutinin__InfluenzaA__ABW86409

SEQ ID NO: 130198 - RNA, 1698 nt, Artificial Sequence; identical to SEQ ID NO: 129958
  derived and/or modified CDS sequence (opt3) from hemagglutinin__InfluenzaA__ABW86431

SEQ ID NO: 130199 - RNA, 1698 nt, Artificial Sequence; identical to SEQ ID NO: 129962
  derived and/or modified CDS sequence (opt3) from hemagglutinin__InfluenzaA__ABW86442

SEQ ID NO: 130200 - RNA, 1698 nt, Artificial Sequence; identical to SEQ ID NO: 129978
  derived and/or modified CDS sequence (opt3) from hemagglutinin__InfluenzaA__ABW86453

SEQ ID NO: 130201 - RNA, 1698 nt, Artificial Sequence; identical to SEQ ID NO: 129962
  derived and/or modified CDS sequence (opt3) from hemagglutinin__InfluenzaA__ABW86464

SEQ ID NO: 130202 - RNA, 1698 nt, Artificial Sequence; identical to SEQ ID NO: 129978
  derived and/or modified CDS sequence (opt3) from hemagglutinin__InfluenzaA__ABW86475

SEQ ID NO: 130203 - RNA, 1698 nt, Artificial Sequence; identical to SEQ ID NO: 129958
  derived and/or modified CDS sequence (opt3) from hemagglutinin__InfluenzaA__ABW86486

SEQ ID NO: 130204 - RNA, 1698 nt, Artificial Sequence; identical to SEQ ID NO: 130004
  derived and/or modified CDS sequence (opt3) from hemagglutinin__InfluenzaA__ABW86497

SEQ ID NO: 130205 - RNA, 1698 nt, Artificial Sequence; identical to SEQ ID NO: 129962
  derived and/or modified CDS sequence (opt3) from hemagglutinin__InfluenzaA__ABW86508

SEQ ID NO: 130206 - RNA, 1698 nt, Artificial Sequence
  derived and/or modified CDS sequence (opt3) from hemagglutinin__InfluenzaA__ABW86519
augaaggugaaacugcucguccuucugugcaccuucacagccacuuacgcugacacgaucuguauuggcuaucacgcaaacaauagcaccgauacaguugacacuguguuggagaagaacguaaccgugacacauuccgucaauuuacuggaagauucucacaacgggaaacuaugccuccugaagggaauagcgccccuucagcuggguaauuguucaguggccggcuggaucuuggggaacccugagugcgaacuccugauuaguaaagagagcugguccuacaucguugaaaccccaaauccggagaacggaacuuguuaucccggcuacuuugcugacuaugaggaacugagagagcaacucucuucggugagcucauucgaaagguuugagauuuucccuaaggagaguuccuggccaaaucauacagucaccggugugucugccagcugcucccacaacgggaagucaaguuuuuaccggaauuuacuguggcuuacgggcaaaaacggauuguaucccaaucugagcaagucuuacgcaaacaauaaagaaaaggaggugcuaguucucuggggcgugcaucacccuccaaacaucggggaucagcgcgcccuguaccacacugaaaacgcuuaugucuccguggugucaagccauuacagucgacguuucacccccgagauagcaaaaagaccuaaggucaggaaucaggaaggacggaucaacuauuacuggacacuucuggagccaggugacacuauuaucuuugaggccaauggcaacuugauugcuccgcgcuucgccuuugcgcucucuagaggguucggauccggcaucauaaccagcaaugcacccaugggugaaugugaugccaagugccagacaccucaaggggcuauuaacucgucucugccauuucagaauguucaccccgugaccaucggagaguguccuaaauauguaagguccgccaaguuacggauggugacgggccugcgcaacauuccaucaauccagagucgaggccucuucggggcaaucgcuggauuuauugaagguggcuggacugggauggucgacggaugguacggcuaucaucaccagaaugagcaagguagcggguacgccgcggaucagaaauccacacagaacgccauaaauggcaucaccaacaagguaaauucuguuauugaaaagaugaacacucaguucacagcagugggaaaagaguucaauaaacuugagagaaggauggaaaaccugaacaagaaggucgacgauggcuuuuuggacaucuggaccuacaaugcugagcuacuggugcuccuggaaaacgagcggacgcuugauuuccacgacagcaauguuaaaaaccuguaugaaaagguaaaaucacaauugaagaauaacgccaaagagauagggaauggaugcuuugaguucuaccauaaguguaacgacgaaugcauggagagugugaagaaugguaccuaugauuaccccaaauauuccgaagagagcaagcucaaccgugagaaaauugacggcgucaagcuggaaucuauggggguguaccagaucuuagcuaucuauucaacagucgccaguagccuggugcuacucguuucccugggagcaauuucuuuuuggaugugcucgaauggcagccuucagugucgcaucugcauuuga

SEQ ID NO: 130207 - RNA, 1698 nt, Artificial Sequence; identical to SEQ ID NO: 129958
  derived and/or modified CDS sequence (opt3) from hemagglutinin__InfluenzaA__ABW86530

SEQ ID NO: 130208 - RNA, 1698 nt, Artificial Sequence
  derived and/or modified CDS sequence (opt3) from hemagglutinin__InfluenzaA__ABW86541
augaaggugaaacugcucguccuucugugcaccuucacagccacuuacgcugacacgaucuguauuggcuaucacgcaaacaauagcaccgauacaguugacacuguguuggagaagaacguaaccgugacacauuccgucaauuuacuggaagauucucacaacgggaaacuaugccuccugaagggaauagcgccccuucagcuggguaauuguucaguggccggcuggaucuuggggaacccugagugcgaacuccugauuaguaaagagagcugguccuacaucguugaaaccccaaauccggagaacggaacuuguuaucccggcuacuuugcugacuaugaggaacugagagagcaacucucuucggugagcucauucgaaagguuugagauuuucccuaaggagaguuccugguuaaaucauacagucaccggugugucugccagcugcucccacaacgggaagucaaguuuuuaccggaaucugcuuugguugacgggcaaaaacggacuguauccaaaucuaagcaagucuuacgcaaacaauaaagaaaaggagguacucguucuguggggcgugcaucaucccccuaacaucggggaucagcgcgcccuuuaccacacugaaaacgcuuaugucuccguggugucaagccacuacagucgacguuucaccccagagauagcaaaaagacccaaggucagggaccaggaaggacggaucaauuauuacuggacacuguuggagccuggugauacuauuaucuuugaggccaacggcaaucucauugcuccacgcuucgccuuugcgcugucuagaggguucggauccggcaucauaaccagcaacgcaccgaugggugaaugugacgccaagugccagacaccccaaggggcuauuaauucgucuuuaccuuuucagaacguucacccagugaccaucggagagugucccaaauauguaagguccgccaagcugcggauggugacgggccuccgcaauauuccuucaauccagagucgaggccuuuucggggcaaucgcuggauuuauugaagguggcuggacugggauggucgauggaugguacggcuaucaucaccagaacgagcaagguagcggguacgccgcggaccagaaauccacacagaaugccauaaacggcaucaccaauaaggugaacucuguuauugaaaagaugaauacucaguucacagcagugggaaaagaguucaacaaacuggagagaaggauggaaaauuugaacaagaaggucgaugacggcuuucuagauaucuggaccuacaacgcugagcugcucgugcugcuugaaaaugagcggacgcuggacuuccacgacagcaacguuaaaaauuuguaugaaaagguaaaaucacaacucaagaacaaugccaaagagauagggaacggaugcuuugaguucuaccauaaguguaaugaugaaugcauggagagugugaagaacgguaccuaugacuacccaaaauauuccgaagagagcaagcugaaucgugagaaaauugauggcgucaaguuagaaucuauggggguguaccagauccuggcuaucuauucaacagucgccaguagccuagugcuccugguuucccuuggagcaauuucuuuuuggaugugcucgaacggcagcuugcagugucgcaucugcauuuga

SEQ ID NO: 130209 - RNA, 1698 nt, Artificial Sequence; identical to SEQ ID NO: 129958
  derived and/or modified CDS sequence (opt3) from hemagglutinin__InfluenzaA__ABW86552

SEQ ID NO: 130210 - RNA, 1701 nt, Artificial Sequence
  derived and/or modified CDS sequence (opt3) from hemagglutinin__InfluenzaA__ABW86563
augaagaccaucauugcccugagcuacauacucugccuuguguucgcucagaaacugcccggcaacgacaauuccacagcaacuuuguguuuagggcaccaugccgucccuaacggaacgaucguuaagaccauuacaaaugaucaaaucgaggugacuaacgcgaccgaacugguacagucuucaaguacaggugagauuugcgacagcccacaccagauccuagauggcgaaaauuguacccucauagacgcucugcuuggggauccgcagugcgacggauuucaaaacaaaaagugggaucuguucguggagagauccaaagccuauucuaauuguuaccccuaugacgucccugauuacgcaucguugaggucacucguggccagcaguggcacucuggaauuuaacaaugaguccuucaacuggacagguguuacccagaaugggacgucuagcgcuugcauccggcgcuccaacaauucauuuuucagucgacugaacuggcucacucauuuaaaguuuaaguauccagcacugaaugugaccaugcccaacaacgagaaauucgacaaacuuuacauuuggggaguccaccauccuggcacagauaaugaccagaucuuuuuguaugcccaggcuagcggccguauuacugugucuaccaagagaucccaacagacaguaaucccaaacauagggucaaggccccggguucgcaauauuccuagcagaaucaguauuuacuggaccaucgugaagccaggagauauccugcuaauuaacucuacggguaaucucauagccccgaggggcuacuucaaaauccgguccggaaagagcucgauuaugcgcucugacgcgcccaucgggaaguguaacuccgaaugcauaacuccuaauggcucaauuccaaacgacaaacccuuucagaaugucaaccgaaucacauauggugcauguccuagauacgugaagcagaauacccugaaacuugccacugggaugaggaacgugccagagaagcaaacacggggaaucuucggcgcuauugccggcuuuaucgaaaaugggugggagggaauggucgaugguugguauggcuuccgucaccagaacagugaggggauuggacaggcagcugaccugaaaagcacccaagccgcgauagaucagaucaauggcaaguugaaccgccucauugguaaaacgaacgaaaaguuccaccagaucgagaaggaauuuuccgagguugaagggagaauccaggaccuggagaaauacguggaggauaccaagauugacuuauggucuuauaaugccgaacugcucguagcacuugagaaccaacauacaauagaucugacugacagcgaaaugaauaaauuguucgagaagaccaaaaagcagcuaagggaaaacgcugaggauaugggcaauggaugcuuuaagaucuaccacaaaugugacaacgccugcauuggcucaauccggaaugggacauaugaucaugacguguaccgagacgaggcucugaacaaucgcuuccagauuaagggagucgaacucaaaaguggucacaaggauuggauccuguggauauccuuugccaucagcugcuuccuucuguguguggcauugcucggcuuuauuaugugggccugccagaaagggaacaucagauguaauauuugcaucuga

SEQ ID NO: 130211 - RNA, 1698 nt, Artificial Sequence; identical to SEQ ID NO: 129995
  derived and/or modified CDS sequence (opt3) from hemagglutinin__InfluenzaA__ABW86606

SEQ ID NO: 130212 - RNA, 1701 nt, Artificial Sequence; identical to SEQ ID NO: 128969
  derived and/or modified CDS sequence (opt3) from hemagglutinin__InfluenzaA__ABW91185

SEQ ID NO: 130213 - RNA, 1701 nt, Artificial Sequence
  derived and/or modified CDS sequence (opt3) from hemagglutinin__InfluenzaA__ABW91196
augaagaccaucauugcccugagcuacauacucugccuuguguucgcucagaaacugcccggcaacgacaauuccacagcaacuuuguguuuagggcaccaugccgucccuaacggaacgaucguuaagaccauuacaaaugaucaaaucgaggugacuaacgcgaccgaacugguacagucuucaaguacaggugagauuugcaauagcccacaccagauccuagacggcgaaaacuguacccucauagaugcucugcuuggggacccgcagugcgauggauuucaaaauaaaaagugggaccuguucguggagagauccaaagccuauucuaacuguuaccccuaugaugucccugacuacgcaucguugaggucacucguggccagcaguggcacucuggaauuuaauaacgaguccuucaauuggacagguguuacccagaacgggacgucuagcgcuugcauccggcgcuccaauaacucauuuuucagucgacugaauuggcucacucauuuaaaguuuaaguauccagcacugaacgugaccaugcccaacaaugagaaauucgauaaacuuuacauuuggggaguccaccauccuggcacagacaacgaucagaucuuuuuguaugcccaggcuagcggccguauuacugugucuaccaagagaucccaacagacaguaaucccaaauauagggucaaggccccggguucgcaacauuccuagcagaaucaguauuuacuggaccaucgugaagccaggagacauccugcuaauuaauucuacggguaaccucauagccccgaggggcuacuucaaaauccgguccggaaagagcucgauuaugcgcucugaugcgcccaucgggaaguguaauuccgaaugcauaacuccuaacggcucaauuccaaaugacaaacccuuucagaacgucaaucgaaucacauauggugcauguccuagauacgugaagcagaacacccugaaacuugccacugggaugaggaaugugccagagaagcaaacacggggaaucuucggcgcuauugccggcuuuaucgaaaacgggugggagggaauggucgacgguugguauggcuuccgucaccagaauagugaggggauuggacaggcagcugaucugaaaagcacccaagccgcgauagaccagaucaacggcaaguugaaccgccucauugguaaaacgaaugaaaaguuccaccagaucgagaaggaauuuuccgagguugaagggagaauccaggaucuggagaaauacguggaggacaccaagauugauuuauggucuuauaacgccgaacugcucguagcacuugagaaucaacauacaauagaccugacugauagcgaaaugaacaaauuguucgagaagaccaaaaagcagcuaagggaaaaugcugaggacaugggcaacggaugcuuuaagaucuaccacaaaugugauaaugccugcauuggcucaauccggaacgggacauaugaccaugauguguaccgagacgaggcucugaauaaccgcuuccagauuaagggagucgaacucaaaagugguuacaaggacuggauccuguggauauccuuugccaucagcugcuuccuucuguguguggcauugcucggcuuuauuaugugggccugccagaaagggaauaucagauguaacauuugcaucuga

SEQ ID NO: 130214 - RNA, 1701 nt, Artificial Sequence; identical to SEQ ID NO: 130213
  derived and/or modified CDS sequence (opt3) from hemagglutinin__InfluenzaA__ABW91207

SEQ ID NO: 130215 - RNA, 1698 nt, Artificial Sequence; identical to SEQ ID NO: 129958
  derived and/or modified CDS sequence (opt3) from hemagglutinin__InfluenzaA__ABW91218

SEQ ID NO: 130216 - RNA, 1701 nt, Artificial Sequence; identical to SEQ ID NO: 129976
  derived and/or modified CDS sequence (opt3) from hemagglutinin__InfluenzaA__ABW91240

SEQ ID NO: 130217 - RNA, 1701 nt, Artificial Sequence
  derived and/or modified CDS sequence (opt3) from hemagglutinin__InfluenzaA__ABW91251
augaagaccaucauugcccugagcuacauacucugccuuguguucgcucagaaacugcccggcaacgacaauuccacagcaacuuuguguuuagggcaccaugccgucccuaacggaacgaucguuaagaccauuacaaaugaucaaaucgaggugacuaacgcgaccgaacugguacagucuucaaguacaggugagauuugcgacagcccacaccagauccuagauggcgaaaauuguacccucauagacgcucugcuuggggauccgcagugcgacggauuucaaaacaaaaagugggaucuguucguggagagauccaaagccuauucuaauuguuaccccuaugacgucccugauuacgcaucguugaggucacucguggccagcaguggcacucuggaauuuaacaaugaguccuucaacuggacagguguuacccagaaugggacgucuagcgcuugcauccggcgcuccaacaauucauuuuucagucgacugaacuggcucacucauuuaaaguuuaaguauccagcacugaaugugaccaugcccaacaacgagaaauucgacaaacuuuacauuuggggaguccaccauccuggcacagauaaugaccagaucuuuuuguaugcccaggcuagcggccguauuacugugucuaccaagagaucccaacagacaguaaucccaaacauagggucaaggccccggguucgcaauauuccuagcagaaucaguauuuacuggaccaucgugaagucuggagauauccugcuaauuaacuccacggguaaucucauagccccaaggggcuacuucaaaauccggagcgggaagucgucuauuaugcgcuccgacgcgccgaucggaaaguguaacucagaaugcauaacucccaauggcaguauuccuaacgacaaaccauuucagaaugucaaccgaaucacauauggugcaugucccagauacgugaagcagaauacccugaaacuugccacugggaugaggaacgugccugagaagcaaacacggggaaucuucggcgcuauugccggcuuuaucgaaaaugggugggagggaauggucgaugguugguauggcuuccgucaccagaacagcgaggggauuggacaggcagcugaccugaaauccacccaagccgcgauagaucagaucaauggcaaguugaaccgccucauugguaaaacgaacgaaaaguuccaccagaucgagaaggaauuuucugagguugaagggagaauccaggaccuggagaaauacguggaggauaccaagauugacuuauggagcuauaaugccgaacugcucguagcacuugagaaccaacauacaauagaucugacugacucagaaaugaauaaauuguucgagaagaccaaaaagcagcuaagggaaaacgcugaggauaugggcaauggaugcuuuaagaucuaccacaaaugugacaacgccugcauuggcaguauccggaaugggacauaugaucaugacguguaccgagacgaggcucugaacaaucgcuuccagauuaagggagucgaacucaaauccgguuacaaggauuggauccuguggaucagcuuugccauaucuugcuuccuucuguguguggcauugcucggcuuuauuaugugggccugccagaaagggaacaucagauguaauauuugcaucuga

SEQ ID NO: 130218 - RNA, 1701 nt, Artificial Sequence; identical to SEQ ID NO: 129976
  derived and/or modified CDS sequence (opt3) from hemagglutinin__InfluenzaA__ABW91262

SEQ ID NO: 130219 - RNA, 1698 nt, Artificial Sequence; identical to SEQ ID NO: 129993
  derived and/or modified CDS sequence (opt3) from hemagglutinin__InfluenzaA__ABW91273

SEQ ID NO: 130220 - RNA, 1698 nt, Artificial Sequence
  derived and/or modified CDS sequence (opt3) from hemagglutinin__InfluenzaA__ABW91284
augaaggugaaacugcucguccuucugugcaccuucacagccacuuacgcugacacgaucuguauuggcuaucacgcaaacaauagcaccgauacaguugacacuguguuggagaagaacguaaccgugacacauuccgucaauuuacuggaagauucucacaacgggaaacuaugccuccugaagggaauagcgccccuucagcuggguaauuguucaguggccggcuggaucuuggggaacccugagugcgaacuccugauuaguagagagagcugguccuacaucguugaaaaaccaaauccggagaacggaaccuguuaucccggccauuuugcugacuacgaggaacugagggagcaacucucuucggugagcucauucgaacgguuugagauuuucccuaaggagaguuccuggccaaaucacacuacaaccggugucucugccagcugcucccauaacggggaaucaaguuuuuauaagaauuuacuguggcuuacgggaaagaacggcuuguaccccaaucugagcaagucuuaugcaaacaauaaagagaaggaagugcuaguacucuggggcguucaccacccuccaaacaucggggaucagcgcgcccuguaccauacugagaacgcuuacguguccgucgugucaagccacuauagucgaaaauucacccccgaaauagcaaagcguccuaaggugagagaccaggagggaaggaucaauuacuauuggacacuucuggagccaggugauacuauuaucuuugaagccaacggcaauuugauugcuccgcgguacgccuucgcgcucucucgcggguuuggauccggcaucauaaacagcaaugcaucgaugggugagugugacgccaaaugccagacaccccaaggggcuauuaacucuucccugccuuuccagaauguccauccaguuaccaucggagaaugucccaaguaugugagaucagccaaauuaaggaugguaaccggccugcggaacauuccuaguauccagagccgcggccucuuuggggcaaucgcuggauucauugaggguggcuggacggggaugguggauggaugguacggcuaucaccaccagaaugaacaagguuccggguacgccgcggaccagaagucuacucagaacgccauaaauggcaucacaaacaaagucaauagcgugauugagaagaugaacacccaguuuacugcaguuggaaaagaguucaauaaacuugaacgaagaauggagaaccugaacaagaaaguggaugacggcuucaucgauauauggacauacaaugcugaauugcuaguccugcucgagaacgaaaggacccuggacuuucaugacucaaaugugaagaaccuuuaugagaaaguaaagagucaacugaaaaauaacgccaaggagauugggaauggaugcuucgaauuuuaccacaaguguaacgaugagugcauggaauccguuaaaaaugguacguaugacuacccaaaguauagcgaggagucuaaauugaaccgggaaaagaucgauggcgugaaacucgagucaaugggggucuaccagauccuggcuauuuauaguaccguggccagcuccuuaguccugcuagugucucucggagcaaucucguucuggaugugcagcaauggcucccugcagugucguauuugcauauga

SEQ ID NO: 130221 - RNA, 1698 nt, Artificial Sequence; identical to SEQ ID NO: 129993
  derived and/or modified CDS sequence (opt3) from hemagglutinin__InfluenzaA__ABW91295

SEQ ID NO: 130222 - RNA, 1698 nt, Artificial Sequence; identical to SEQ ID NO: 129962
  derived and/or modified CDS sequence (opt3) from hemagglutinin__InfluenzaA__ABW91306

SEQ ID NO: 130223 - RNA, 1698 nt, Artificial Sequence; identical to SEQ ID NO: 129962
  derived and/or modified CDS sequence (opt3) from hemagglutinin__InfluenzaA__ABW91317

SEQ ID NO: 130224 - RNA, 1698 nt, Artificial Sequence
  derived and/or modified CDS sequence (opt3) from hemagglutinin__InfluenzaA__ABW91328
augaaggugaaacugcucauccuucugugcaccuucacagccacuuacgcugacacgauuuguauaggcuaucacgcaaacaauagcaccgauacagucgacacuguuuuggagaagaacgugaccguaacacauuccgugaauuuacuggaagauucucacaacgggaaacuaugccuccugaagggaaucgcgccccuucagcuggguaauuguucagucgccggcuggauuuuggggaacccugagugcgaacuccugaucaguaaagagagcugguccuacauuguggaaaccccaaauccggagaacggaacuuguuaucccggcuacuuugcugacuaugaggaacugagagagcaacucucuucgguuagcucauucgaaagguuugagaucuucccuaaggagaguuccuggccaaaucauacagugaccggugucucugccagcugcucccacaacgggaagucaaguuuuuaccggaauuuacuguggcuuacgggcaaaaacggauuguaucccaaucugagcaagucuuacgcaaacaauaaagaaaaggaggugcuaguacucuggggcguucaucacccuccaaacauaggggaucagcgcgcccuguaccacacugaaaacgcuuauguguccgucgugucaagccauuacagucgacguuucacccccgagaucgcaaaaagaccuaaggugagggaccaggaaggacggauuaauuauuacuggacacuucuggagccaggugauacuaucauuuuugaggccaacggcaauuugaucgcuccgcgcuucgccuuugcgcucucuagaggguucggauccggcauaauuaccagcaacgcacccauggacgaaugugaugccaagugccagacaccucaaggugcuaucaauucgucucugccauuucagaacguccaccccguuaccauuggggaguguccuaaauaugugagguccacgaaguuacggaugguaacuggacugcgcaauaucccaucaauccagagucgaggccucuucggcgccauugcaggguuuauagaaggagguuggacaggcaugguggacgggugguacggauaucaucaccagaacgagcaaggcagcgguuacgcugccgaucagaaauccacccagaaugcgaucaacgggauuacuaauaaggucaacucugugaucgaaaagaugaauacacaguucaccgccguuggcaaagaguucaacaaacuugagagaaggauggaaaaucugaacaagaagguggacgauggauuuuuggacauauggacguacaacgcagagcuacugguccuccuggaaaaugagcggacccuugacuuccacgauagcaacgugaaaaaucuguaugaaaagguacguucacaauugaaaaacaaugcuaaggagauuggcaacgggugcuuugaguucuaccauaaauguaaugacgaaugcauggagaguguuaagaacggaacauaugauuaccccaaguauuccgaagagagcaaacucaaucgcgagaagaucgacggugugaaacuggaaucuaugggcgucuaccagaucuuagccauuuauucaacuguggcuaguagccugguccuacucgugucccugggggccaucucuuuuuggaugugcucgaacggaagccuucaguguagaauuugcauauga

SEQ ID NO: 130225 - RNA, 1698 nt, Artificial Sequence; identical to SEQ ID NO: 129962
  derived and/or modified CDS sequence (opt3) from hemagglutinin__InfluenzaA__ABW91339

SEQ ID NO: 130226 - RNA, 1698 nt, Artificial Sequence; identical to SEQ ID NO: 129962
  derived and/or modified CDS sequence (opt3) from hemagglutinin__InfluenzaA__ABW91350

SEQ ID NO: 130227 - RNA, 1698 nt, Artificial Sequence
  derived and/or modified CDS sequence (opt3) from hemagglutinin__InfluenzaA__ABW91361
augaaggugaaacugcucguccuucugugcaccuucacagccacuuacgcugacacgaucuguauuggcuaucacgcaaacaauagcaccgauacaguugacacuguguuggagaagaacguaaccgugacacauuccgucaauuuacuggaagauucucacaacgggaaacuaugccuccugaagggaauagcgccccuucagcuggguaauuguucaguggccggcuggaucuuggggaacccugagugcgaacuccugauuaguaaagagagcugguccuacaucguugaaaccccaaauccggagaacggaacuuguuaucccggcuacuuugcugacuaugaggaacugagagagcaacucucuucggugagcucauucgaaagguuugagauuuucccuaaggagaguuccuggccaaaucauacagucaccggugugucugccagcugcucccacaacggggaaucaaguuuuuaccggaauuuacuguggcuuacgggaaagaacggcuuguaucccaaucugagcaaaucuuacgcaaacaauaaggagaaagaaguucuaguacucuggggcgugcaucacccuccaaacaucggggaucagcgcgcccuguaccacacugagaacgcuuaugucuccguggugucaagccauuacagucgacguuucacccccgaaauagcaaagagaccuaaagucagggaccaggagggacggaucaauuauuacuggacacuucuggagccaggugauacuauuaucuuugaagccaacggcaauuugauugcuccgcgcuucgccuuugcgcucucuagaggguucggauccggcaucauaaccagcaacgcacccauggacaagugugaugccaagugccagacaccucaaggugcuauuaauucgucucugccauuucagaacguucaccccgugaccaucggggaguguccuaaauauguaagguccacgaaguuacggauggugacuggacugcgcaauauuccaucaauccagacacgaggccucuucggcgccaucgcaggguuuauugaaggagguuggaccggcauggucgacgggugguacggauaucaucaccagaacgagcaaggcagugguuacgcugccgaucagaaaagcacucagaaugcgauaaacgggaucacaaauaaggugaacuccguuauugaaaagaugaauacccaguucacggccgugggcaaagaguucaacaaacuugagagaaggauggaaaaucugaacaagaaggucgacgauggauuuuuggacaucuggaccuacaacgcagagcuacuggugcuccuggaaaaugagcggacacuugacuuccacgauucuaacguuaaaaaucuguaugaaaagguaaaaagccaauugaagaacaaugcuaaagagauaggcaacgggugcuuugaguucuaccauaaguguaaugacgaaugcauggagucagugaagaacggaacuuaugauuaccccaaauauagugaagaguccaagcucaaucgugagaaaauugacggugucaagcuggaaagcaugggcguguaccagaucuuagccaucuauucuaccgucgcuucaagucuggugcuacucguuagccugggggccauuuccuuuuggaugugcucuaacggaucgcuucagugucgcaucugcauuuga

SEQ ID NO: 130228 - RNA, 1698 nt, Artificial Sequence; identical to SEQ ID NO: 129962
  derived and/or modified CDS sequence (opt3) from hemagglutinin__InfluenzaA__ABW91372

SEQ ID NO: 130229 - RNA, 1698 nt, Artificial Sequence; identical to SEQ ID NO: 129995
  derived and/or modified CDS sequence (opt3) from hemagglutinin__InfluenzaA__ABW91383

SEQ ID NO: 130230 - RNA, 1701 nt, Artificial Sequence; identical to SEQ ID NO: 130035
  derived and/or modified CDS sequence (opt3) from hemagglutinin__InfluenzaA__ABW91394

SEQ ID NO: 130231 - RNA, 1698 nt, Artificial Sequence; identical to SEQ ID NO: 130004
  derived and/or modified CDS sequence (opt3) from hemagglutinin__InfluenzaA__ABW91405

SEQ ID NO: 130232 - RNA, 1698 nt, Artificial Sequence
  derived and/or modified CDS sequence (opt3) from hemagglutinin__InfluenzaA__ABW91416
augaaggugaaacugcucguccuucugugcaccuucacagccacuuacgcugacacgaucuguauuggcuaucacgcaaacaauagcaccgauacaguugacacuguguuggagaagaacguaaccgugacacauuccgucaauuuacuggaagauucucacaacgggaaacuaugccuccugaagggaauagcgccccuucagcuggguaauuguucaguggccggcuggaucuuggggaacccugagugcgaacuccugauuaguaaagagagcugguccuacaucguugaaaccccaaauccggagaacggaacuuguuaucccggcuacuuugcugacuaugaggaacugagagagcaacucucuucggugagcucauucgaaagguuugagauuuucccuaaggagaguuccuggccaaaucauacagucaccggugugucugccagcugcucccacaacgggaagucaaguuuuuaccggaauuuacuguggcuuacgggaaagaacggcuuguaucccaaucugagcaagucuuacgcaaacaauaaagaaaaggagguucuaguacucuggggcgugcaucacccuccaaacaucggggaucagaaagcccuguaccacacugaaaacgcuuaugucuccguggugucaagccauuacagucgccgauucacccccgagauagcaaagcguccuaaggucagagaccaggaaggaaggaucaauuauuacuggacacuucuggagccaggugauacuauuaucuuugaggccaacggcaauuugauugcuccgcgguucgccuuugcgcucucucgcggguucggauccggcaucauaaccagcaacgcacccaugggugaaugugacgccaaaugccagacaccucaaggggcuauuaauucgucucugccauuucagaacguucaccccgugaccaucggagaguguccuaaguauguaagauccgccaaauuaaggauggugacgggccugcggaauauuccaucaauccagagucgcggccucuucggggcaaucgcuggauuuauugaagguggcuggacugggauggucgauggaugguacggcuaucaucaccagaacgagcaagguagcggguacgccgcggaccagaaguccacacagaaugccauaaacggcaucaccaauaaagugaacucuguuauugaaaagaugaauacucaguucacagcagugggaaaagaguucaacaaacuugagcgaagaauggaaaaucugaacaagaaagucgaugacggcuuuuuggauaucuggaccuacaacgcugagcuacuggugcuccuggaaaaugagaggacgcuugacuuccacgacagcaacguaaagaaucuguaugaaaaaguuaagucacaauugaaaaacaaugccaaggagauagggaacggaugcuuugaguucuaccauaaguguaaugaugaaugcauggagagugugaaaaacgguaccuaugacuaccccaaguauuccgaagagagcaaacucaaucgggagaagauugauggcgucaaacuggaaucuauggggguguaccagaucuuagcuaucuauucaacagucgccaguagccuggugcuacucguuucccugggagcaauuucuuuuuggaugugcucgaacggcagccuucagugucguaucugcauuuga

SEQ ID NO: 130233 - RNA, 1698 nt, Artificial Sequence; identical to SEQ ID NO: 130107
  derived and/or modified CDS sequence (opt3) from hemagglutinin__InfluenzaA__ABW91427

SEQ ID NO: 130234 - RNA, 1701 nt, Artificial Sequence; identical to SEQ ID NO: 129976
  derived and/or modified CDS sequence (opt3) from hemagglutinin__InfluenzaA__ABW91438

SEQ ID NO: 130235 - RNA, 1698 nt, Artificial Sequence; identical to SEQ ID NO: 130004
  derived and/or modified CDS sequence (opt3) from hemagglutinin__InfluenzaA__ABW91449

SEQ ID NO: 130236 - RNA, 1698 nt, Artificial Sequence; identical to SEQ ID NO: 130004
  derived and/or modified CDS sequence (opt3) from hemagglutinin__InfluenzaA__ABW91460

SEQ ID NO: 130237 - RNA, 1698 nt, Artificial Sequence
  derived and/or modified CDS sequence (opt3) from hemagglutinin__InfluenzaA__ABW91471
augaaggugaaacugcucguccuucugugcaccuucacagccacuuacgcugacacgaucuguauuggcuaucacgcaaacaauagcaccgauacaguugacacuguguuggagaagaacguaaccgugacacauuccgucaauuuacuggaagauucucacaacgggaaacuaugccuccugaagggaguggcgccccuucagcuggguaauuguucaguugccggcuggauauuggggaacccugagugcgaacuccugaucaguaaagagagcugguccuacauuguggaaaccccaaauccggagaacggaacuuguuaucccggcuacuuugcugacuaugaggaacugagagagcaacucucuucggucagcucauucgaaagguuugagaucuucccuaaggagaguuccuggccaaaucauacagugaccgguguaucugccagcugcucccacaacgggaagucaaguuuuuaccggaauuuacuguggcuuacgggcaaaaacggauuguaucccaaucugagcaagucuuacgcaaacaauaaagaaaaggagguucuagugcucuggggcguccaucacccuccaaacauuggggaucagcgcgcccuguaccacacugaaaacgcuuauguguccguggucucaagccauuacagucgacguuucacccccgagaucgcaaaaagaccuaagguuagggaccaggaaggacggauaaauuauuacuggacacuucuggagccaggugauacuaucauuuuugaggccaacggcaauuugaucgcuccgcgcuucgccuuugcgcucucuagaggguucggauccggcauuaucaccagcaacgcacccauggacgaaugugaugccaagugccagacaccucaaggugcuauaaauucgucucugccauuucagaacgugcaccccguaaccauuggggaguguccuaaauaugugagguccacgaaguuacggauggucacuggacugcgcaauaucccaucaauucagagucgaggccucuucggcgccaucgcaggguuuaucgaaggagguuggacaggcaugguggacgggugguacggauaucaucaccagaacgagcaaggcagcgguuacgcugccgaucagaaauccacccagaaugcgauuaacgggauaacuaauaagguuaacucugugaucgaaaagaugaauacacaguucaccgccgucggcaaagaguucaacaaacuugagagaaggauggaaaaucugaacaagaagguggacgauggauuuuuggacauuuggacguacaacgcagagcuacugguacuccuggaaaaugagcggacccuugacuuccacgauagcaacguuaaaaaucuguaugaaaaggugaaaucacaauugaagaacaaugcuaaagagaucggcaacgggugcuuugaguucuaccauaaguguaaugacgaaugcauggagagugucaagaacggaacauaugauuaccccaaauauuccgaagagagcaagcucaaucgugagaaaauagacggugugaagcuggaaucuaugggcgucuaccagauuuuagccaucuauucaacuguggcuaguagccugguucuacucgugucccugggggccaucucuuuuuggaugugcucgaacggaagccuucagugucgcauuugcaucuga

SEQ ID NO: 130238 - RNA, 1698 nt, Artificial Sequence
  derived and/or modified CDS sequence (opt3) from hemagglutinin__InfluenzaA__ABW91482
augaaggugaaacugcucguccuucugugcaccuucacagccacuuacgcugacacgaucuguauuggcuaucacgcaaacaauagcaccgauacaguugacacuguguuggagaagaacguaaccgugacacauuccgucaauuuacuggaagauagacacaacgggaaacuaugccuccugaagggaauagcgccccuucagcuggguaauuguucuguggccggcuggaucuuggggaacccugagugcgaacuccugauuucaaaagagaguuggagcuacaucguugaaaccccaaauccggagaacggaacuuguuaucccggcuacuuugcugacuaugaggaacugagggagcaacucuccucugugucgucauucgaacgguuugagauuuucccuaaggagagcaguuggccaaaucauacagucaccgguguguccgccucuugcagccacaacgggcgcuccucauuuuaccgaaauuuacuguggcuuacgggaaagaacggcuuguaucccaaucugagucguagcuacgcaaacaauaaagaaaaggagguucuaguacucuggggcgugcaucacccuccaaacaucggggaucagagagcccuguaccacacugaaaacgcuuaugucucugugguguccucacauuacagcaggcgguucacccccgagauagcaaaacgcccuaaggucagagaccaggaaggaaggaucaauuauuacuggacacuucuggagccaggugauacuauuaucuuugaggccaacggcaauuugauugcuccgcgguucgccuuugcgcucagucgcggguucggaucuggcaucauaaccuccaacgcacccauggacgaaugugaugccaaaugccagacaccucaaggugcuauuaauagcucgcugccauuucagaacguucaccccgugaccaucggggaguguccuaaguauguacgaucugccaaguuaagaauggugacgggacugaggaauauuccauccauccagucacggggccucuucggcgcaaucgcuggguuuauugaaggagguuggacuggcauggucgacgggugguacggauaucaucaccagaacgagcaaggcagugguuacgccgcggaucagaaaagcacacagaaugccauaaacgggaucaccaauaaggugaacuccguuauugaaaagaugaauacucaguucacagcagugggcaaagaguucaacaaacuugagcgucgcauggaaaaucugaacaagaaagucgacgauggauuuuuggacaucuggaccuacaacgcugagcuacuggugcuccuggaaaaugagagaacgcuugacuuccacgauucuaacguaaagaaucuguaugaaaagguuaaaagccaauugaagaacaaugccaaagagauaggcaacgggugcuuugaguucuaccauaaguguaaugacgaaugcauggagucagugaaaaacggaaccuaugauuaccccaaguauagugaagaguccaagcucaauagggagaaaauugacggugucaagcuggaaagcaugggcguguaccagaucuuagcuaucuauucuacagucgccucaagucuggugcuacucguuagccugggggcaauuuccuuuuggaugugcucuaacggaucgcuucagugucggaucugcauuuga

SEQ ID NO: 130239 - RNA, 1698 nt, Artificial Sequence
  derived and/or modified CDS sequence (opt3) from hemagglutinin__InfluenzaA__ABW91493
augaaggugaaacugcucauccuucugugcaccuucacagccacuuacgcugacacgauuuguauaggcuaucacgcaaacaauagcaccgauacagucgacacuguuuuggagaagaacgugaccguaacacauuccgugaauuuacuggaagauucucacaacgggaaacuaugccuccugaagggaaucgcgccccuucagcuggguaauuguucagucgccggcuggauuuuggggaacccugagugcgaacuccugaucaguaaagagagcugguccuacauuguggaaaccccaaauccggagaacggaacuuguuaucccggcuacuuugcugacuaugaggaacugagagagcaacucucuucgguuagcucauucgaaagguuugagaucuucccuaaggagaguuccuggccaaaucauacagugaccggugucucugccagcugcucccacaacgggaagucaaguuuuuaccggaauuuacuguggcuuacgggcaaaaacggauuguaucccaaucugagcaagucuuacgcaaacaauaaagaaaaggaggugcuaguacucuggggcguucaucacccuccaaacauaggggaucagcgcgcccuguaccacacugaaaacgcuuauguguccgucgugucaagccauuacagucgacguuucacccccgagaucgcaaaaagaccuaaggugagggaccaggaaggacggauuaauuauuacuggacacuucuggagccaggugauacuaucauuuuugaggccaacggcaauuugaucgcuccgcgcuucgccuuugcgcucucuagaggguucggauccggcauaauuaccagcaacgcacccauggacgaaugugaugccaagugccagacaccucaaggugcuaucaauucgucucugccauuucagaacguccaccccguuaccauuggggaguguccuaaauaugugagguccacgaaguuacggaugguaacuggacugcgcaauaucccaucaauccagagucgaggccucuucggcgccauugcaggguuuauagaaggagguuggacaggcaugguggacgggugguacggauaucaucaccagaacgagcaaggcagcgguuacgcugccgaucagaaauccacccagaaugcgaucaacgggauuacuaauaaggucaacucugugaucgaaaagaugaauacacaguucaccgccguuggcaaagaguucaacaaacuugagaagagaauggaaaaucugaacaagaaaguggacgauggauuuuuggacauauggacguacaacgcagagcuacugguccuccuggaaaaugagaggacccuugacuuccacgauagcaacgugaagaaucuguaugaaaaaguaaagucacaauugaaaaacaaugcuaaggagauuggcaacgggugcuuugaguucuaccauaaguguaaugacgaaugcauggagaguguuaaaaacggaacauaugauuaccccaaguauuccgaagagagcaaacucaaucgggagaagaucgacggugugaaacuggaaucuaugggcgucuaccagaucuuagccauuuauucaacuguggcuaguagccugguccuacucgugucccugggggccaucucuuuuuggaugugcucgaacggaagccuucagugucguauuugcauauga

SEQ ID NO: 130240 - RNA, 1698 nt, Artificial Sequence; identical to SEQ ID NO: 129978
  derived and/or modified CDS sequence (opt3) from hemagglutinin__InfluenzaA__ABW91504

SEQ ID NO: 130241 - RNA, 1698 nt, Artificial Sequence
  derived and/or modified CDS sequence (opt3) from hemagglutinin__InfluenzaA__ABW91515
augaaggugaaacugcucguccuucugugcaccuucacagccacuuacgcugacacgaucuguauuggcuaucacgcaaacaauagcaccgauacaguugacacuguguuggagaagaacguaaccgugacacauuccgucaauuuacuggaagauagacacaacgggaaacuaugccuccugaagggaauagcgccccuucagcuggguaauuguucuguggccggcuggaucuuggggaacccugagugcgaacuccugauuucaaaagagaguuggagcuacguuguggaaaccccaaauccggagaacggaacuuguuaucccggcuacuuugcugacuaugaggaacugagggagcaacucuccucugucucgucauucgaacgguuugagaucuucccuaaggagagcaguuggccaaaucauacagugaccgguguauccgccucuugcagccacaacgggaaguccucauuuuaccgcaauuuacuguggcuuacgggcaaaaacggauuguaucccaaucugaguaagagcuacgcaaacaauaaagaaaaggagguucuagugcucuggggcguccaucacccuccaaacauuggggaucagcgagcccuguaccacacugaaaacgcuuaugugucuguggucuccucacauuacagccguagauucacccccgagaucgcaaaaaggccuaagguucgggaccaggaaggacgcauaaauuauuacuggacacuucuggagccaggugauacuaucauuuuugaggccaacggcaauuugaucgcuccgagauucgccuuugcgcucaguaggggguucggaucuggcauuaucaccuccaacgcacccauggacgaaugugaugccaagugccagacaccucaaggugcuauaaauagcucgcugccauuucagaacgugcaccccguaaccauuggggaguguccuaaauaugugcggucugccaaguuacgcauggucacgggacugcgaaauaucccauccauucagucaagaggccucuucggcgcaaucgcuggguuuaucgaaggagguuggacuggcaugguggacgggugguacggauaucaucaccagaacgagcaaggcagugguuacgccgcggaucagaaaagcacacagaaugccauuaacgggauaaccaauaagguuaacuccgugaucgaaaagaugaauacucaguucacagcagucggcaaagaguucaacaaacuugagaggcggauggaaaaucugaacaagaagguggacgauggauuuuuggacauuuggaccuacaacgcugagcuacugguacuccuggaaaaugagcguacgcuugacuuccacgauucuaacguuaaaaaucuguaugaaaaggugaaaagccaauugaagaacaaugccaaagagaucggcaacgggugcuuugaguucuaccauaaguguaaugacgaaugcauggagucagucaagaacggaaccuaugauuaccccaaauauagugaagaguccaagcucaaucgcgagaaaauagacggugugaagcuggaaagcaugggcgucuaccagauuuuagcuaucuauucuacaguggccucaagucugguucuacucgugagccugggggcaaucuccuuuuggaugugcucuaacggaucgcuucaguguagaauuugcaucuga

SEQ ID NO: 130242 - RNA, 1698 nt, Artificial Sequence
  derived and/or modified CDS sequence (opt3) from hemagglutinin__InfluenzaA__ABW91526
augaaggugaaacugcucguccuucugugcaccuucacagccacuuacgcugacacgaucuguauuggcuaucacgcaaacaauagcaccgauacaguugacacuguguuggagaagaacguaaccgugacacauuccgucaauuuacuggaagauucucacaacgggaaacuaugccuccugaagggaauagcgccccuucagcuggguaauuguucaguggccggcuggaucuuggggaacccugagugcgaacuccugauuaguaaagagagcugguccuacaucguugaaaccccaaauccggagaacggaacuuguuaucccggcuacuuugcugacuaugaggaacugagagagcaacucucuucggugagcucauucgaaagguuugagauuuucccuaaggagaguuccuggccaaaucauacagucaccggugugucugccagcugcucccacaacgggaagucaaguuuuuaccggaauuuacuguggcuuacgggaaagaacggcuuguaucccaaucugagcaagucuuacgcaaacaauaaagaaaaggagguucuaguacucuggggcgugcaucacccuccaaacaucggggaucagcgcgcccuguaccacacugaaaacgcuuaugucuccguggugucaagccauuacagucgacguuucacccccgagauagcaaaaagaccuaaggucagggaacaggagggacggaucaauuauuacuggacacuucuggagccaggugacacuauuaucuuugaagccaacggcaauuugauugcuccgcgcuucgccuuugcgcucucuagaggguucggauccggcaucauaaccagcaacgcacccauggaugagugugacgccaagugccagacaccucaaggugcuauuaauucgucucugccauuucagaacguucaccccgugaccaucggggaauguccuaaauauguaagguccacgcgguuacgcauggugacuggacugcgaaauauuccaucaauccagaguagaggccucuucggcgccaucgcaggguuuauugagggagguuggacaggcauggucgaugggugguacggauaucaucaccagaacgaacaaggcagcgguuacgcugccgaccagaaguccacccagaaugcgauaaacgggaucacuaauaaagugaacucuguuauugagaagaugaauacacaguucaccgccgugggcaaagaguucaacaaacuugaaaggcggauggagaaucugaacaaaaaggucgaugacggauuuuuggauaucuggacguacaacgcagaacuacuggugcuccuggagaaugaacguacccuugacuuccacgacagcaacguaaagaaucuguaugagaaaguuaagucacaauugaaaaacaaugcuaaggagauaggcaacgggugcuuugaguucuaccauaaauguaaugaugaaugcauggaaagugugaagaacggaacauaugacuaccccaaguauuccgaggagagcaaacucaaucgcgaaaagauugauggugucaaacuggagucuaugggcguguaccagaucuuagccaucuauucaacugucgcuaguagccuggugcuacucguuucccugggggccauuucuuuuuggaugugcucgaacggaagccuucaguguagaaucugcauuuga

SEQ ID NO: 130243 - RNA, 1698 nt, Artificial Sequence; identical to SEQ ID NO: 129962
  derived and/or modified CDS sequence (opt3) from hemagglutinin__InfluenzaA__ABW91537

SEQ ID NO: 130244 - RNA, 1701 nt, Artificial Sequence; identical to SEQ ID NO: 130035
  derived and/or modified CDS sequence (opt3) from hemagglutinin__InfluenzaA__ABW91548

SEQ ID NO: 130245 - RNA, 1698 nt, Artificial Sequence
  derived and/or modified CDS sequence (opt3) from hemagglutinin__InfluenzaA__ABW91559
augaaggugaaacugcucauccuucugugcaccuucacagccacuuacgcugacacgauuuguauaggcuaucacgcaaacaauagcaccgauacagucgacacuguuuuggagaagaacgugaccguaacacauuccgugaauuuacuggaagauucucacaacgggaaacuaugccuccugaagggaaucgcgccccuucagcuggguaauuguucagucgccggcuggauuuuggggaacccugagugcgaacuccugaucaguaaagagagcugguccuacauuguggaaaccccaaauccggagaacggaacuuguuaucccggcuacuuugcugacuaugaggaacugagagagcaacucucuucgguuagcucauucgaaagguuugagaucuucccuaaggagaguuccuggccaaaucauacagugaccggugucucugccagcugcucccacaacgggaagucaaguuuuuaccggaauuuacuguggcuuacgggcaaaaacggauuguaucccaaucugagcaagucuuacgcaaacaauaaagaaaaggaggugcuaguacucuggggcguucaucacccuccaaacauaggggaucagcgcgcccuguaccacacugaaaacgcuuauguguccgucgugucaagccauuacagucgacguuucacccccgagaucgcaaaaagaccuaaggugagggaccaggaaggacggauuaauuauuacuggacacuucuggagccaggugauacuaucauuuuugaggccaacggcaauuugaucgcuccgcgcuucgccuuugcgcucucuagaggguucggauccggcauaauuaccagcaacgcacccauggacgaaugugaugccaagugccagacaccucaaggugcuaucaauucgucucugccauuucagaacguccaccccguuaccauuggggaguguccuaaauaugugagguccacgaaguuacggaugguaacuggacugcgcaauaucccaucaauccagagucgaggccucuucggcgccauugcaggguuuauagaaggagguuggacaggcaugguggacgggugguacggauaucaucaccagaacgagcaaggcagcgguuacgcugccgaucagaaauccacccagaaugcgaucaacgggauuacuaauaaggucaacucugugaucgaaaagaugaauacacaguucaccgccguuggcaaagaguucaacaaacuugagagaaggauggaaaaucugaacaagaagguggacgauggauuuuuggacauauggacguacaacgcagagcuacugguccuccuggaaaaugagcggacccuugacuuccacgauagcaacgugaaaaaucuguaugaaaagguaaaaucacaauugaagaacaaugcuaaagagauuggcaacgggugcuuugaguucuaccauaaguguaaugacgaaugcauggagaguguuaagaacggaacauaugauuaccccaaauauuccgaagagagcaagcucuaccgugagaaaaucgacggugugaagcuggaaucuaugggcgucuaucagaucuuagccauuuacucaacuguggcuaguagccugguccuacucgugucccugggggccaucucuuuuuggaugugcucgaauggaagccuucagugucgcauuugcauauga

SEQ ID NO: 130246 - RNA, 1698 nt, Artificial Sequence; identical to SEQ ID NO: 130103
  derived and/or modified CDS sequence (opt3) from hemagglutinin__InfluenzaA__ABW91570

SEQ ID NO: 130247 - RNA, 1698 nt, Artificial Sequence; identical to SEQ ID NO: 129978
  derived and/or modified CDS sequence (opt3) from hemagglutinin__InfluenzaA__ABW91581

SEQ ID NO: 130248 - RNA, 1698 nt, Artificial Sequence; identical to SEQ ID NO: 129958
  derived and/or modified CDS sequence (opt3) from hemagglutinin__InfluenzaA__ABW91592

SEQ ID NO: 130249 - RNA, 1698 nt, Artificial Sequence; identical to SEQ ID NO: 130004
  derived and/or modified CDS sequence (opt3) from hemagglutinin__InfluenzaA__ABW91603

SEQ ID NO: 130250 - RNA, 1698 nt, Artificial Sequence
  derived and/or modified CDS sequence (opt3) from hemagglutinin__InfluenzaA__ABW91614
augaaggugaaacugcucguccuucugugcaccuucacagccacuuacgcugacacgaucuguauuggcuaucacgcaaacaauagcaccgauacaguugacacuguguuggagaagaacguaaccgugacacauuccgucaauuuacuggaagauucucacaacgggaaacuaugccuccugaagggaauagcgccccuucagcuggguaauuguucaguggccggcuggaucuuggggaacccugagugcgaacuccugauuaguaaagagagcugguccuacaucguugaaaccccaucuccggagaauggaacuuguuaucccggcuacuuugcugacuaugaggaacugagagagcaacucucgucagugagcaguuucgaaagguuugagauuuucccuaaggaguccucuuggccaaaccauacagucaccggugugagcgccuccugcucacacaaugggaagaguagcuuuuaccggaacuuacuguggcuuacgggcaaaaauggauuguaucccaaccugucuaaguccuacgcaaauaacaaagaaaaggaggugcuaguucucuggggcgugcaucacccuccaaauaucggggaucagcgcgcccuguaccacacugaaaacgcuuaugucucaguggugagcagucauuacucucgacguuucacccccgagauagcaaaaagaccuaaggucagggaccaggaaggacggaucaacuauuacuggacacuucuggagccaggugauacuauuaucuuugaggccaauggcaacuugauugcuccgcgcuucgccuuugcgcucuccagaggguucggaagcggcaucauaucgucuaaugcacccaugggugaaugugacgccaagugccagaccccucaaggggcuauuaacuccucacugccauuucagaauguucaccccgugacaaucggagaguguccuaaauauguaaggagugccaaguuacggauggugaccggccugcgcaacauuccaagcauccagucccgaggccucuucggggcaaucgcuggauuuauugaagguggcuggacggggauggucgauggaugguacggcuaucaucaccagaaugagcaagguucuggguacgccgcggaccagaaaagcacucagaacgccauaaauggcaucacaaacaagguaaauucaguuauugaaaagaugaacacccaguucacugcagugggaaaagaguucaauaaacuugagagaaggauggaaaaccugaauaagaaggucgaugacggcuuuuuggauaucuggacauacaacgcugagcuacuggugcuccuggaaaacgagcggacccuugacuuccacgacaguaauguuaaaaaccuguaugaaaagguaaaaucccaauugaagaauaacgccaaagagauagggaauggaugcuuugaguucuaccauaaguguaacgaugaaugcauggagagcgugaagaaugguacguaugacuaccccaaauauucugaagagucaaagcucaaccgugagaaaauugauggcgucaagcuggaaaguauggggguguaccagaucuuagcuaucuauagcaccgucgccuccucucuggugcuacucguuucgcugggagcaauuagcuuuuggaugugcuccaauggcucacuucagugucgcaucugcauuuga

SEQ ID NO: 130251 - RNA, 1698 nt, Artificial Sequence; identical to SEQ ID NO: 129993
  derived and/or modified CDS sequence (opt3) from hemagglutinin__InfluenzaA__ABW91625

SEQ ID NO: 130252 - RNA, 1698 nt, Artificial Sequence; identical to SEQ ID NO: 129962
  derived and/or modified CDS sequence (opt3) from hemagglutinin__InfluenzaA__ABW91636

SEQ ID NO: 130253 - RNA, 1701 nt, Artificial Sequence; identical to SEQ ID NO: 130035
  derived and/or modified CDS sequence (opt3) from hemagglutinin__InfluenzaA__ABW91647

SEQ ID NO: 130254 - RNA, 1707 nt, Artificial Sequence
  derived and/or modified CDS sequence (opt3) from hemagglutinin__InfluenzaA__ABX10515
auggagaagaucgugcuucucuucgccauugucagccuuguuaaauccgaccagauaugcaucggcuaccacgcuaacaauucuaccgaacaaguggauacaauuauggagaagaacguaacugugacgcaugcacaggacauccuggaaaagacccacaaugggaaguugugugauuuagacggagucaaaccccugauucuaagagauugcucaguggccgguuggcuccugggcaacccuaugugugacgaguuuaucaauguuccagaauggaguuauauaguggagaaggcgaacccggucaaugaucuuugcuaccccggggacuucaacgauuaugaggaacugaagcauuugcucagcaggaucaaucacuuugagaaaauucagaucauuccuaaguccucuuggucgucacaugaagugagccugggaguaaguuccgcuuguccauaccagggcaaaucuagcuucuuucggaacguuguguggcugaucaagaaaaauuccacauaucccacuauaaagcgcucauacaacaauaccaaccaagaggaccucuuaguccugugggguauucaccacccuaaugaugccgcagagcagacaaagcuguaucagaacccaaccacuuacaucaguguggggacaagcaccuugaaccagcgacuggugccccguauugccacgagaucuaaagucaauggacaauccggcaggauggaguucuuuuggacuauccuaaagccuaacgacgcuaucaauuucgaaucaaacggcaauuuuauugcaccagaauacgccuauaaaauaguuaagaaaggggauagcaccaucaugaagagugagcucgaauacggaaacugcaauacaaaaugucagacuccgaugggugcuauuaacucuuccaugcccuuccauaauauccacccucugaccauaggcgagugcccaaaguaugugaaaagcaaccggcuuguacuggccacaggguugcgcaauucgccccagagagagaggcggcgcaaaaagcgaggacucuuuggcgcgauugcagguuucaucgaagggggauggcagggcaugguggacggcugguacggguaucaucacucuaacgagcaaggauccgguuacgccgcugacaaagaaucaacccagaaggccaucgauggcgucacgaauaaagugaacaguauuaucgacaagaugaauacucaguuugaggcaguugggagagaguucaacaaccuggaaaggcggauugagaauuuaaacaagaaaauggaagauggauuccuggacguguggacauauaaugcugagcuccuuguccugauggaaaacgagcguaccuuggauuuucacgacagcaaugugaagaaccuauacgauaaaguacgccugcaacucaaggacaaugccaaagaacugggcaacgguuguuucgaguuuuaccauaagugcgauaaugaguguauggaauccguuagaaacgggacuuaugacuacccucaguauucugaggaagcgaggcuuaagcgggaggagauaagcggcgugaaacuggaaucaaucggaauuuaccagaucuugaguaucuauuccacagucgccagcucucucgcacuggcuauuaugguggccggcuuaucacuguggaugugcaguaaugggagccuacagugccgaauauguaucuga

SEQ ID NO: 130255 - RNA, 1701 nt, Artificial Sequence; identical to SEQ ID NO: 129904
  derived and/or modified CDS sequence (opt3) from hemagglutinin__InfluenzaA__ABX10525

SEQ ID NO: 130256 - RNA, 1698 nt, Artificial Sequence; identical to SEQ ID NO: 129962
  derived and/or modified CDS sequence (opt3) from hemagglutinin__InfluenzaA__ABX58239

SEQ ID NO: 130257 - RNA, 1698 nt, Artificial Sequence; identical to SEQ ID NO: 130062
  derived and/or modified CDS sequence (opt3) from hemagglutinin__InfluenzaA__ABX58250

SEQ ID NO: 130258 - RNA, 1698 nt, Artificial Sequence
  derived and/or modified CDS sequence (opt3) from hemagglutinin__InfluenzaA__ABX58261
augaaggugaaacugcucauccuucugugcaccuucacagccacuuacgcugacacgauuuguauaggcuaucacgcaaacaauagcaccgauacagucgacacuguuuuggagaagaacgugaccguaacacauuccgugaauuuacuggaagauucucacaacgggaaacuaugccuccugaagggaaucgcgccccuucagcuggguaauuguucagucgccggcuggauuuuggggaacccugagugcgaacuccugaucaguaaagagagcugguccuacauuguggaaaccccaaauccggagaacggaacuuguuaucccggcuacuuugcugacuaugaggaacugagagagcaacucucuucgguuagcucauucgaaagguuugagaucuucccuaaggagaguuccuggccaaaucauacagugaccggugucucugccagcugcucccacaacgggaagucaaguuuuuaccggaauuuacuguggcuuacgggcaaaaacggauuguaucccaaucugagcaagucuuacgcaaacaauaaagaaaaggaggugcuaguacucuggggcguucaucacccuccaaacauaggggaucagcgcgcccuguaccacacugaaaacgcuuauguguccgucgugucaagccauuacagucgacguuucacccccgagaucgcaaaaagaccuaaggugagggaccaggaaggacggauuaauuauuacuggucucuucuggagccaggugauacaaucauuuuugaggccaacggcaauuugaucgcuccgcgcuucgccuuugcgcucuccagaggguucggaagcggcauaauuacuucgaacgcacccauggacgaaugugaugccaagugccagaccccucaaggugcuaucaauucuucccugccauuucagaacguccaccccguuacaauuggggaguguccuaaauaugugaggucaaccaaguuacggaugguaacgggacugcgcaauaucccaaguauccagagccgaggccucuucggcgccauugcaggguuuauagaaggagguuggacuggcaugguggacgggugguacggauaucaucaccagaacgagcaaggcuccgguuacgcugccgaucagaaaucuacacagaaugcgaucaacgggauuaccaauaaggucaacagcgugaucgaaaagaugaauacucaguucacagccguuggcaaagaguucaacaaacuugagagaaggauggaaaaucugaacaagaagguggacgauggauuuuuggacauauggaccuacaacgcagagcuacugguccuccuggaaaaugagcggacgcuugacuuccacgauucaaacgugaaaaaucuguaugaaaagguaaaaagucaauugaagaacaaugcuaaagagauuggcaacgggugcuuugaguucuaccauaaguguaaugacgaaugcauggaguccguuaagaacggaaccuaugauuaccccaaauauagcgaagagucuaagcucaaucgugagaaaaucgacggugugaagcuggaaucaaugggcgucuaccagaucuuagccauuuauaguacaguggcuagcucccugguccuacucgugucucugggggccaucucguuuuggaugugcagcaacggaucccuucagugucgcauuugcauauga

SEQ ID NO: 130259 - RNA, 1698 nt, Artificial Sequence
  derived and/or modified CDS sequence (opt3) from hemagglutinin__InfluenzaA__ABX58272
augaaggugaaacugcucauccuucugugcaccuucacagccacuuacgcugacacgauuuguauaggcuaucacgcaaacaauagcaccgauacagucgacacuguuuuggagaagaacgugaccguaacacauuccgugaauuuacuggaagauucucacaacgggaaacuaugccuccugaagggaaucgcgccccuucagcuggguaauuguucagucgccggcuggauuuuggggaacccugagugcgaacuccugaucaguaaagagagcugguccuacauuguggaaaccccaaauccggagaacggaacuuguuaucccggcuacuuugcugacuaugaggaacugagagagcaacucucuucgguuagcucauucgaaagguuugagaucuucccuaagaagaguuccuggccaaaucauacagugaccggugucucugccagcugcucccacaacgggaaaucaaguuuuuaccggaauuuacuguggcuuacgggaaagaacggcuuguaucccaaucugagcaaaucuuacgcaaacaauaaggagaaagaagugcuaguacucuggggcguucaucacccuccaaacauaggggaucagcgcgcccuguaccacacugagaacgcuuauguguccgucgugucaagccauuacagucgacguuucacccccgaaaucgcaaagagaccuaaggugagggaccaggagggacggauuaauuauuacuggacacuucuggaaccaggugauacuaucauuuuugaggccaacggcaauuugaucgcuccgcgcuucgccuuugcgcucucuagaggguucggauccggcauaauuaccagcaacgcacccauggacgagugugaugccaaaugccagacaccucaaggugcuaucaauucgucucugccauuucagaacguccaccccguuaccauuggggaauguccuaaguaugugagguccacgaaauuacggaugguaacuggacugcgcaauaucccaucaauccagagucgaggccucuucggcgccauugcaggguuuauagagggagguuggacaggcaugguggacgggugguacggauaucaucaccagaacgaacaaggcagcgguuacgcugccgaucagaaguccacccagaaugcgaucaacgggauuacuaauaaagucaacucugugaucgagaagaugaauacacaguucaccgccguuggcaaagaguucaacaaacuugaaagaaggauggagaaucugaacaagaagguggacgauggauuuuuggacauauggacguacaacgcagaacuacugguccuccuggagaaugaacggacccuugacuuccacgauagcaacgugaagaaucuguaugagaaaguaaagucacaauugaaaaacaaugcuaaggaaauuggcaacgggugcuuugaguucuaccauaaguguaaugacgagugcauggaaaguguuaaaaacggaacauaugauuaccccaaguauuccgaggaaagcaaacucaaucgugagaagaucgacggugugaaacuggagucuaugggcgucuaccagaucuuagccauuuauucaacuguggcuaguagccugguccuacucgugucccugggggccaucucuuuuuggaugugcucgaacggaagccuucagugucgcauuugcauauga

SEQ ID NO: 130260 - RNA, 1698 nt, Artificial Sequence; identical to SEQ ID NO: 129962
  derived and/or modified CDS sequence (opt3) from hemagglutinin__InfluenzaA__ABX58283

SEQ ID NO: 130261 - RNA, 1698 nt, Artificial Sequence; identical to SEQ ID NO: 130103
  derived and/or modified CDS sequence (opt3) from hemagglutinin__InfluenzaA__ABX58294

SEQ ID NO: 130262 - RNA, 1698 nt, Artificial Sequence; identical to SEQ ID NO: 129958
  derived and/or modified CDS sequence (opt3) from hemagglutinin__InfluenzaA__ABX58316

SEQ ID NO: 130263 - RNA, 1698 nt, Artificial Sequence; identical to SEQ ID NO: 130107
  derived and/or modified CDS sequence (opt3) from hemagglutinin__InfluenzaA__ABX58327

SEQ ID NO: 130264 - RNA, 1698 nt, Artificial Sequence; identical to SEQ ID NO: 129958
  derived and/or modified CDS sequence (opt3) from hemagglutinin__InfluenzaA__ABX58338

SEQ ID NO: 130265 - RNA, 1698 nt, Artificial Sequence
  derived and/or modified CDS sequence (opt3) from hemagglutinin__InfluenzaA__ABX58360
augaaggugaaacugcucguccuucugugcaccuucacagccacuuacgcugacacgaucuguauuggcuaucacgcaaacaauagcaccgauacaguugacacuguguuggagaagaacguaaccgugacacauuccgucaauuuacuggaagauucucacaacgggaaacuaugccuccugaagggaauagcccccauccagcuugguaauuguucaguggcgggcuggauucuggggaacccugagugcgaauugcucaucaguaaagagagcugguccuacauuguugaaaccccaaauccggagaacggaacuuguuaucccggcuacuuugcugacuaugaggaacugagagagcaacugucuucggugagcucauucgaaagguuugagaucuucccuaaggagaguuccuggccaaaucauacagucaccggugugucugccagcugcucccacaacgggaagucaaguuuuuaccggaaucucuuauggcugacgggcaaaaacggacuuuaucccaauuugagcaagucuuacgcaaacaauaaagaaaaggagguacugguucuauggggcgugcaucacccuccaaacauaggggaucagcgcgcccucuaccacacugaaaacgcuuaugucuccguggugucaagccauuacagucgacguuucacccccgagaucgcaaaaagaccuaaggucagggaccaggaaggacggauuaauuauuacuggacacugcuugagccaggugauacuaucauuuuugaggccaacggcaaucugaucgcuccgcgcuucgccuuugcguugucuagaggguucggauccggcauaauuaccagcaacgcacccauggacgaaugugaugccaagugccagacaccucaaggugcuaucaauucgucucucccauuucagaacguucaccccgugaccauuggggaguguccuaaauauguaagguccacgaagcugcggauggugacuggauuacgcaauaucccaucaauccagagucgaggccuguucggcgccauugcaggguuuauagaaggagguuggacaggcauggucgacgggugguacggauaucaucaccagaacgagcaaggcagcgguuacgcugccgaucagaaauccacccagaaugcgaucaacgggauuacuaauaaggugaacucuguuaucgaaaagaugaauacacaguucaccgccgugggcaaagaguucaacaaacucgagagaaggauggaaaaucuuaacaagaaggucgacgauggauuucuggacauauggacguacaacgcagaguugcuagugcugcucgaaaaugagcggacccuggacuuccacgauagcaacguuaaaaaucuuuaugaaaagguaaaaucacaacugaagaacaaugcuaaagagauuggcaacgggugcuuugaguucuaccauaaguguaaugacggaugcauggaaagugugaagaacgguacauaugauuaccccaaauauuccgaggaaagcaaguugaaucgugagaaaaucgacggcgucaagcucgagucuauggggguguaccagauccuggccauuuauucaacugucgcuaguagcuuagugcugcuaguuucccucggagccaucucuuuuuggaugugcucgaacggcagccugcagugucgcauuugcauauga

SEQ ID NO: 130266 - RNA, 1698 nt, Artificial Sequence; identical to SEQ ID NO: 129962
  derived and/or modified CDS sequence (opt3) from hemagglutinin__InfluenzaA__ABX58371

SEQ ID NO: 130267 - RNA, 1698 nt, Artificial Sequence; identical to SEQ ID NO: 129962
  derived and/or modified CDS sequence (opt3) from hemagglutinin__InfluenzaA__ABX58382

SEQ ID NO: 130268 - RNA, 1698 nt, Artificial Sequence; identical to SEQ ID NO: 130103
  derived and/or modified CDS sequence (opt3) from hemagglutinin__InfluenzaA__ABX58393

SEQ ID NO: 130269 - RNA, 1698 nt, Artificial Sequence; identical to SEQ ID NO: 129962
  derived and/or modified CDS sequence (opt3) from hemagglutinin__InfluenzaA__ABX58404

SEQ ID NO: 130270 - RNA, 1698 nt, Artificial Sequence
  derived and/or modified CDS sequence (opt3) from hemagglutinin__InfluenzaA__ABX58415
augaaggugaaacugcucguccuucugugcaccuucacagccacuuacgcugacacgaucuguauuggcuaucacgcaaacaauagcaccgauacaguugacacuguguuggagaagaacguaaccgugacacauuccgucaauuuacuggaagauagacacaacgggaaacuaugccuccugaagggaauagcgccccuucagcuggguaauuguucuguggccggcuggaucuuggggaacccugagugcgaacuccugauuaguaaaaagucauggagcuacaucguugagaccccaaauccggaaaacggaacuuguuaucccggcuacuuugcugacuaugaggagcugagggaacaacucuccucugugucgucauucgagcgguuugaaauuuucccuaaggagagcaguuggccaaaucauacagucaccgguguguccgccucuugcagccacaacgggaaauccucauuuuaccgcaauuuacuguggcuuacgggaaagaacggcuuguaucccaaucugagucgaagcuacgcaaacaauaaagagaaggaaguucuaguacucuggggcgugcaucacccuccaaacaucggggaucagcgugcccuguaccacacugagaacgcuuaugucucugugguguccucacauuacagcagaagguucacccccgaaauagcaaaacggccuaagguccgcgaccaggagggaagaaucaauuauuacuggacacuucuggaaccaggugauacuauuaucuuugaggccaacggcaauuugauugcuccgagguucgccuuugcgcucagucggggguucggaucuggcaucauaaccuccaacgcacccauggacgagugugaugccaagugccagacaccucaaggugcuauuaauagcucgcugccauuucagaacguucaccccgugaccaucggggaauguccuaaauauguacgcucugccaaguuacgaauggugacgggacugagaaauauuccauccauccagucaaggggccucuucggcgcaaucgcuggguuuauugagggagguuggacuggcauggucgacgggugguacggauaucaucaccagaacgaacaaggcagugguuacgccgcggaucagaaaagcacacagaaugccauaaacgggaucaccaauaaggugaacuccguuauugagaaaaugaauacucaguucacagcagugggcaaggaguucaacaaacuugaacggcguauggagaaucugaacaagaaggucgacgauggauuuuuggacaucuggaccuacaacgcugaacuacuggugcuccuggagaaugaacgcacgcuugacuuccacgauucuaacguuaaaaaucuguaugagaagguaaaaagccaauugaagaacaaugccaaagaaauaggcaacgggugcuuugaguucuaccauaaguguaaugacgagugcauggaaucagugaagaacggaaccuaugauuaccccaaauauagugaggaauccaagcucaauagagagaaaauugacggugucaagcuggagagcaugggcguguaccagaucuuagcuaucuauucuacagucgccucaagucuggugcuacucguuagccugggggcaauuuccuuuuggaugugcucuaacggaucgcuucaguguaggaucugcauuuga

SEQ ID NO: 130271 - RNA, 1698 nt, Artificial Sequence; identical to SEQ ID NO: 129962
  derived and/or modified CDS sequence (opt3) from hemagglutinin__InfluenzaA__ABX58426

SEQ ID NO: 130272 - RNA, 1698 nt, Artificial Sequence; identical to SEQ ID NO: 129962
  derived and/or modified CDS sequence (opt3) from hemagglutinin__InfluenzaA__ABX58437

SEQ ID NO: 130273 - RNA, 1698 nt, Artificial Sequence; identical to SEQ ID NO: 129958
  derived and/or modified CDS sequence (opt3) from hemagglutinin__InfluenzaA__ABX58448

SEQ ID NO: 130274 - RNA, 1698 nt, Artificial Sequence; identical to SEQ ID NO: 130004
  derived and/or modified CDS sequence (opt3) from hemagglutinin__InfluenzaA__ABX58459

SEQ ID NO: 130275 - RNA, 1698 nt, Artificial Sequence; identical to SEQ ID NO: 130103
  derived and/or modified CDS sequence (opt3) from hemagglutinin__InfluenzaA__ABX58470

SEQ ID NO: 130276 - RNA, 1698 nt, Artificial Sequence; identical to SEQ ID NO: 130004
  derived and/or modified CDS sequence (opt3) from hemagglutinin__InfluenzaA__ABX58481

SEQ ID NO: 130277 - RNA, 1698 nt, Artificial Sequence; identical to SEQ ID NO: 129962
  derived and/or modified CDS sequence (opt3) from hemagglutinin__InfluenzaA__ABX58492

SEQ ID NO: 130278 - RNA, 1698 nt, Artificial Sequence; identical to SEQ ID NO: 129978
  derived and/or modified CDS sequence (opt3) from hemagglutinin__InfluenzaA__ABX58503

SEQ ID NO: 130279 - RNA, 1698 nt, Artificial Sequence; identical to SEQ ID NO: 130004
  derived and/or modified CDS sequence (opt3) from hemagglutinin__InfluenzaA__ABX58525

SEQ ID NO: 130280 - RNA, 1698 nt, Artificial Sequence
  derived and/or modified CDS sequence (opt3) from hemagglutinin__InfluenzaA__ABX58536
augaaggugaaacugcucguccuucugugcaccuucacagccacuuacgcugacacgaucuguauuggcuaucacgcaaacaauagcaccgauacaguugacacuguguuggagaagaacguaaccgugacacauuccgucaauuuacuggaagauagacacaacgggaaacuaugccuccugaagggaauagcgccccuucagcuggguaauuguucuguggccggcuggaucuuggggaacccugagugcgaacuccugauuucaaaagagccauggaguuacaucguugaaaccccgaaucccgagaacggaacuuguuauccuggcuacuuugcugacuaugaggaacugagggagcaacucagcuccgugucuucguucgaacgguuugagauuuucccaaaggagucaagcuggcccaaucauacagucaccggugugagugccuccugcucucacaacggaaagagcuccuuuuaccgcaauuuacuguggcuuacggggaaaaacggcuuguauccuaaucugucacgaaguuacgcaaacaauaaggaaaaagagguacuuguucucuggggcgugcaucacccacccaacaucggggaucagcgugcccuguaccacacugaaaacgcuuaugucagcguggugucuucccauuacucaagaagguucaccccugagauagcaaagcggccaaaaguccgcgaccaggaaggaagaaucaauuauuacuggacacuucuggagccgggugauacuauuaucuuugaggccaacggcaauuugauugcucccagguucgccuuugcgcucagccggggguucggaaguggcaucauaaccucuaacgcaccuauggacgaaugugaugccaagugccagacaccacaaggugcuauuaauuccagccugcccuuucagaacguucacccugugaccaucggggaguguccaaaguauguacgcucggccaaauuacgaauggugacgggacugagaaauauucccucuauccaguccaggggccucuucggcgcaaucgcuggguuuauugaaggagguuggacuggcauggucgacgggugguacggauaucaucaccagaacgagcaaggcucagguuacgccgcggaucagaagaguacacagaaugccauaaacgggaucaccaauaaagugaacagcguuauugaaaagaugaauacucaguucacagcagugggcaaagaguucaacaagcuagagcggcguauggaaaaucugaacaaaaaggucgacgauggauuuuuggacaucuggaccuacaacgcugagcuacuggugcuccuggaaaaugagcgcacgcuugacuuccacgauuccaacguaaagaaucuguaugaaaaaguuaagucucaauugaaaaacaaugccaaggagauaggcaacgggugcuuugaguucuaccauaaauguaaugacgaaugcauggagagcgugaagaacggaaccuaugauuacccgaaguauucagaagagaguaaacucaauagagagaagauugacggugucaaacuggaauccaugggcguguaccagaucuuagcuaucuauagcacagucgccucuucacuggugcuacucguuagucugggggcaauuagcuuuuggaugugcuccaacggaucucuucaguguaggaucugcauuuga

SEQ ID NO: 130281 - RNA, 1698 nt, Artificial Sequence
  derived and/or modified CDS sequence (opt3) from hemagglutinin__InfluenzaA__ABX58547
augaaggugaaacugcucauccuucugugcaccuucacagccacuuacgcugacacgauuuguauaggcuaucacgcaaacaauagcaccgauacagucgacacuguuuuggagaagaacgugaccguaacacauuccgugaauuuacuggaagauucucacaacgggaaacuaugccuccugaagggaaucgcgccccuucagcuggguaauuguucagucgccggcuggauuuuggggaacccugagugcgaacuccugaucaguaaagagagcugguccuacauuguggaaaccccaaauccggagaacggaacuuguuaucccggcuacuuugcugacuaugaggaacugagagagcaacucucuucgguuagcucauucgaaagguuugagaucuucccuaaggagaguuccuggccaaaucauacagugaccggugucucugccagcugcucccacaacgggaagucaaguuuuuaccggaauuuacuguggcuuacgggcaaaaacggauuguaucccaaucugagcaagucuuacgcaaacaauaaagaaaaggaggugcuaguacucuggggcguucaucacccuccaaacauaggggaucagcgcgcccuguaccacacugaaaacgcuuauguguccgucgugucaagccauuacagucgacguuucacccccgagaucgcaaaaagaccuaaggugagggaccaggaaggacggauuaauuauuacuggacacuucuggagccaggugauacuaucauuuuugaggccaacggcaauuugaucgcuccgcgcuucgccuuugcgcucucuagaggguucggauccggcauaauuaccagcaacgcacccauggacgaaugugaugccaagugccagacaccucaaggugcuaucaauucgucucugccauuucagaacguccaccccguuaccauuggggaguguccuaaauaugugagguccacgaaguuacggaugguaacuggacugcgcaauaucccaucaauccagacacgaggccucuucggcgccauugcaggguuuauagaaggagguuggaccggcaugguggacgggugguacggauaucaucaccagaacgagcaaggcagugguuacgcugccgaucagaaaagcacucagaaugcgaucaacgggauuacaaauaaggucaacuccgugaucgaaaagaugaauacccaguucacggccguuggcaaagaguucaacaaacuugagagaaggauggaaaaucugaacaagaagguggacgauggauuuuuggacauauggaccuacaacgcagagcuacugguccuccuggaaaaugagcggacacuugacuuccacgauucuaacgugaaaaaucuguaugaaaagguaaaaagccaauugaagaacaaugcuaaagagauuggcaacgggugcuuugaguucuaccauaaguguaaugacgaaugcauggagucaguuaagaacggaacuuaugauuaccccaaauauagugaagaguccaagcucaaucgugagaaaaucgacggugugaagcuggaaagcaugggcgucuaccagaucuuagccauuuauucuaccguggcuucaagucugguccuacucgugagccugggggccaucuccuuuuggaugugcucuaacggaucgcuucagugucgcauuugcauauga

SEQ ID NO: 130282 - RNA, 1698 nt, Artificial Sequence
  derived and/or modified CDS sequence (opt3) from hemagglutinin__InfluenzaA__ABX58558
augaaggugaaacugcucguccuucugugcaccuucacagccacuuacgcugacacgaucuguauuggcuaucacgcaaacaauagcaccgauacaguugacacuguguuggagaagaacguaaccgugacacauuccgucaauuuacuggaagauucucacaacgggaaacuaugccuccugaagggaauagcgccccuucagcuggguaauuguucaguggccggcuggaucuuggggaacccugagugcgaacuccugauuaguaaagagagcugguccuacaucguugaaaccccaaauccggagaacggaacuuguuaucccggcuacuuugcugacuaugaggaacugagagagcaacucucuucggugagcucauucgaaagguuugagauuuucccuaaggagaguuccuggccaaaucauacagucaccggugugucugccagcugcucccacaacgggcggucaaguuuuuaccgcaauuuacuguggcuuacgggaaagaacggcuuguaucccaaucugagcaaaucuuacgcaaacaauaaggaaaaagagguucuaguacucuggggcgugcaucacccuccaaacaucggggaucagcgagcccuguaccacacugaaaacgcuuaugucuccguggugucaagccauuacagucguagauucacccccgagauagcaaagaggccuaaaguccgggaccaggaaggacgcaucaauuauuacuggacacuucuggagccaggugauacuauuaucuuugaggccaacggcaauuugauugcuccgagauucgccuuugcgcucucuaggggguucggauccggcaucauaaccagcaacgcacccauggacaagugugaugccaagugccagacaccucaaggugcuauuaauucgucucugccauuucagaacguucaccccgugaccaucggggaauguccuaaauauguacgguccacgaaguuacgcauggugacuggacugcgaaauauuccaucaauccagaguagaggccucuucggcgccaucgcaggguuuauugagggagguuggacaggcauggucgacgggugguacggauaucaucaccagaacgaacaaggcagcgguuacgcugccgaucagaaauccacccagaaugcgauaaacgggaucacuaauaaggugaacucuguuauugagaaaaugaauacacaguucaccgccgugggcaaggaguucaacaaacuugaaaggcggauggagaaucugaacaagaaggucgacgauggauuuuuggacaucuggacguacaacgcagaacuacuggugcuccuggagaaugaacguacccuugacuuccacgauagcaacguuaaaaaucuguaugagaagguaaaaucacaauugaagaacaaugcuaaagaaauaggcaacgggugcuuugaguucuaccauaaguguaaugacgagugcauggaaagugugaagaacggaacauaugauuaccccaaauauuccgaggaaagcaagcucaaucgcgagaaaauugacggugucaagcuggagucuaugggcguguaccagaucuuagccaucuauucaacugucgcuaguagccuggugcuacucguuucccugggggccauuucuuuuuggaugugcucgaacggaagccuucaguguagaaucugcauuuga

SEQ ID NO: 130283 - RNA, 1698 nt, Artificial Sequence
  derived and/or modified CDS sequence (opt3) from hemagglutinin__InfluenzaA__ABX58569
augaaggugaaacugcucauccuucugugcaccuucacagccacuuacgcugacacgauuuguauaggcuaucacgcaaacaauagcaccgauacagucgacacuguuuuggagaagaacgugaccguaacacauuccgugaauuuacuggaagauucucacaacgggaaacuaugccuccugaagggaaucgcgccccuucagcuggguaauuguucagucgccggcuggauuuuggggaacccugagugcgaacuccugaucaguaaagagagcugguccuacauuguggaaaccccaaauccggagaacggaacuuguuaucccggcuacuuugcugacuaugaggaacugagagagcaacucucuucgguuagcucauucgaaagguuugagaucuucccuaaggagaguuccuggccaaaucauacagccaccggugugucugcaagcugcucccacaacgggaagucaaguuuuuaccggaauuuacuguggcuuacgggcaaaaacggauuguaucccaaucugagcaagucuuacgccaacaauaaagaaaaggagguccuagugcucuggggcguacaucacccuccaaacauaggggaucagcgcgcucuguaccacacugaaaacgcauauguuuccguggucucaagccauuacagucgacguuucacccccgagaucgccaaaagaccuaaggugagggaccaggaaggacggauuaauuauuacuggacacuucuggagccaggugauacuaucauuuuugaggcuaacggcaauuugaucgccccgcgcuucgcguuugcacucucuagaggguucggauccggcauaauuaccagcaacgcccccauggacgaaugugaugcuaagugccagacaccucaaggugccaucaauucgucucugccauuucagaacgugcaccccgucaccauuggggaguguccuaaauauguuagguccacgaaguuacggauggugacuggacugcgcaauaucccaucaauccagagucgaggccucuucggcgcaauugcuggguuuauagaaggagguuggacaggcaugguagacgggugguacggauaucaucaccagaacgagcaaggcagcgguuacgccgcggaucagaaauccacccagaaugccaucaacgggauuacuaauaaggugaacucugucaucgaaaagaugaauacacaguucaccgcagugggcaaagaguucaacaaacuugagagaaggauggaaaaucugaacaagaagguugacgauggauuuuuggacauauggacguacaacgcugagcuacuggugcuccuggaaaaugagcggacccuugacuuccacgauagcaacgucaaaaaucuguaugaaaaggugaaaucacaauugaagaacaaugccaaagagauuggcaacgggugcuuugaguucuaccauaaguguaaugacgaaugcauggagaguguaaagaacggaacauaugauuaccccaaauauuccgaagagagcaagcucaaucgugagaaaaucgacgguguuaagcuggaaucuaugggcguguaccagaucuuagcuauuuauucaacugucgccaguagccuggugcuacucgucucccugggggcaaucucuuuuuggaugugcucgaacggaagccuucagugucgcauuugcauauga

SEQ ID NO: 130284 - RNA, 1698 nt, Artificial Sequence; identical to SEQ ID NO: 129958
  derived and/or modified CDS sequence (opt3) from hemagglutinin__InfluenzaA__ABX58580

SEQ ID NO: 130285 - RNA, 1698 nt, Artificial Sequence; identical to SEQ ID NO: 129962
  derived and/or modified CDS sequence (opt3) from hemagglutinin__InfluenzaA__ABX58591

SEQ ID NO: 130286 - RNA, 1698 nt, Artificial Sequence
  derived and/or modified CDS sequence (opt3) from hemagglutinin__InfluenzaA__ABX58602
augaaggugaaacugcucguccuucugugcaccuucacagccacuuacgcugacacgaucuguauuggcuaucacgcaaacaauagcaccgauacaguugacacuguguuggagaagaacguaaccgugacacauuccgucaauuuacuggaagauucucacaacgggaaacuaugccuccuggagggaauagcgccccuucagcuggguaauuguucaguggccggcuggaucuuggggaacccugaaugcgagcuccugauuaguaaggaaagcugguccuacaucguugagaccccaaauccggagaacggaacuuguuaucccggcuacuuugcugacuaugaagaacugagagaacaacucucuucggugagcucauucgagagguuugagauuuucccuaaagaaaguuccuggccaaaucauacagucaccggugugucugccagcugcucccacaacgggaagucaaguuuuuaccggaauuuacuguggcuuacgggaaagaacggcuuguaucccaaucugagcaaaucuuacgcaaacaauaaggagaaagaaguacuuguucucuggggcgugcaucacccuccaaacaucggggaucagcgcgcccuguaccacacugagaacgcuuaugucuccguggugucaagccauuacagucgacguuucacccccgaaauagcaaagagaccuaaagucagggaccaggagggacggaucaauuauuacuggacacuucuggagccacgcgauacuauuaucuuugaagccaacgguaauuugauugcuccgagauucgccuuugcgcucucuaggggcuucggguccggaaucauaaccagcaacgcacccaugggcgagugugacgccaagugccagacaccucaaggugcuauuaauucgucucugccauuucagaacguucaccccgugaccaucggggaauguccuaaguauguacgguccgccaaauuacgcauggugacgggacugcgaaauauuccaucaauccagaguagaggccucuucggcgcaaucgcuggguuuauugagggagguuggacuggcauggucgaugggugguacggauaucaucaccagaacgaacaaggcagcgguuacgccgcggaccagaaguccacacagaaugccauaaacgggaucaccaauaaagugaacucuguuauugagaagaugaauacucaguucacagcagugggcaaagaguucaacaagcuagaaaggcggauggagaaucugaacaaaaaggucgaugacggauuuuuggauaucuggaccuacaacgcugaacuacuggugcuccuggagaaugaacguacgcuugacuuccacgacagcaacguaaagaaucuguaugagaaaguuaagucacaauugaaaaacaaugccaaggagauaggcaacgggugcuuugaguucuaccauaaauguaaugaugagugcauggaaagugugaagaacggaaccuaugacuaccccaaguauuccgaggagagcaaacucaaucgcgaaaagauugauggugucaaacuggagucuaugggcguguaccagaucuuagcuaucuauucaacagucgccaguagccuggugcuacucguuucccugggggcaauuucuuuuuggaugugcucgaacggaagccuucaguguagaaucugcauuuga

SEQ ID NO: 130287 - RNA, 1698 nt, Artificial Sequence; identical to SEQ ID NO: 129995
  derived and/or modified CDS sequence (opt3) from hemagglutinin__InfluenzaA__ABX58613

SEQ ID NO: 130288 - RNA, 1698 nt, Artificial Sequence; identical to SEQ ID NO: 129962
  derived and/or modified CDS sequence (opt3) from hemagglutinin__InfluenzaA__ABX58624

SEQ ID NO: 130289 - RNA, 1698 nt, Artificial Sequence
  derived and/or modified CDS sequence (opt3) from hemagglutinin__InfluenzaA__ABX58635
augaaggugaaacugcucguccuucugugcaccuucacagccacuuacgcugacacgaucuguauuggcuaucacgcaaacaauagcaccgauacaguugacacuguguuggagaagaacguaaccgugacacauuccgucaauuuacuggaagauucucacaacgggaaacuaugccuccugaagggaauagcgccccuucagcuggguaauuguucaguggccggcuggaucuuggggaacccugagugcgaacuccugauuaguaaagagagcugguccuacaucguugaaaccccaaauccggagaacggaacuuguuaucccggcuacuuugcugacuaugaggaacugagagagcaacucucuucggugagcucauucgaaagguuugagauuuucccuaaggagaguuccuggccaaaucauacagucaccggugugucugccagcugcucccacaacgggcggucaaguuuuuaccgcaauuuacuguggcuuacgggaaagaacggcuuguaucccagccugucuaaauccuacgcaaauaacaaggaaaaagagguacuuguucucuggggcgugcaucacccuccaaauaucggggaucagcgagcccuguaccacacugaaaacgcuuaugucucaguggugagcagucauuacucucguagauucacccccgagauagcaaagaggccuaaaguccgggaccaggaaggacgcaucaacuauuacuggacacuucuggagccaggugauacuauuaucuuugaggccaauggcaacuugauugcuccgagauucgccuuugcgcucuccaggggguucggaagcggcaucauaaccucgaaugcacccauggacgaaugugaugccaagugccagacaccucaaggugcuauuaacucuucccugccauuucagaauguucaccccgugaccaucggggaguguccuaaguauguacggucaacgaaauuacgcauggugacuggacugcgaaacauuccaaguauccagagcagaggccucuucggcgccaucgcaggguuuauugaaggagguuggacaggcauggucgacgggugguacggauaucaucaccagaaugagcaaggcuccgguuacgcugccgaucagaagucuacccagaacgcgauaaaugggaucacuaacaaagugaauagcguuauugaaaagaugaacacacaguucaccgccgugggcaaagaguucaauaagcuagagaggcggauggaaaaccugaauaaaaaggucgacgauggauuuuuggacaucuggacguacaacgcagagcuacuggugcuccuggaaaacgagcguacccuugacuuccacgauucaaauguaaagaaccuguaugaaaaaguuaagagucaauugaaaaauaacgcuaaggagauaggcaaugggugcuuugaguucuaccauaaauguaacgacgaaugcauggaguccgugaagaauggaacauaugauuaccccaaguauagcgaagagucuaaacucaaccgcgagaagauugacggugucaaacuggaaucaaugggcguguaccagaucuuagccaucuauaguacugucgcuagcucccuggugcuacucguuucucugggggccauuucguuuuggaugugcagcaauggaucccuucaguguagaaucugcauuuga

SEQ ID NO: 130290 - RNA, 1698 nt, Artificial Sequence; identical to SEQ ID NO: 129958
  derived and/or modified CDS sequence (opt3) from hemagglutinin__InfluenzaA__ABX58679

SEQ ID NO: 130291 - RNA, 1698 nt, Artificial Sequence; identical to SEQ ID NO: 130004
  derived and/or modified CDS sequence (opt3) from hemagglutinin__InfluenzaA__ABX58701

SEQ ID NO: 130292 - RNA, 1698 nt, Artificial Sequence; identical to SEQ ID NO: 130062
  derived and/or modified CDS sequence (opt3) from hemagglutinin__InfluenzaA__ABX58712

SEQ ID NO: 130293 - RNA, 1704 nt, Artificial Sequence
  derived and/or modified CDS sequence (opt3) from hemagglutinin__InfluenzaA__ABY19417
auggagaagaucgugcugcuccuugccauuauaagccuggucaaauccgaccagaucugcauuggcuaccacgcuaacaauucuaccgaacaaguugauacaaucauggagaagaacgugacuguaacgcaugcacaggacauuuuggagaaaacccacaaugggaaguuaugugaucuggacggagugaaaccccuaauccucagagauugcucagucgccgguuggcugcuuggcaacccuaugugugacgaguucauaaaugugccagaauggaguuauaucguugagaaggcgaacccggcuaaugaucugugcuaccccgggaacuuuaaugacuaugaggaauugaagcaucuccugagcaggauuaaccacuucgagaaaauccagauuaucccuaaguccucuuggucggaucaugaagccucaagcggagugaguuccgcauguccauaccagggcguccccagcuuuuuccggaaugugguauggcugauaaagaagaacaauacauauccuacuauuaaacgcagcuacaacaauaccaaccaagaggaccucuuaauccugugggguauucaccacuccaacgaugccgcugagcagacaaaacuuuaucagaauccaaccacuuacaucucaguugggacaaguaccuugaaccagcgacuggugcccaagaucgcaacgcguagcaaagucaauggacaaucuggcagaauggacuuuuucuggacuauucuaaagccuaacgaugccauaaauuuugaauccaacggcaauuucaucgcuccagaguacgccuauaaaauugugaagaaaggggacucagcgaucaugaagucugaaguggaguacggaaacugcaauaccaaaugucagacaccgauaggugcaauuaacaguucuaugcccuuucauaauauccacccucucacuaucggcgaaugcccaaaguaugucaaguccaacaaacugguucuugccaccgggcugaggaauagccccuugcgggagcgcagaaggaagcggggacucuucggcgcuauugccgguuuuaucgaagggggauggcagggcaugguggacggcugguacggguaucaucacucgaacgaacagggaucugguuacgcagcugauaaagaguccacacaaaaggccauugacggcguaaccaauaaagugaacucaauaaucgauaagaugaacacgcaguucgaagcggucgggcgcgaguuuaauaaccuggaacgaagaauugagaauuuaaacaagaaaauggaggacggauuccuggauguguggacuuauaaugccgaacuccuuguucugauggagaacgaaaggacauuggacuuccacgauaguaaugugaagaaccuauacgacaaaguccggcugcagcuccgugauaaugcaaaggagcugggcaacgguuguuuuaaauucuaccauaagugcgacaaugaauguauggagagcgugcgcaacgggaccuaugauuacccucaauauuccgaggaagcuagacuuaagagggaggaaaucucuggcguaaaacuggagagcaucggaacuuaccagauuuugucaauauauaguacaguugccuccagccucgcucuggccaucaugguggcaggcuuaucucuguggaugugcucaaaugggagucuacagugccggauucgaaucuga

SEQ ID NO: 130294 - RNA, 1704 nt, Artificial Sequence
  derived and/or modified CDS sequence (opt3) from hemagglutinin__InfluenzaA__ABY19418
auggagaagaucgugcugcuccuugccauuauaagccuggucaaauccgaccagaucugcauuggcuaccacgcuaacaauucuaccgaacaaguugauacaaucauggagaagaacgugacuguaacgcaugcacaggacauuuuggagaaaacccacaaugggaaguuaugugaucuggacggagugaaaccccuaauccucagagauugcucagucgccgguuggcugcuuggcaacccuaugugugacgaguucauaaaugugccagaauggaguuauaucguugagaaggcgaacccggcuaaugaucugugcuaccccggggacuuuaacgauuaugaggaauugaagcaucuccugagcaggauuaaucacuucgagaaaauccagauuaucccuaaguccucuuggucggaccaugaagccucaagcggagugaguuccgcauguccauaccagggcguccccagcuuuuuccggaacgugguauggcugauaaagaagaauaacacauauccuacuauuaaacgcagcuacaauaacaccaaucaagaggaucucuuaauccugugggguauucaccacuccaacgacgccgcugagcagacaaaacuuuaucagaacccaaccacuuacaucucaguugggacaaguaccuugaaucagcgacuggugcccaagaucgcaacgcguagcaaagucaacggacaaucuggcagaauggacuuuuucuggacuauucuaaagccuaaugaugccauaaacuuugaauccaauggcaacuucaucgcuccagaguacgccuauaaaauugugaagaaaggggacucagcgaucaugaagucugaaguggaguacggaaauugcaacaccaaaugucagacaccgauaggugcaauuaauaguucuaugcccuuucauaacauccacccucucacuaucggcgaaugcccaaaguaugucaaguccaauaaacugguucuugccaccgggcugaggaacagccccuugcgggagcgcagaaggaagcggggacucuucggcgcuauugccgguuuuaucgaagggggauggcagggcaugguggauggcugguacggguuccaucacucgaaugaacagggaucugguuaugcagcugacaaagaguccacacaaaaggccauugauggcguaaccaacaaagucaauucaauaaucgacaagaugaacacgcaguuugaagcgguggggcgcgaguucaacaaucuggaacgaagaauugagaacuuaaauaagaaaauggaggauggauuccuggacguguggacuuacaacgccgaacuccuuguucugauggagaaugaaaggacauuggauuuucacgacaguaacgugaagaaucuauaugauaaaguccggcugcagcuccgugacaacgcaaaggagcugggcaaugguuguuucgaauuuuaccauaaaugcgauaacgaguguauggagagcgugcgcaaugggaccuacgacuauccucaauacuccgaagaggcuagacuuaagagggaagagaucucuggcguaaagcuggagagcaucggaacuuaucagauuuugucaauauacaguacaguugccuccagccucgcucuggccaucaugguggcaggcuuaucucuguggaugugcucaaacgggagucuacagugccggauuuguaucuga

SEQ ID NO: 130295 - RNA, 1704 nt, Artificial Sequence
  derived and/or modified CDS sequence (opt3) from hemagglutinin__InfluenzaA__ABY19419
auggagaagaucgugcugcuccuugccauuauaagccuggucaaauccgaccagaucugcauuggcuaccacgcuaacaauucuaccgaacaaguugauacaaucauggagaagaacgugacuguaacgcaugcacaggacauuuuggaaaagacccacaaugggaaguuaugugaucuggacggagugaaaccccuaauccucagagauugcucagucgccgguuggcugcuuggcaacccuaugugugacgaguucauaaaugugccagaauggaguuauaucguugagaaggcgaacccggcuaaugaucugugcuaccccgggaacuuuaaugacuaugaggaauugaagcaucuccugagcaggauuaaccacuucgagaaaauccagauuaucccuaaguccucuuggucggaucaugaagccucaagcggagugaguuccgcauguccauaccagggcguccccagcuuuuuccggaaugugguauggcugauaaagaagaacaauacauauccuacuauuaaacgcucuuacaacaauaccaaccaagaggaccucuuaauccugugggguauucaccacuccaacgaugccgcugagcagacaaaacuuuaucagaauccaaccacuuacaucucaguugggacaaguaccuugaaccagcgacuggugcccaagaucgcaacgcguagcaaagucaauggacaaucuggcagaauggacuuuuucuggacuauucuaaagccuaacgaugccauaaauuuugaauccaacggcaauuucaucgcuccagaguacgccuauaaaauugugaagaaaggggacucagcgaucaugaaaagcgaaguggaguacggaaacugcaauaccaaaugucagacaccgauaggugcaauuaacaguucuaugcccuuucauaauauccacccucucacuaucggcgaaugcccaaaguaugucaaguccaacaaacugguucuugccaccgggcugaggaauagccccuugcgggagcgcagaaggaagcggggacucuucggcgcuauugccgguuuuaucgaagggggauggcagggcaugguggacggcugguacggguaucaucacucgaacgaacagggaucugguuacgcagcugauaaagaguccacacaaaaggccauugacggcguaaccaauaaagugaacucaauaaucgauaagaugaacacgcaguucgaagcggucgggcgcgaguuuaauaaccuggaacgaagaauugagaauuuaaacaagaaaauggaggacggauuccuggauguguggacuuauaaugccgaacuccuuguucugauggagaacgaaaggacauuggacuuccacgauaguaaugugaagaaccuauacgacaaaguccggcugcagcuccgugauaaugcaaaggagcugggcaacgguuguuuugaguucuaccauaaaugcgacaaugaguguauggagagcgugcgcaacgggaccuaugauuacccucaauauuccgaagaggcuagacuuaagagggaagagaucucuggcguaaagcuggagagcaucggaacuuaccagauuuugucaauauauaguacaguugccuccagccucgcucuggccaucaugguggcaggcuuaucucuguggaugugcucaaaugggagucuacagugccggauuuguaucuga

SEQ ID NO: 130296 - RNA, 1698 nt, Artificial Sequence; identical to SEQ ID NO: 130103
  derived and/or modified CDS sequence (opt3) from hemagglutinin__InfluenzaA__ABY51017

SEQ ID NO: 130297 - RNA, 1701 nt, Artificial Sequence; identical to SEQ ID NO: 129976
  derived and/or modified CDS sequence (opt3) from hemagglutinin__InfluenzaA__ABY51028

SEQ ID NO: 130298 - RNA, 1698 nt, Artificial Sequence
  derived and/or modified CDS sequence (opt3) from hemagglutinin__InfluenzaA__ABY51039
augaaggugaaacugcucguccuucugugcaccuucacagccacuaacgcugacacgaucuguauuggcuaccacgcaaauaacagcaccgauacaguugacacuguguuggagaagaauguaaccgugacacauuccgucaacuuacuggaaaauucucacaacgggaaacuaugccuccugaagggaauagcgccccuucagcuggguaauuguucaguggccggcuggaucuuggggaacccugagugcgaacuccugauuaguaaagagagcugguccuauaucguugaaaccccaaauccggagaacggaacuuguuaccccggccauuuugcugauuaugaggaacugagagagcaacucucuucggugagcucauucgaaagguuugagauuuucccuaaggagaguuccuggccaaaucacacagucaccggugugucugccagcugcucccauaacggggaaucaaguuuuuaccggaauuuacuguggcuuacgggaaagaacggcuuguaucccaaucugagcaaaucuuacgcaaacaacaaggagaaagaagugcuaguucucuggggcgugcaccacccuccaaauaucggggaccagaaggcccuguaucauacugagaacgcuuacgucuccguggugucaagccacuacagucgcaaauucacccccgaaauagcaaagcgaccuaagguccgugaucaggagggaagaaucaauuauuacuggacacuucuggagccaggugacacuauuaucuuugaagccaacggcaauuugauugcuccgagguaugccuucgcgcucucucggggguuuggauccggcaucauaaacagcaaugcacccauggauaaaugugacgccaagugccagaccccucaaggugcuauuaacucgucucugccauuccagaauguucaucccgugacaaucggggaguguccuaaauacguacgcuccgccaaguuaagaauggugaccggacugaggaacauuccaucaauccagagucggggccucuuuggcgcaaucgcuggguucauugaaggagguuggacgggcauggucgaugggugguauggauaccaccaccagaaugagcaaggcagcgguuaugccgcggaccagaaauccacucagaacgccauaaaugggaucacaaacaagguaaauucuguuauugaaaagaugaacacccaguuuacugcagugggcaaggaguucaacaaacuugagcgccgaauggaaaaucugaacaaaaaggucgaugacggauucaucgauauauggacauacaaugcugaguugcuagugcugcucgaaaacgagagaacccuggacuuucaugacagcaauguuaaaaaccuuuacgaaaagguaaaaggccaacugaagaauaacgccaaggagauugggaauggaugcuucgaguuuuaucacaaauguaacgaugaaugcauggagucagugaagaaugguacguacgacuaucccaaauacagugaagaguccaaguugaacagggagaaaaucgauggcgucaagcucgaaagcauggggguguaucagauccuggcuauuuacucuaccgucgccucaaguuuagugcugcuaguuagccucggagcaaucuccuucuggaugugcucuaauggcucgcugcagugucggauuugcauauga

SEQ ID NO: 130299 - RNA, 1698 nt, Artificial Sequence
  derived and/or modified CDS sequence (opt3) from hemagglutinin__InfluenzaA__ABY51050
augaaggugaaacugcucguccuucugugcaccuucacagccacuuacgcugacacgaucuguauuggcuaucacgcaaacaauagcaccgauacaguugacacuguguuggagaagaacguaaccgugacacauuccgucaauuuacuggaaaacucucacaaugggaaacuaugccuccugaagggaauagcgccccuucagcuggguaacuguucaguggccggcuggaucuuggggaauccugagugcgaacuccugauuaguaaagagagcugguccuacaucguugaaaagccaaacccggagaauggaaccuguuaucccggccauuuugcugauuacgaggaacugagagagcaacucucuucggugagcucauucgaaagguuugagauuuucccuaaggagaguuccuggccaaaccacacugucacaggugugucugccagcugcucccauaauggggaaucaaguuuuuaucggaacuuacuguggcuuaccggcaaaaauggauuguaccccaaccugagcaagucuuaugcaaauaacaaagagaaggaaguucuaguacucuggggcgugcaccacccuccaaacaucggggaccagaaagcccuguaccauacggagaaugcuuacgucuccguggugucaagccacuauagucgcaaguucacucccgaaauagcaaagcgaccuaaaguccgugaucaggagggaagaaucaacuacuauuggacccuucuggagccaggugacacaauuaucuuugaagccaauggcaacuugauugcuccgagguacgccuucgcgcucucucggggguuuggauccggcaucauaaauagcaacgcacccauggauaagugugacucgaaaugccagacuccucaaggugccauuaauucuucccugccauuccagaacguucaucccgugaccaucggggaguguccuaaguauguacgcucagcuaaauuaagaauggugacaggacugaggaauauuccaaguauccagagccggggccucuuuggcgccaucgcaggguucauugaaggagguuggaccggcauggucgaugggugguacggauaucaccaccagaacgagcaaggcuccgguuacgcugccgaccagaagucuacgcagaaugcgauaaacgggaucacuaauaaagugaacagcguuauugaaaagaugaauacacaguuuaccgccgugggcaaggaguucaacaaacuugagcgccgaauggaaaaccugaauaagaaagucgaugacggauucaucgauauauggacuuacaacgcagaguugcuagugcugcucgaaaaugagagaacacuggacuuucaugacucaaacguaaagaaucuuuaugaaaaaguuaagagucaacugaagaacaaugcuaaagagauuggcaacgggugcuucgaguuuuaccacaaguguaaugaugaaugcauggaguccgugaaaaacggaaccuaugacuaccccaaguauagcgaagagucuaaauugaauagggagaagaucgauggugucaagcucgaaucaaugggcguguaccagauccuggccauuuauaguacggucgcuagcuccuuagugcugcuaguuucucucggggccaucucguucuggaugugcagcaacggaucccugcagugucggauuugcauauga

SEQ ID NO: 130300 - RNA, 1698 nt, Artificial Sequence; identical to SEQ ID NO: 130062
  derived and/or modified CDS sequence (opt3) from hemagglutinin__InfluenzaA__ABY51061

SEQ ID NO: 130301 - RNA, 1698 nt, Artificial Sequence
  derived and/or modified CDS sequence (opt3) from hemagglutinin__InfluenzaA__ABY51072
augaaggugaaacugcucauccuucugugcaccuucacagccacuuacgcugacacgauuuguauaggcuaucacgcaaacaauagcaccgauacagucgacacuguuuuggagaagaacgugaccguaacacauuccgugaauuuacuggaagauucucacaacgggaaacuaugccuccugaagggaaucgcgccccuucagcuggguaauuguucagucgccggcuggauuuuggggaacccugagugcgaacuccugaucaguaaagagagcugguccuacauuguggaaaccccaaauccggagaacggaacuuguuaucccggcuacuuugcugacuaugaggaacugagagagcaacucucuucgguuagcucauucgaaagguuugagaucuucccuaaggagaguuccuggccaaaucauacagugaccggugucucugccagcugcucccacaacgggaagucaaguuuuuaccggaauuuacuguggcuuacgggcaaaaacggauuguaucccaaucugagcaagucuuacgcaaacaauaaagaaaaggaggugcuaguacucuggggcguucaucacccuccaaacauaggggaucagcgcgcccuguaccacacugaaaacgcuuauguguccgucgugucaagccauuacagucgacguuucacccccgagaucgcaaaaagaccuaaggugagggaccaggaaggacggauuaauuauuacuggacacuucuggagccaggugauacuaucauuuuugaggccaacggcaauuugaucgcuccgcgcuucgccuuugcgcucucuagaggguucggauccggcauaauuaccagcaacgcacccauggacgaaugugaugccaagugccagacaccucaaggugcuaucaauucgucucugccauuucagaacguccaccccguuaccauuggggaguguccuaaauaugugagguccacgaaguuacggaugguaacuggacugcgcaauaucccaucaauccagagucgaggccucuucggcgccauugcaggguuuauagaaggagguuggacaggcaugguggacgggugguacggauaucaucaccagaacgagcaaggcagcgguuacgcugccgaucagaaauccacccagaaugcgaucaacgggauuacuaauaaggucaacucugugaucgagaaaaugaauacacaguucaccgccguuggcaaggcauucaacaaacuugaaagaaggauggagaaucugaacaagaagguggacgauggauuuuuggacauauggacguacaacgcugaacuacugguccuccuggagaaugaacggacccuugacuuccacgauagcaacgugaaaaaucuguaugagaagguaaaaucacaauugaagaacaaugccaaagaaauuggcaacgggugcuuugaguucuaccauaaguguaaugacgagugcauggaaaguguuaagaacggaacauaugauuaccccaaauauuccgaggaaagcaagcucaaucgugagaaaaucgacggugugaagcuggagucuaugggcgucuaccagaucuuagcuauuuauucaacuguggccaguagccugguccuacucgugucccugggggcaaucucuuuuuggaugugcucgaacggaagccuucagugucgcauuugcauauga

SEQ ID NO: 130302 - RNA, 1698 nt, Artificial Sequence; identical to SEQ ID NO: 130004
  derived and/or modified CDS sequence (opt3) from hemagglutinin__InfluenzaA__ABY51083

SEQ ID NO: 130303 - RNA, 1698 nt, Artificial Sequence; identical to SEQ ID NO: 129962
  derived and/or modified CDS sequence (opt3) from hemagglutinin__InfluenzaA__ABY51094

SEQ ID NO: 130304 - RNA, 1698 nt, Artificial Sequence; identical to SEQ ID NO: 130103
  derived and/or modified CDS sequence (opt3) from hemagglutinin__InfluenzaA__ABY51105

SEQ ID NO: 130305 - RNA, 1698 nt, Artificial Sequence; identical to SEQ ID NO: 129962
  derived and/or modified CDS sequence (opt3) from hemagglutinin__InfluenzaA__ABY51116

SEQ ID NO: 130306 - RNA, 1701 nt, Artificial Sequence
  derived and/or modified CDS sequence (opt3) from hemagglutinin__InfluenzaA__ABY51127
augaagaccaucauugcccugagcuacauacucugcaugguguucgcucagaaacuucccggcaacgacaauuccacagcaacucuguguuuggggcaccaugccgucccuaacggaacgaucguuaagaccauuacaaaugaucaaaucgaggugacuaacgcgaccgaauuaguacagucuucaaguacaggugagauuugcgacagcccacaccagauccuggauggcgaaaauuguacccuaauagacgcucuccugggggauccgcagugcgacggauuucaaaacaaaaagugggaucuuuucguggagagauccaaagccuauucuaauuguuaccccuaugacgucccugauuacgcaucgcugaggucauugguggccagcaguggcacucucgaauuuaacaaugaguccuucaacuggacagguguuacccagaaugggacgucuagcgcuugcauccggcgcuccaacaauucauuuuucagucgacugaacuggcugacucaucucaaguuuaaguauccagcauuaaaugugaccaugcccaacaacgagaaauucgacaagcuguacauuuggggaguccaccauccuggcacagauaaugaccagguguuucuuuaugcccaggcuagcggccguaucacuguaucuaccaaaagaucccaacagacaguuauuccaaacaucgggucaaggccccgggugcgcaauauaccuagcagaauuaguaucuacuggaccauugucaagccaggagauaucuugcugaucaacucuacggguaaucuaauugccccgaggggcuacuucaaaauacgguccggaaagagcucgaucaugcgcucugacgcgcccauugggaaguguaacuccgaaugcaucacuccuaauggcucaauaccaaacgacaaacccuuucagaaugugaaccgaauuacauauggugcauguccuagauacgugaagcagaauacccucaaacuggccacugggaugaggaacgucccagagaagcaaacacggggaaucuucggcgcuaucgccggcuuuauugaaaaugggugggagggaaugguugaugguugguauggcuuccgucaccagaacagugaggggaucggacaggcagcugaccuuaaaagcacccaagccgcgauugaucagauaaauggcaagcugaaccgcuugaucgguaaaacgaacgaaaaguuccaccagauugagaaggaauuuuccgagguggaagggagaauccaggaccucgagaaauacguagaggauaccaagaucgaccuguggucuuauaaugccgaauuacugguggcacucgagaaccaacauacaauugaucuuacugacagcgaaaugaauaaacuguucgagaagaccaaaaagcaguugagggaaaacgcugaggauaugggcaauggaugcuuuaagauauaccacaaaugugacaacgccugcaucggcucaauucggaaugggacauaugaucaugacgucuaccgagacgaggcucuaaacaaucgcuuccagaucaagggaguggaacugaaaagugguuacaaggauuggauucucuggaucuccuuugccauaagcugcuuccugcuuuguguugcacuguugggcuuuaucaugugggccugccagaaagggaacauuagauguaauaucugcauuuga

SEQ ID NO: 130307 - RNA, 1698 nt, Artificial Sequence
  derived and/or modified CDS sequence (opt3) from hemagglutinin__InfluenzaA__ABY51138
augaaggugaaacugcucguccuucugugcaccuucacagccacuuacgcugacacgaucuguauuggcuaucacgcaaacaauagcaccgauacaguugacacuguguuggagaagaacguaaccgugacacauuccgucaauuuacuggaagauagacacaacgggaaacuaugccuccugaagggaauagcgccccuucagcuggguaauuguucuguggccggcuggaucuuggggaacccugagugcgaacuccugauuucaaaagagaguuggagcuacaucguugaaaccccaaauccggagaacggaacuuguuaucccggcuacuuugcugacuaugaggaacugagggagcaacucuccucugugucgucauucgaacgguuugagauuuucccuaaggagagcaguuggccaaaucauacagucaccgguguguccgccucuugcagccacaacgggaaguccucauuuuaccgcaauuuacuguggcuuacgggaaagaacggcuuguaucccaaucugagucgaagcuacgcaaacaauaaggaaaaagagguacuuguucucuggggcgugcaucacccuccaaacaucggggaucagcgugcccuguaccacacugaaaacgcuuaugucucugugguguccucacauuacagcagaagguucacccccgagauagcaaagcggccuaaaguccgcgaccaggaaggaagaaucaauuauuacuggacacuucuggagccaggugauacuauuaucuuugaggccaacggcaauuugauugcuccgagguucgccuuugcgcucagucggggguucggaucuggcaucauaaccuccaacgcacccauggacgaaugugaugccaagugccagacaccucaaggugcuauuaauagcucgcugccauuucagaacguucaccccgugaccaucggggaguguccuaaguauguacgcucugccaaauuacgaauggugacgggacugagaaauauuccauccauccagucaaggggccucuucggcgcaaucgcuggguuuauugaaggagguuggacuggcauggucgacgggugguacggauaucaucaccagaacgagcaaggcagugguuacgccgcggaucagaaaagcacacagaaugccauaaacgggaucaccaauaaagugaacuccguuauugaaaagaugaauacucaguucacagcagugggcaaagaguucaacaagcuagagcggcguauggaaaaucugaacaaaaaggucgacgauggauuuuuggacaucuggaccuacaacgcugagcuacuggugcuccuggaaaaugagcgcacgcuugacuuccacgauucuaacguaaagaaucuguaugaaaaaguuaagauacaauugaaaaacaaugccaaggagauuggcaacgggugcuuugaguucuaccauaaauguaaugacgaaugcauggagagcgugaagaacggaaccuaugauuaccccaaguauucagaagagaguaaacucaauagagagaagaucgacggugucaaacuggaauccaugggcguguaccagaucuuagcuauuuauagcacagucgccucuucacuggugcuacucguuagucugggggcaaucagcuuuuggaugugcuccaacggaucucuucaguguaggauuugcauauga

SEQ ID NO: 130308 - RNA, 1698 nt, Artificial Sequence; identical to SEQ ID NO: 129962
  derived and/or modified CDS sequence (opt3) from hemagglutinin__InfluenzaA__ABY51149

SEQ ID NO: 130309 - RNA, 1698 nt, Artificial Sequence
  derived and/or modified CDS sequence (opt3) from hemagglutinin__InfluenzaA__ABY51160
augaaggugaaacugcucguccuucugugcaccuucacagccacuuacgcugacacgaucuguauuggcuaucacgcaaacaauagcaccgauacaguugacacuguguuggagaagaacguaaccgugacacauuccgucaauuuacuggaagauagacacaacgggaaacuaugccuccugaagggaauagcgccccuucagcuggguaauuguucuguggccggcuggaucuuggggaacccugagugcgaacuccugauuucaaaagagaguuggagcuacaucguugaaaccccaaauccggagaacggaacuuguuaucccggcuacuuugcugacuaugaggaacugagggagcaacucuccucugugucgucauucgaacgguuugagauuuucccuaaggagagcaguuggccaaaucauacagucaccgguguguccgccucuugcagccacaacgggaaguccucauuuuaccgcaauuuacuguggcuuacgggaaagaacggcuuguaucccaaucugaguaagagcuacgcaaacaauaaagaaaaggagguacuuguucucuggggcgugcaucacccuccaaacaucggggaucagcgagcccuguaccacacugaaaacgcuuaugucucugugguguccucacauuacagccguagauucacccccgagauagcaaaaaggccuaagguccgggaccaggaaggacgcaucaauuauuacuggacacuucuggagccaggugauacuauuaucuuugaggccaacggcaauuugauugcuccgagauucgccuuugcgcucaguaggggguucggaucuggcaucauaaccuccaacgcacccauggacaagugugaugccaaaugccagacaccucaaggugcuauuaauagcucgcugccauuucagaacguucaccccgugaccaucggggaauguccuaaguauguacggucugccaaauuacgcauggugacgggacugcgaaauauuccauccauccagucaagaggccucuucggcgcaaucgcuggguuuauugagggagguuggacuggcaugauagacgggugguacggauaucaucaccagaacgaacaaggcagugguuacgccgcggaucagaaaagcacacagaaugccaucaacgggauuaccaauaaagucaacuccgugaucgagaagaugaauacucaguucacagcaguuggcaaagaguucaacaagcuagaaaggcggauggagaaucugaacaagaaaguggacgauggauuuuuggacauauggaccuacaacgcugaacuacugguccuccuggagaaugaacguacgcuugacuuccacgauucuaacgugaagaaucuguaugagaaaguaaagagccaauugaaaaacaaugccaaggaaauuggcaacgggugcuuugaguucuaccauaaguguaaugacgagugcauggaaucaguuaaaaacggaaccuaugauuaccccaaguauagugaggaauccaaacucaaucgcgagaagaucgacggugugaaacuggagagcaugggcgucuaccagaucuuagcuauuuauucuacaguggccucaagucugguccuacucgugagccugggggcaaucuccuuuuggaugugcucuaacggaucgcuucaguguagaauuugcauauga

SEQ ID NO: 130310 - RNA, 1698 nt, Artificial Sequence
  derived and/or modified CDS sequence (opt3) from hemagglutinin__InfluenzaA__ABY51171
augaaggugaaacugcucguccuucugugcaccuucacagccacuuacgcugacacgaucuguauuggcuaucacgcaaacaauagcaccgauacaguugacacuguguuggagaagaacguaaccgugacacauuccgucaauuuacuggaagauucucacaacgggaaacuaugccuccugaagggaauagcgccccuucagcuggguaauuguucaguggccggcuggaucuuggggaacccugagugcgaacuccugauuaguaaagagagcugguccuacaucguugaaaccccaaauccggagaacggaacuuguuaucccggcuacuuugcugacuaugaggaacugagagagcaacucucuucggugagcucauucgaaagguuugagauuuucccuaaggagaguuccuggccaaaucauacagucaccggugugucugccagcugcucccacaacgggaagucaaguuuuuaccggaauuuacuguggcuuacgggcaaaaacggauuguaucccaaucugagcaagucuuacgcaaacaauaaagaaaaggagguucuaguacucuggggcgugcaucacccuccaaacaucggggaucagcgcgcccuguaccacacugaaaacgcuuaugucuccguggugucaagccauuacagucgacguuucacccccgagauagcaaaaagaccuaaggucagggaccaggaaggacggaucaauuauuacuggacacuucuggagccaggugauacuauuaucuuugaggccaacggcaauuugauugcuccgcgcuucgccuuugcgcucucuagaggguucggauccggcaucauaaccagcaacgcacccaugggugaaugugacgccaagugccagacaccucaaggggcuauuaauucgucucugccauuucagaacguucaccccgugaccaucggagaguguccuaaauauguaagguccgccaaguuacggauggugacgggccugcgcaauauuccaucaauccagagucgaggccucuucggggcaaucgcuggauuuauugaagguggcuggacugggauggucgauggaugguacggcuaucaucaccagaacgagcaagguagcggguacgccgcggaccagaaauccacacagaaugccauaaacggcaucaccaauaaggugaacucuguuauugaaaagaugaauacucaguucacagcagugggaaaagaguucaacaaacuugagagaaggauggaaaaucugaacaagaaggucgaugacggcuuuuuggauaucuggaccuacaacgcugagcuacuggugcuccuggaaaaugagcggacgcuugacuuccacgacagcaacguuaaaaaucuguaugaaaagguaaaaucacaauugaagaacaaugccaaagagauagggaacggaugcuuugaguucuaccauaaguguaaugaugaaugcauggagagugugaagaacgguaccuaugacuaccagaaauauuccgaagagagcaagcucaaucgugagaaaauugauggcgucaagcuggaaucuauggggguguaccagaucuuagcuaucuauucaacagucgccaguagccuggugcuacucguuucccugggagcaauuucuuuuuggaugugcucgaacggcagccuucaaugucgcaucugcauuuga

SEQ ID NO: 130311 - RNA, 1698 nt, Artificial Sequence; identical to SEQ ID NO: 129958
  derived and/or modified CDS sequence (opt3) from hemagglutinin__InfluenzaA__ABY51182

SEQ ID NO: 130312 - RNA, 1698 nt, Artificial Sequence; identical to SEQ ID NO: 129978
  derived and/or modified CDS sequence (opt3) from hemagglutinin__InfluenzaA__ABY51193

SEQ ID NO: 130313 - RNA, 1698 nt, Artificial Sequence; identical to SEQ ID NO: 129962
  derived and/or modified CDS sequence (opt3) from hemagglutinin__InfluenzaA__ABY51237

SEQ ID NO: 130314 - RNA, 1698 nt, Artificial Sequence; identical to SEQ ID NO: 129978
  derived and/or modified CDS sequence (opt3) from hemagglutinin__InfluenzaA__ABY51248

SEQ ID NO: 130315 - RNA, 1698 nt, Artificial Sequence; identical to SEQ ID NO: 129958
  derived and/or modified CDS sequence (opt3) from hemagglutinin__InfluenzaA__ABY51259

SEQ ID NO: 130316 - RNA, 1701 nt, Artificial Sequence; identical to SEQ ID NO: 130035
  derived and/or modified CDS sequence (opt3) from hemagglutinin__InfluenzaA__ABY51270

SEQ ID NO: 130317 - RNA, 1707 nt, Artificial Sequence
  derived and/or modified CDS sequence (opt3) from hemagglutinin__InfluenzaA__ABY76282
auggagaagaucgugcugcuccuugccauugucagccugguuaaauccgaccagauaugcaucggcuaccacgcuaacaauucuaccgaacauguggauacaauuauggagaagaacguaacugugacgcacgcacaagacaucuuggaaaaagcccauaaugggagauuaugugaucuggacggagucaagccccuaauucucagggauugcucaguggcggguuggcugcuuggcaacccuaugugugacgaguuccugaauguuccagaauggaguuauaucguggagaaaaacaauccggcuaacgauuugugcuaccccgggaauuuuaacgacuaugaggaacucaagcaucugcugagccggauaaaucacuucgagaagauccagauuaucccuaaauccucuuggucggaucacgaagccucaagcggagucaguuccgcauguccauaccagggccgcucuagcuuuuuccgaaacgugguauggcucauuaagaaaaaugacgccuaucccaccaucaagcguuccuacaacaauacaaaccaggaggauuuacugguucuuugggguauacaccauccuaacgacgcugcagagcaaacuagauuguaucagaauccaaccacauacauuucaguggggaccaguacucugaaccagaggcuaguccccaaaaucgccacacggagcaaggugaauggacagucuggccgcauggaauuuuucuggaccauucucaagccuaacgaugcuaucaauuuugaguccaacggcaauuucaucgccccagaaaacgcguacaaaauugugaagaaaggggacucaacgauaaugaaaagcgagcuggaauauggaaauugcaacacuaagugucaaaccccgaucggugcaauuaauaguucuaugcccuuucacaacauccauccucuuacaauaggcgagugcccaaaguacgucaaauccaauagacugguuuuggccacugggcucaggaacagcccccagggagagcggcgccgaaagaagagaggccuguucggugcuauugccggguuuaucgaaggaggcuggcagggcaugguggacgggugguauggauaccaccacucgaaugagcaggguucuggcuaugcagcugauaaagaauccacccaaaaggccaucgacgggguaacaaacaaagugaacucaauuaucgauaagaugaauacccaguucgaggcggucggaagggaauuuaacaauuuagagcggcguauugagaaccugaauaaaaagauggaagacggcuuccucgauguguggacguacaacgccgagcuucugguuuugauggaaaaugagcgcacucuagacuuccaugauaguaacgugaagaaucuguaugacaaagucagacuccagcugagggauaacgcaaaggaacuugguaauggguguuuugaguucuaccaccggugcgacaacgaguguauggaaagcgugcgaaauggcacauacgauuauccucaauacuccgaggaagcucgccugaaaagagaggagauaucuggaguaaaguuggaaagcaucggcaccuaucagauucucucaaucuacaguacuguugccuccagccuggcuuuagccaucaugguggcagggcugucucuauggaugugcucaaacggaagucuccagugcaggauuuguauauga

SEQ ID NO: 130318 - RNA, 1701 nt, Artificial Sequence
  derived and/or modified CDS sequence (opt3) from hemagglutinin__InfluenzaA__ABY81349
augaaggccaaacugcucgugcuucugugcgcuuugagcgcaaccgacgccgauacaaucuguauuggcuaccacgcgaacaauuccacugacacggucgauaccguuuuagagaagaacgugacaguaacucauucugugaaucugcuagaagacucacacaacgggaaacucugcagacugaagggaauagcuccccuucagcuggguaaauguaguaucgccggcuggauuuuggggaauccugagugcgaaagccucuucuccaagaagucuuggucguauaucgcagagaccccaaacucagaaaauggaacauguuacccgggcuauuuugccgauuacgaggagcugagggaacaacugagcagugucuccucuuucgagcgguuugaaauuuuccccaaagagcgcagcuggccuaagcauaacgugacccgagguguuacugcugcaugcucccacaaagggaagucaaguuuuuaucguaaucucuuauggcugacagagaaaaacggaagcuacccaaaucuuucuaaguccuaugugaacaauaaggaaaaagaggucuuggugcuguggggcguacaucaccccucaaacaucaaggaccagaaaaccauauaccagaaggaaaaugccuacguuagcguggucaguucuaacuauaacagaagguucacgccugagaucgcuaaacggccaaaggugcgcgaucaggaaggcagaauuaauuacuauuggacucuacucgagcccggggacaccaucauuuuugaggccaacggaaaucugaucgcgccuugguacgcauucgcccuuuccagggguuuuggcagcgggauaauuacaucgaacgcuucuauggaugaaugugacacuaaaugccaaaccccacagggagccaucaauuccucacugccguuccagaacgugcaccccgucacaauuggcgaguguccuaaguauguucggaguaccaaguugcgcauggugacgggucuccgaaauaucccaagcauccaguccagagggcuguuuggagcaauugcuggcuucauagaaggcggguggacuggaaugaucgaugguugguacggcuaucaucaccaaaacgagcaggggucuggauacgccgcggaccagaaaagcacacagaaugccauuaacggcaucaccaauaagguaaacucagugauagaaaagaugaauacucaauuuacagcagucgguaaagaguucaacaaauuagagaagaggauggaaaaucugaacaagaaaguggaugacggguuccucgacauuuggaccuacaacgcugagcuucugguuuugcuagaaaaugagcggacgcuggauuuucaugacaguaacgugaagaaucucuaugaaaaagucaagucccagcugaaaaacaaugccaaggaggugggcaacggaugcuucgaguuuuaccacaaguguaauaacgaaugcauggagagcguuaaaaauggcaccuaugauuaccccaaguauucugaagagucaaaacuuaaccgugagaagaucgacgggguaaaacuggaaaguaugggaguguaccagaucuuggcuauuuauagcacagucgccuccucucucgugcuguuagucucgcugggugcaaucagcuucuggaugugcuccaauggcucacuacaaugucgcauuugcauauga

SEQ ID NO: 130319 - RNA, 1701 nt, Artificial Sequence; identical to SEQ ID NO: 129976
  derived and/or modified CDS sequence (opt3) from hemagglutinin__InfluenzaA__ABY81371

SEQ ID NO: 130320 - RNA, 1698 nt, Artificial Sequence; identical to SEQ ID NO: 129962
  derived and/or modified CDS sequence (opt3) from hemagglutinin__InfluenzaA__ABY81382

SEQ ID NO: 130321 - RNA, 1698 nt, Artificial Sequence; identical to SEQ ID NO: 130004
  derived and/or modified CDS sequence (opt3) from hemagglutinin__InfluenzaA__ABY81393

SEQ ID NO: 130322 - RNA, 1698 nt, Artificial Sequence
  derived and/or modified CDS sequence (opt3) from hemagglutinin__InfluenzaA__ABY81415
augaaggugaaacugcucguccuucugugcaccuucacagccacuuacgcugacacgaucuguauuggcuaucacgcaaacaauagcaccgauacaguugacacuguguuggagaagaacguaaccgugacacauuccgucaauuuacuggaagauucucacaacgggaaacuaugccuccugaagggaauagcgccccuucagcuggguaauuguucaguggccggcuggaucuuggggaacccugagugcgaacuccugauuaguaaagagagcugguccuacaucguugaaaccccaucuccggagaauggaacuuguuaucccggcuacuuugcugacuaugaggaacugagagagcaacucucgucagugagcaguuucgaaagguuugagauuuucccuaaggaguccucuuggccaaaccauacagucaccggugugagcgccuccugcucacacaaugggaagaguagcuuuuaccggaacuuacuguggcuuacgggcaaaaauggauuguaucccaaccugucuaaguccuacgcaaauaacaaagaaaaggagguucuaguacucuggggcgugcaucacccuccaaauaucggggaucagcgcgcccuguaccacacugaaaacgcuuaugucucaguggugagcagucauuacucucgacguuucacccccgagauagcaaaaagaccuaaggucagggaccaggaaggacggaucaacuauuacuggacacuucuggagccaggugauacuauuaucuuugaggccaauggcaacuugauugcuccgcgcuucgccuuugcgcucuccagaggguucggaagcggcaucauaaccucgaaugcacccaugggugaaugugacgccaagugccagacaccucaaggggcuauuaacucuucccugccauuucagaauguucaccccgugaccaucggagaguguccuaaauauguaaggucagccaaguuacggauggugacgggccugcgcaacauuccaaguauccagagccgaggccucuucggggcaaucgcuggauuuauugaagguggcuggacugggauggucgauggaugguacggcuaucaucaccagaaugagcaagguuccggguacgccgcggaccagaaaucuacacagaacgccauaaauggcaucaccaacaaggugaauagcguuauugaaaagaugaacacucaguucacagcagugggaaaagaguucaauaaacuugagagaaggauggaaaaccugaauaagaaggucgaugacggcuuuuuggauaucuggaccuacaacgcugagcuacuggugcuccuggaaaacgagcggacgcuugacuuccacgacucaaauguuaaaaaccuguaugaaaagguaaaaagucaauugaagaauaacgccaaagagauagggaauggaugcuuugaguucuaccauaaguguaacgaugaaugcauggaguccgugaagaaugguaccuaugacuaccccaaauauagcgaagagucuaagcucaaccgugagaaaauugauggcgucaagcuggaaucaauggggguguaccagaucuuagcuaucuauaguacagucgccagcucccuggugcuacucguuucucugggagcaauuucguuuuggaugugcagcaauggcucccuucagugucgcaucugcauuuga

SEQ ID NO: 130323 - RNA, 1701 nt, Artificial Sequence; identical to SEQ ID NO: 129976
  derived and/or modified CDS sequence (opt3) from hemagglutinin__InfluenzaA__ACA24502

SEQ ID NO: 130324 - RNA, 1698 nt, Artificial Sequence
  derived and/or modified CDS sequence (opt3) from hemagglutinin__InfluenzaA__ACA24513
augaaggugaaacugcucauccuucugugcaccuucacagccacuuacgcugacacgauuuguauaggcuaucacgcaaacaauagcaccgauacagucgacacuguuuuggagaagaacgugaccguaacacauuccgugaauuuacuggaagauucucacaacgggaaacuaugccuccugaagggaaucgcgccccuucagcuggguaauuguucagucgccggcuggauuuuggggaacccugagugcgaacuccugaucaguaaagagagcugguccuacauuguggaaaccccaaauccggagaacggaacuuguuaucccggcuacuuugcugacuaugaggaacugagagagcaacucaauucuguuucgucauucgaaagguuugagaucuucccuaaggagagcaguuggccaaaccauacagugaccggugucuccgccucuugcagccacaaugggaaguccucauuuuaccggaacuuacuguggcuuacgggcaaaaauggauuguaucccaaccugaguaagagcuacgcaaauaacaaagaaaaggaggugcuaguacucuggggcguucaucacccuccaaacauaggggaucagcgcgcccuguaccacacugaaaaugcuuaugugucugucguguccucacauuacagccgacguuucacccccgagaucgcaaaaagaccuaaggugagggaccaggaaggacggauuaacuauuacuggacacuucuggagccacgcgauacuaucauuuuugaggccaaugguaacuugaucgcuccgagauucgccuuugcgcucaguaggggcuucgggucuggaauaauuaccuccaaugcacccauggacgaaugugaugccaagugccagacaccucaaggcgcuaucaacagcucgcugccauuucagaauguccaccccguuaccauuggugaguguccuaaauaugugcggucuacgaaguuacgcaugguaacugggcugcgaaacaucccauccauccagucaagaggacucuucggcgccauugcaggcuuuauagaagggggauggacagguaugguggacggcugguacggguaucaucaccagaaugagcaaggaaguggcuacgcugccgaucagaaaagcacccagaacgcgaucaaugguauuacuaacaaggucaauuccgugaucgaaaagaugaacacacaguucaccgccguugggaaagaguucaauaaacuugagaggcggauggaaaaccugaacaagaagguggacgauggcuuuuuggacauauggacguacaaugcagagcuacugguccuccuggaaaacgagcguacccuugacuuccacgauucuaaugugaaaaaccuguaugaaaagguaaaaagccaauugaagaauaacgcuaaagagauuggaaauggcugcuuugaguucuaccauaaguguaacgacgaaugcauggagucaguuaagaaugggacauaugauuaccccaaauauagugaagaguccaagcucaaccgcgagaaaaucgacggagugaagcuggaaagcaugggugucuaccagaucuuagccauuuauucuacuguggcuucaagucugguccuacucgugagccugggcgccaucuccuuuuggaugugcucuaaugggucgcuucaguguagaauuugcauauga

SEQ ID NO: 130325 - RNA, 1698 nt, Artificial Sequence; identical to SEQ ID NO: 129962
  derived and/or modified CDS sequence (opt3) from hemagglutinin__InfluenzaA__ACA24524

SEQ ID NO: 130326 - RNA, 1701 nt, Artificial Sequence
  derived and/or modified CDS sequence (opt3) from hemagglutinin__InfluenzaA__ACA24689
augaagaccaucauugcccugagcuacauacucugccuuguguucgcucagaaacugcccggcaucgacaacuccacagcaacuuuguguuuagggcaccaugccgucccuaauggaacgauuguuaagaccaucacaaacgaucaaauugaggugacuaaugcgaccgaacugguacagaacucuucaacagguggcaucugcgacaguccacaccagauaaucgauggggagaauuguacccuaauugacgcucuccugggagauccgcagugcgacggcuuucaaaacaaaaagugggaucuuuucguggaaagaagcaaagccuauuccaauuguuaccccuaugacgucccugauuacgcaucucugaggucguugguggccucaagcgguacucucgaguuuaacaaugaaaguuucaacuggacagggguuacccagaauggaacguccucugcuugcaagcggggcagcaacaauuccuuuuucucacgccugaacuggcugacucauaguaaguuuaaauauccagcacucaaugugaccaugcccaacaacgaggaguucgacaaguuauacaucuggggcguccaccauccugggacagauaaugaccagauuuuucuguaugcccaggcuagcggacgaaucacugugucuaccaaacguucccaacagacaguaauaccaaacauugguucaagacccaggguucggaauaucccuagccgcauuaguaucuacuggaccaucgugaagccaggcgauauucuuuugauaaacucuacggggaaucugaucgccccgagaggauacuucaaaauuagguccggcaagagcucgaucaugcggucugacgcgcccauagguaaguguaacuccgaaugcauuacuccuaaugggucaaucccaaacgacaaacccuuucagaaugucaaccgcaucacauauggagcauguccucgauacgugaagcagaauacccuaaaacucgccacuggcaugagaaacgugccagagaagcaaacaaggggcauuuucggggcuaucgccggauuuauugaaaaugguugggagggcauggucgaugggugguauggauuccggcaccagaacagugagggcauaggucaggcagcugaccugaaaagcacccaagccgcgaucgaucagauuaaugggaaacuuaaccgucugaucggcaagacgaacgaaaaguuccaccagaucgagaaggaauuuuccgagguugaaggacgcauucaggacuuggagaaauacguggaggauaccaagauagaccucuggucuuauaaugccgaacuguuaguagcacuggagaaccaacauacaaucgaucucacugacagcgaaaugaauaaacuuuucgagaagaccaaaaagcagcugagagaaaacgcugaggauaugggcaaugggugcuuuaagauuuaccacaaaugugacaacgccugcaucggaucaauuaggaaugguacauaugaucauuacguguaccgggacgaggcuuugaacaaucgauuccagaucaagggcauagaacuaaaaaguggguauaaggacuggauccuguggauuuccuuugccaucagcugcuuccuccugugugucgcacuucugggauuuauuaugugggccugccagaaaggcaacauccgcuguaauauaugcauuuga

SEQ ID NO: 130327 - RNA, 1701 nt, Artificial Sequence
  derived and/or modified CDS sequence (opt3) from hemagglutinin__InfluenzaA__ACA24700
augaagaccaucauugcccugagcuacauacucugccuuguguucgcucagaaacugcccggcaucgacaacuccacagcaacuuuguguuuagggcaccaugccgucccuaauggaacgauuguuaagaccaucacaaacgaucaaauugaggugacuaaugcgaccgaacugguacagaacucuucaacagguggcaucugcgacaguccacaccagauacuagauggggagaauuguacccucaucgacgcucugcuuggagauccgcagugcgacggcuuucaaaacaaaaagugggaucuguucguggaaagaagccaggccuauuccaauuguuaccccuaugacgucccugauuacgcaucuuugaggucgcucguggccucaagcgguacucuggaguuuaacaaugaaaguuucaacuggacagggguuacccagaauggaacguccucugcuugcaaacggggcagcaacaauuccuuuuucucacgccugaacuggcucacucauaguaaguuuaaguauccagcauuaaaugugaccaugcccaacaacgaggaguucgacaaacuguacauuuggggcguccaccauccugggacagauaaugaccagaucuuucuuuaugcccaagcuagcggacgaauuacugugucuaccaagcguucccagcagacaguaaucccaaacauagguucaagacccaggguucggaauauuccuagccgcaucaguauuuacuggaccaucgugaaaccaggcgauaucuugcugauuaacucuacggggaaucuaauagccccgagaggauacuucaagaucagguccggcaaaagcucgauuaugcggucugacgcgcccaucgguaaguguaacuccgaaugcauaacuccuaaugggucaauuccaaacgacaagcccuuucagaaugucaaccgcaucacauauggagcauguccucgauacgugaaacaaaauacccucaagcuggccacuggcaugagaaacgugccagagaaacagacaaggggcaucuucggggcuauugccggauuuaucgaaaaugguugggagggcauggucgaugggugguauggauuccggcaccagaacagugagggcauuggucaagcagcugaccuuaagagcacccaggccgcgauagaucagaucaaugggaaacugaaccguuugauuggcaagacgaacgaaaaauuccaccagaucgagaaggaauuuuccgagguugaaggacgcauccaagaccucgagaaguacguggaggauaccaaaauugaccuguggucuuauaaugccgaauuacugguagcacucgagaaccagcauacaauagaucuuacugacagcgaaaugaauaagcuguucgagaaaaccaagaaacaguugagagaaaacgcugaggauaugggcaaugggugcuuuaagaucuaccacaagugugacaacgccugcauuggaucaaucaggaaugguacauaugaucaugacguguaccgggacgaggcucuaaacaaucgauuccagauuaaaggcgucgaacugaagaguggguacaaagauuggauccucuggauauccuuugccaucagcugcuuccugcuuuguguggcacuguugggauuuauuaugugggccugccaaaagggcaacauccgcuguaauauuugcaucuga

SEQ ID NO: 130328 - RNA, 1698 nt, Artificial Sequence
  derived and/or modified CDS sequence (opt3) from hemagglutinin__InfluenzaA__ACA28846
augaaggugaaacugcucguccuucugugcaccuucacagccacuuacgcugacacgaucuguauuggcuaucacgcaaacaauagcaccgauacaguugacacuguguuggagaagaacguaaccgugacacauuccgucaauuuacuggaaaacucucacaaugggaaacuaugccuccugaagggaauagcgccccuucagcuggguaacuguucaguggccggcuggaucuuggggaauccugagugcgaacuccugauuaguaaagagagcugguccuacaucguugaaaagccaaacccggagaauggaaccuguuaucccggccauuuugcugauuacgaggaacugagagagcaacucucuucggugagcucauucgaaagguuugagauuuucccuaaggagaguuccuggccaaaccacacugucacaggugugucugccagcugcucccauaauggggaaucaaguuuuuaucggaacuuacuguggcuuaccggcaaaaauggauuguaccccaaccugagcaagucuuaugcaaauaacaaagagaaggaaguucuaguacucuggggcgugcaccacccuccaaacaucgggauacagaaagcccuguaccauacggagaaugcuuacgucuccguggugucaagccacuauagucgcaaguucacucccgaaaucgcaaagcgaccuaaaguccgugaccaggagggaagaauuaacuacuauuggacccuucuggagccaggugauacaaucauuuuugaagccaauggcaacuugaucgcuccgagguacgccuucgcgcucucucggggguuuggauccggcauaauuaauagcaacgcacccauggacaagugugaugccaaaugccagacuccucaaggugcuaucaauucgucucugccauuccagaacguucaucccgugaccauuggggaguguccuaaguauguacgcuccgccaaauuaagaauggugacaggacugaggaauaucccaucaauccagagucggggccucuuuggcgcaauugcuggguucauagaaggagguuggaccggcauggucgacgggugguacggauaucaccaccagaacgagcaaggcagcgguuacgccgcggaucagaaguccacgcagaaugccaucaacgggauuacuaauaaagugaacucuguuaucgaaaagaugaauacacaguuuaccgcagugggcaaggaguucaacaaacuugagcgccgaauggaaaaccugaauaagaaagucgacgauggauucauagacauuuggacuuacaacgcugaguugcuagugcugcucgaaaaugagagaacacuggauuuucaugacagcaacguaaagaaucuuuaugaaaaaguuaagucacaacugaagaacaaugccaaagagaucggcaacgggugcuucgaguuuuaccacaaguguaaugacgaaugcauggagagugugaaaaacggaaccuaugauuaccccaaguauuccgaagagagcaaauugaauagggagaagaucgacggugucaagcucgaaucuaugggcguguaccagauucuggcuaucuauucaacggucgccaguagcuuagugcugcuaguuucccucggggcaauuucuuucuggaugugcucgaacggaagccugcagugucggauaugcaucuga

SEQ ID NO: 130329 - RNA, 1701 nt, Artificial Sequence
  derived and/or modified CDS sequence (opt3) from hemagglutinin__InfluenzaA__ACA33749
augaagaccaucauugcccugagcuacauacucugccuuguguucgcucagaaacugcccggcaacgacaauuccacagcaacuuuguguuuagggcaccaugccgucccuaacggaacgaucguuaagaccauuacaaaugaucaaaucgaggugacuaacgcgaccgaacugguacagucuucaaguacaggugagauuugcgacagcccacaccagauccuagauggcgaaaauuguacccucauagacgcucugcuuggggauccgcagugcgacggauuucaaaacaaaaagugggaucuguucguggagagauccaaagccuauucuaauuguuaccccuaugacgucccugauuacgcaucguugaggucacucguggccagcaguggcacucuggaauuuaacaaugaguccuucaacuggacagguguuacccagaaugggacgucuagcuccugcauccggcgcucaaacaauagcuuuuucagccgacugaacuggcucacucauuuaaaguuuaaguauccagcucugaaugugaccaugcccaacaacgagaaauucgacaaacuuuacauuuggggaguccaccauccuggcacagauaaugaccagaucuuuuuguaugcacaggccucuggccguauuacuguguccaccaagagaucacaacagacaguaaucccaaacauagggagcaggccccggguucgcaauauuccuaguagaaucucuauuuacuggaccaucgugaagccaggagauauccugcuaauuaacuccacggguaaucucauagcuccgaggggcuacuucaaaauccggagcgggaagucgucuauuaugcgcuccgacgcccccaucggaaaguguaacucagaaugcauaacuccuaauggcaguauuccaaacgacaaacccuuucagaaugucaaccgaaucacauauggugcguguccuagauacgugaagcagaauacccugaaacuugcaacugggaugaggaacgugccagagaagcaaacacggggaaucuucggcgccauugcuggcuuuaucgaaaaugggugggagggaauggucgaugguugguauggcuuccgucaccagaacagcgaggggauuggacaggccgcagaccugaaauccacccaagcugccauagaucagaucaauggcaaguugaaccgccucauugguaaaacgaacgaaaaguuccaccagaucgagaaggaauuuucugagguugaagggagaauccaggaccuggagaaauacguggaggauaccaagauugacuuauggagcuauaaugcggaacugcucguagcccuugagaaccaacauacaauagaucugacugacucagaaaugaauaaauuguucgagaagaccaaaaagcagcuaagggaaaacgcagaggauaugggcaauggaugcuuuaagaucuaccacaaaugugacaacgcuugcauuggcaguauccggaaugggacauaugaucaugacguguaccgagacgaggcccugaacaaucgcuuccagauuaagggagucgaacucaaauccgguuacaaggauuggauccuguggauaaguuuugcuaucucuugcuuccuucuguguguggccuugcucggcuuuauuaugugggcaugccagaaagggaacaucagauguaauauuugcaucuga

SEQ ID NO: 130330 - RNA, 1698 nt, Artificial Sequence; identical to SEQ ID NO: 129958
  derived and/or modified CDS sequence (opt3) from hemagglutinin__InfluenzaA__ACA96519

SEQ ID NO: 130331 - RNA, 1659 nt, Artificial Sequence
  derived and/or modified CDS sequence (opt3) from hemagglutinin__InfluenzaA__ACC55270
augaacacccagauccuggccuucauugcuugcgugcucacaggcgucaagggggacaaaauaugucuuggacaccaugcaguugccaaugguacuaaggugaacacgcugaccgagagaggcaucgaaguagugaaugcgacagagacugucgaaaccacaaacauuaaaaagaucugcacccaagggaaaagacccacugauuugggacaguguggcuuacuggguacacuaauugggccuccacagugcgaccaguuucucgaguucagcuccgaucugaucauagaacggcgcgagggaaccgacaucuguuacccgggccgauuuacgaaugaggaaucucuucgucaaauucugagaaggucaggcgggaucggaaaggagaguauggguuucacuuauagcggcauucggaccaacggggcuacauccgccugcacucgcucuggaucgucauuuuacgcagaaaugaagugguugcucagcaauagugauaacgccgcuuucccccagaugaccaaagcauauagaaauccuaggaacaagccagcccugaucauauggggcgugcaccauuccgagucuguuagcgagcagacaaaacuguacgguuccgggaauaagcucauuaccgugcggucaaguaaauaucagcagagcuuuacgcccaacccuggagcucgccgaaucgacuuccacugguuacugcuugauccaaaugacacugucacauuuaccuucaacggcgccuuuauugcgcccgauagaacuucuuucuuuaggggcgaauccuugggggugcaaucagacgcaccucuggauagcaguugucggggagacugcuuccauucugguggcacaaucguauccagccuaccauuccagaauaucaacucgcguaccguugggaaguguccgcgcuacgugaagcagaaaucucuccugcuugccacgggaaugagaaacguccccgagaagccuaaaccaaggggccuguuuggugcuauugccggguucauagaaaauggcugggagggauugaucaacggcugguauggguuucggcaccaaaaugcacagggagaagguaccgcugccgauuacaaguccacacagucagcgauugaccaaaucacuggcaaacucaaccgacugauagggaagaccaaucagcaguucgaguuaauugacaacgaguuuaaugaaaucgagcagcaaaucggaaacgugauuaauuggacacgcgaugccaugacugaaaucuggaguuacaacgcagagcugcucguggcuauggaaaaucagcacaccauugaccuugccgauagcgagauguccaaacuguaugagagagucaagaagcaguugagggaaaacgcugaggaagacggcacagguugcuucgagauauuucauaaaugugaugaccagugcauggaaucuauccggaauaacaccuacgaucacacucaauaucgcacggagagccuacagaauaggauucagaucgaccccguuaagcugucaaguggguacaaagauaucauucucugguucuccuuuggcgccagcugcuuccugcuucuggcaauagccaugggauugguguuuaucuguauuaagaacggcaacaugcagugcacaaucuguauuuga

SEQ ID NO: 130332 - RNA, 1698 nt, Artificial Sequence; identical to SEQ ID NO: 129962
  derived and/or modified CDS sequence (opt3) from hemagglutinin__InfluenzaA__ACC61964

SEQ ID NO: 130333 - RNA, 1698 nt, Artificial Sequence
  derived and/or modified CDS sequence (opt3) from hemagglutinin__InfluenzaA__ACC61975
augaaggugaaacugcucguccuucugugcaccuucacagccagcuacgcugacacuaucuguauuggcuaucacgcaaacaauuccacggauaccguugacacaguguuggagaagaacguaacugugacccauucugucaauuuacuggaagauucacacaacgggaaacuaugccuccugaagggaauagcgccccuucagcuggguaauuguaguguggccggcuggaucuuggggaacccugagugcgaacuccugauuagcaaagaguccuggucuuacaucguugaagugccaaauccggagaacggaacauguuaucccggcuacuuugcugacuaugaggaacugagagagcaacucucgucaauuagcaguuucgaaagguuugagaucuucccuaaggaguccucuuggccaaaucauaccgucacuggugugagcgccuccugcucacacaacgggaagaguagcuuuuaccggaauuuacuguggcuuacaggcaaaaacggauuguaucccaaucugucuaaguccuacgcaaacaauaaagaaaaggagguucuaguacucuggggcgugcaucacccuccaaacauaggggaucagcgcgcccuguaccacaccgaaaacgcuuaugucucaguggugagcagucauuacucucgacguuucacgcccgagaucgcaaaaagaccuaaggucagggaccaggaaggacggauuaauuauuacuggacucuucuggagccaggugauaccaucauuuuugaggccaacggcaauuugaucgcuccgcgcuucgccuuugcgcucuccagagggcugggaagcggcauaauuacaucgaacgcacccauggacgaaugugaugccaagugccagacuccucaaggugcuaucaauucuuccuuaccauuccagaacguucaccccgugaccauuggggaguguccuaaauauguaaggucagccaagcugcggauggugacaggacuccgcaauaucccaaguauccagagccgaggccuuuuuggcgcaauugcuggguucauagaaggagguuggaccggcauggucgacgggugguacggauaucaucaccagaacgagcaaggcuccgguuacgccgcggaucagaaaucuacgcagaaugccaucaacgggauuacuaauaaggugaacagcguuaucgaaaagaugaauacacaguuuaccgcagugggcaaagaguucaacaaacuggagagaaggauggaaaauuugaacaagaaggucgacgauggauuccuagacauauggacuuacaacgcugagcugcucgugcugcuugaaaaugagcggacacuggacuuucacgauucaaacguuaaaaauuuguaugaaaagguaaaaagucaacucaagaacaaugccaaagagauuggcaacgggugcuucgaguuuuaccauaaguguaauaacgaaugcauggaguccgugaagaauggaaccuaugacuaccccaaauauagcgaagagucuaagcugaaccgugagaaaaucgauggugucaaguuagaaucaaugggcguguaccagauccuggcuauuuauaguacggucgccagcucccuagugcuccugguuucucuuggggcaaucucguucuggaugugcagcaauggauccuugcagugucgcauuugcauauga

SEQ ID NO: 130334 - RNA, 1698 nt, Artificial Sequence; identical to SEQ ID NO: 129958
  derived and/or modified CDS sequence (opt3) from hemagglutinin__InfluenzaA__ACC61986

SEQ ID NO: 130335 - RNA, 1698 nt, Artificial Sequence
  derived and/or modified CDS sequence (opt3) from hemagglutinin__InfluenzaA__ACD37430
augaaggccaaacugcucgugcuucugugcaccuucacagcuacuuacgcagacacgaucuguauuggcuaucacgccaacaauagcaccgauacagucgacacuguuuuggagaagaacgugaccguaacacauuccgugaauuuacuggaagauucucacaacgggaaacuaugccuccugaagggaauagcgccccuucagcuggguaauuguucagucgcuggcuggaucuuggggaacccugagugcgaacuccugauuaguaaagagagcugguccuacaucguggaaaccccaaauccggagaacggaacuuguuaucccggcuacuuugccgacuaugaggaacugagagagcaacucucuucgguuagcucauucgaaagguuugagauuuucccuaaggagaguuccuggccaacacauaccgugacgggugucucugcaagcugcucccacaaugggaagucaaguuuuuaccggaacuuacuguggcuuacuggcaaaaauggauuguaucccaaccugagcaagucuuacgugaauaacaaagaaaaggaggugcuaguucucuggggcgugcaucacccuccaaauaucggggaucagcgcgcccuguaccacaccgaaaacgcuuaugucuccguggugucaagccauuacagucgacguuucacacccgagauagcaaaaagaccuaaggucagggaccaggaaggacggaucaacuauuacuggacucuucuggagccaggugauaccauuaucuuugaggccaauggcaacuugauugcuccgugguaugccuucgcgcucucucgcggguuuggauccggcaucauaacaagcaaugcacccauggacgaaugugaugccaagugccagaccccucaaggugcuauuaacucgucucugccauuccagaauguucaccccgugacgaucggggaguguccuaaauacguaagauccgccaaguuaaggauggugacuggacugcggaacauuccaucaauccagagucgcggccucuuuggcgcaaucgcuggguucauugaaggagguuggacaggcauggucgacgggugguauggauaccaucaccagaaugagcaaggcagcgguuacgccgcggaucagaaauccacccagaacgccauaaaugggaucacuaacaagguaaauucuguuauugaaaagaugaacacacaguuuaccgcagugggcaaagaguucaauaaacuugagcgaagaauggaaaaccugaauaagaaggucgacgauggauucuuggacaucuggacguauaacgcugagcuacuggugcuccuggaaaacgagaggacccuugacuuucacgauagcaauguuaaaaaccuguacgaaaagguaaaaucacaauugaagaauaacgccaaagagauaggcaaugggugcuucgaguuuuaucauaaguguaacaaugaaugcauggagagugugaagaacggaacauacgacuaucccaaauacuccgaagagagcaagcucaaucgggagaaaauugauggugucaagcuggaaucuaugggcguguaucagaucuuagcuaucuacucaacugucgccaguagccuggugcuacucguuucccugggggcaauuucuuucuggaugugcucgaacggaagccuucagugucguaucugcauuuga

SEQ ID NO: 130336 - RNA, 1698 nt, Artificial Sequence
  derived and/or modified CDS sequence (opt3) from hemagglutinin__InfluenzaA__ACD37507
augaaggccaaacugcucgugcuucugugcaccuucgcugcaacauacgccgacacuaucuguauuggcuaucacgcgaacaauagcacggauaccgucgacacaguuuuggagaagaacgugacuguaacccauuccgugaauuuacuggaaaacucucacaaugggaaacuaugccuccugaagggaauagcuccccuucagcuggguaacuguucagucgccggcuggaucuuggggaauccugagugcgaacuccugauuaguaaagagagcugguccuacaucguggaaaagccaaacccggagaauggaacauguuaucccggccauuuugcagauuacgaggaacugagagagcaacucucuucgguuagcucauucgaaagguuugagauuuucccuaaggagaguuccuggccaaaccacaccgugacuggugucucugccagcugcucccauaauggggaaucaaguuuuuaucggaacuuacuguggcuuacaggcaaaaauggauuguaccccaaccugagcaagucuuaugcuaauaacaaagagaaggaagugcuaguacucuggggcguucaccacccuccaaacaucgggaaucagaaagcacuguaccauaccgagaacgccuacguguccgucgugucaagccacuauagucgcaaguucacgcccgaaauagcuaagcgaccuaaagugcgugaccaggagggaagaaucaauuacuauuggacucuucuggagccaggugauaccauuaucuuugaagccaacggcaauuugauugcgccgagguacgcauucgcccucucucggggguuuggauccggcaucauaaacagcaaugcucccauggacaagugugaugccaaaugccagacaccucaaggugcaauuaacucgucucugccauuccagaauguccaucccguuacuaucggggaguguccuaaguaugugcgcuccgcuaaauuaagaaugguaaccggacugaggaacauuccaucaauccagagucggggccucuuuggcgccaucgcgggguucauugaaggagguuggacaggcaugguggacgggugguacggauaucaccaccagaaugagcaaggcagcgguuacgccgcagaucagaaguccacccagaacgcuauaaaugggaucacgaacaaagucaauucugugauugaaaagaugaacacucaguuuacagccguuggcaaggaguucaacaaacuugagcgccgaauggaaaaucugaacaagaaaguggacgauggauucaucgacauauggaccuacaaugcugaguugcuaguccugcucgaaaacgagagaacucuggauuuucaugacagcaaugugaagaaccuuuaugaaaaaguaaagucacaacugaagaauaacgccaaagagauuggcaaugggugcuucgaguuuuaccacaaguguaacgacgaaugcauggagaguguuaaaaauggaacauaugauuaccccaaguauuccgaagagagcaaauugaacagggagaagaucgacggugugaagcucgaaucuaugggcgucuaccagauccuggcaauuuauucaaccguggccaguagcuuaguccugcuagugucccucggggcuaucucuuucuggaugugcucgaauggaagccugcagugucggauuugcauauga

SEQ ID NO: 130337 - RNA, 1698 nt, Artificial Sequence; identical to SEQ ID NO: 130103
  derived and/or modified CDS sequence (opt3) from hemagglutinin__InfluenzaA__ACD56113

SEQ ID NO: 130338 - RNA, 1698 nt, Artificial Sequence; identical to SEQ ID NO: 129962
  derived and/or modified CDS sequence (opt3) from hemagglutinin__InfluenzaA__ACD56124

SEQ ID NO: 130339 - RNA, 1701 nt, Artificial Sequence; identical to SEQ ID NO: 130035
  derived and/or modified CDS sequence (opt3) from hemagglutinin__InfluenzaA__ACD56258

SEQ ID NO: 130340 - RNA, 1701 nt, Artificial Sequence; identical to SEQ ID NO: 129777
  derived and/or modified CDS sequence (opt3) from hemagglutinin__InfluenzaA__ACD56269

SEQ ID NO: 130341 - RNA, 1698 nt, Artificial Sequence
  derived and/or modified CDS sequence (opt3) from hemagglutinin__InfluenzaA__ACD56280
augaaggugaaacugcucauccuucugugcaccuucacagccacuuacgcugacacgauuuguauaggcuaucacgcaaacaauagcaccgauacagucgacacuguuuuggagaagaacgugaccguaacacauuccgugaauuuacuggaagauucucacaacgggaaacuaugccuccugaagggaaucgcgccccuucagcuggguaauuguucagucgccggcuggauuuuggggaacccugagugcgaacuccugaucaguaaagagagcugguccuacauuguggaaaccccaaauccgggaaacggcacuuguuaucccgguuacuuugcugacuaugaggagcugagagaacaacucucuucgguuagcucauucgagagguuugaaaucuucccuaaggagaguuccuggccaaaucauacagugaccggggucucugccagcugcucccacaacggaaagucaaguuuuuaccggaauuuacuguggcuuacgggcaaaaacggcuuguaucccaaucugagcaagucuuacgcaaacaauaaagagaaggaagugcuaguacucuggggaguucaucacccuccaaacauaggggaucagcgcgcccuguaccacacugagaacgcuuauguguccgucgugucaagccauuacagucgacguuucacccccgaaaucgcaaaaagaccuaaggugagggaccaggagggucggauuaauuauuacuggacacuucuggaaccaggcgauacuaucauuuuugaggccaacgggaauuugaucgcuccgcgcuucgccuuugcgcucucuagaggauucggcuccgguauaauuaccagcaacgcacccauggacgagugugaagccaagugccagacaccucaaggggcuaucaauucgucucugccauuucagaacguccaccccguuaccauuggagaguguccuaaauaugugagguccacgaaguuacggaugguaacuggccugcgcaauaucccaucaauccagagucgaggccucuucggggccauugcaggauuuauagaagguggcuggacagggaugguggauggaugguacggcuaucaucaccagaacgagcaagguagcggguacgcugccgaccagaaauccacccagaaugcgaucaacggcauuacuaauaaggucaacucugugaucgaaaagaugaauacacaguucaccgccguuggaaaagaguucaacaaacuugagagaaggauggaaaaucugaacaagaagguggaugacggcuuuuuggauauauggacguacaacgcagagcuacugguccuccuggaaaaugagcggacccuugacuuccacgacagcaacgugaaaaaucuguaugaaaagguaaaaucacaauugaagaacaaugcuaaagagauugggaacggaugcuuugaguucuaccauaaguguaaugaugaaugcauggagaguguuaagaacgguacauaugacuaccccaaauauuccgaagagagcaagcucaaucgugagaaaaucgauggcgugaagcuggaaucuaugggggucuaccagaucuuagccauuuauucaacuguggcuaguagccugguccuacucgugucccugggagccaucucuuuuuggaugugcucgaacggcagccuucagugucgcauuugcauauga

SEQ ID NO: 130342 - RNA, 1689 nt, Artificial Sequence
  derived and/or modified CDS sequence (opt3) from hemagglutinin__InfluenzaA__ACD56324
auggccaucauuuaccugauacuccuuuucaccgcugugagaggcgaccagaucugcauuggguaucacgcaaacaauagcacagagaaggucgauacuauccuggaaaggaacguuacggugacccaugccaaaaauauuuuggagaagacacacaacggacgguuauguaaacugaaugguauacccccucuagaacucggcgacugcuccaucgcgggguggcugcuuggaaacccagagugugaucgccuguugcgaguaccggaauggucuuacaucauggagaaggagaauccccguaacggccucugcuauccugguucauuuaaugacuacgaagaacugaaacaucugcucaguagcgugaagcacuucgaaaaggucagaauuuuaccaaaagauagguggacucaacauaccacaaccggguccucucgggcuugugccgugucgggaaaccccucauuuuuccgcaauaugguuuggcugacuaagaaagagagcaacuauccuguggcaaagggcaguuacaauaacacauccggcgagcagaugcuuaucauuuggggaguccaccacccaaucgacgaaaccgagcagagaacguuguaucagaauguggggacuuacguaucuguugguaccagcacacugaacaaaagguccacucccgauauagccacccggccuaaggugaacggccuagggucacgcauggaauuuaguuggacacuccuggacaugugggauaccauuaauuucgagagcacgggaaaccuuaucgcuccagaauacggcuuuaagauuucuaaacgagguuccucagggaucaugaagacugagagaacacuggagaauugcgaaaccaaaugucaaacuccguugggagcaaucaacacaacccuccccuuccauaauguccacccucugacgauuggcgagugcccaaaguaugugaaaagcgaaaaguuagugcuggccaccggccucaggaacgucccccagauagagccucgggggcuuuuuggagcuaucgccgguuucauugaaggcggguggcagggaaugguugacggcugguacgguuaucaucacaguaaugaucaggggucuggcuacgcggcagacaaagaguccacacaaaaggccuuugauggaaucacuaacaaggugaauagcguaauagagaaaaugaacacccaguucgaagcugugggcaaggaguuuucgaaucuggaacgucgcuuggagaaccuaaauaaaaagauggaagacggguuccuggacgucuggacauauaacgccgagcuccuggugcuuauggagaaugaaagaacucuggauuuccacgacucuaacguuaaaaacuuguacgauaaggugaggaugcagcuccgggacaaugucaaggagcugggaaacgguuguuuugaguucuaucauaaaugcgaugacgaguguaugaacuccgugaagaauggcaccuacgauuacccaaaauaugaggaagagucaaaguuaaaucgaaacgaaauuaaagggguaaagcugaguagcaugggaguuuaccagauccuagcaaucuaugcuacaguggccggcucccucucucuggcgauuaugauggccgguaucagcuuuuggaugugcucaaaugggagucuucaaugccgcauuuguauauga

SEQ ID NO: 130343 - RNA, 1689 nt, Artificial Sequence
  derived and/or modified CDS sequence (opt3) from hemagglutinin__InfluenzaA__ACD85187
auggccaucauuuaccugauacuccuuuucaccgcugugagaggcgaccagaucugcauuggguaucacgcaaacaauagcacagagaaggucgauacuauccuggaaaggaacguuacggugacccaugccaaagacauuuuggagaagacacacaauggaaaauuauguaagcugaacgguauacccccucuagaacucggcgauugcuccaucgcgggguggcugcuuggaaauccagagugugaccggcuguugcgcguaccggaauggucuuacaucauggagaaagagaacccccgauauucacucugcuacccuggcaguuuuaaugauuaugaagaacugaagcaucugcucagcuccgugaagcacuucgaaaaagucaagauuuuaccaaaagaccguuggacucaacauaccacaaccggugggucuaaggcuugugccgugucgggaaaacccucauuuuucagaaacaugguuuggcugacuaagaagggcccuaauuacccaguggcaaaaggcagcuauaacaauacaaguggggagcagaugcuuaucauuuggggaguccaccaccccaaggaugaggccgaacagagggcuuuguaccaggagguggguaccuacguauccgcaucuacgagcacucugaacaaacgguccaccccugaaaucgccgcucgcccagagguuaauggccuagggucaagaauggaauuuaguuggacacuccuggacgugugggauacuauaaacuucgagagcaccggaaaucuugucgccccggaguauggcuuuaagauuucuaaaagggguuccucagggaucaugaagacagaaggaacccugggcaacugcgagacgaaaugucaaacucccuugggcgcgauuaacacaacccucccuuuccauaaugugcacccacugacuaucggggaaugccccaaguacgugaaaagcgagaaauuaguccuggcaacaggacuccggaacguuccucagaucgaaagucgcggucuuuuuggcgccauugcuggguucauagagggaggcuggcaggguaugguggacgggugguauggcuaccaucacucuaaugaucagggauccggcuaugccgcagacaaggagagcacccaaaaggcuuuugaugggaucacgaacaagguaaauucggugauugagaaaaugaacacccaguucgaggccgucggaaaggaauuuaauaaccuggagaagcgauuggaaaaucuaaacaaaaagauggaggacgguuuccuggacguguggacauacaaugcggagcuccugguucuuauggaaaacgagagaacucuggauuuccacgacucuaaugugaaaaacuuguaugauaaggucaggaugcagcuccgggacaaugugaaagaacugggcaacggguguuuugaguucuaccauaagugcgaugacgaguguaugaacuccguaaagaauggaaccuacgauuauccaaaauacgaagaggaaucaaaguuaaaccguaaugagaucaaaggcguuaagcugaguagcauggguguguaucagauacuagccauuuacgcaacagucgcugggucccucucucuggccaucaugauggcuggcaucagcuuuuggaugugcucaaacggaagucuucaaugccgcauuuguaucuga

SEQ ID NO: 130344 - RNA, 1689 nt, Artificial Sequence
  derived and/or modified CDS sequence (opt3) from hemagglutinin__InfluenzaA__ACD85198
auggccaucauuuaccugauacuccuuuucaccgcugugagaggcgaccagaucugcauuggguaucacgcaaacaauagcacagagaaggucgauacuauccuggaaaggaacguuacggugacccaugccaaagacauuuuggagaagacacacaauggaaaauuauguaagcugaacgguauacccccucuagaacucggcgauugcuccaucgcgggguggcugcuuggaaauccagagugugaccggcuguugcgcguaccggaauggucuuacaucauggagaaagagaacccccgauauucacucugcuacccuggcaguuuuaaugauuaugaggagcugaagcaucugcucagcuccgugaagcacuucgaaaaagucaagauuuuaccaaaagacgguuggacucaacauaccacaaccgggggaucuaaggcuugugccgugucgggcaaacccucauuuuuccguaacaugguuuggcugacuaagaagggcccuaauuacccaguggcaaaaagaagcuauaacaauacaaguggggagcagaugcuuaucauuuggggaguccaccaccccaccgaugaggccgaacagagggcuuuguaccaggagguggguacguacguauccgcaucuacuagcacccugaacaagcgguccacaccugaaaucgccgcucgcccagagguuaauggccuaagaucaaggauggaauuuaguuggacucuccuggacgugugggauaccauaaacuucgagagcacagggaaucuugucgccccggaguauggauuuaaaauuucuaagcggggcuccucagguaucaugaaaaccgaagggacgcugggaaacugcgagacuaagugucaaacacccuugggcgcgauuaacaccacucucccuuuccauaaugugcacccacugacaaucggcgaaugccccaaauacgucaagagcgagaaguuagugcuggcaaccgggcuccgcaacguuccucagaucgaaagucgaggacuuuuuggugccauugcuggcuucauagaagggggauggcagggcaugguggacgguugguauggguaccaucacucuaaugaucagggcuccggauaugccgcagacaaagagagcacgcaaaaggcuuuugauagaaucaccaacaaaguaaauucggugauugaaaagaugaacacacaguucgaggccgucggcaaagaauuuucuaaucuggagaagagguuggaaaaccuaaauaagaaaauggaggacggguuccuggacguguggacuuacaacgcggagcuccugguucuuauggaaaaugagcggacccugggauuccacgauuccaacgugaagaauuuguaugacaaaguccguaugcagcuccgcgauaacgugaaggaacuggguaauggcuguuuugaguucuaccauaaaugcgacgaugaguguaugaacucaguaaagaacgggacauacgacuauccaaaguacgaagaggaaaguaaauuaaagagaaaugagaucaaaggaguuaagcugagcuccaugggcguguaucagauacuagccauuuacgcaacugucgcugguucucucagccuggccaucaugauggcugggaucucauuuuggaugugcaguaacggcucccuucaaugcaggauuuguaucuga

SEQ ID NO: 130345 - RNA, 1689 nt, Artificial Sequence
  derived and/or modified CDS sequence (opt3) from hemagglutinin__InfluenzaA__ACD85209
auggccaucauuuaccugauacuccuuuucaccgcugugagaggcgaccagaucugcauuggguaucacgcaaacaauagcacagagaaggucgauacuauccuggaaaggaacguuacggugacccaugccaaagacauuuuggagaagacacacaauggaaaauuauguaagcugaacgguauacccccucuagaacucggcgauugcuccaucgcgggguggcugcuuggaaauccagagugugaccggcuguugucuguaccggaauggucauacaucauggagaaagagaacccccgcgauggccucugcuauccugguaguuuuaaugacuacgaggaacugaagcaucugcucagcuccgugaagcacuucgaaaaagucaagauuuuaccaaaagaucgauggacucaacauaccacaaccgggggaucucgugcuugugccgugucgggcaaccccucauuuuucagaaauaugguuuggcugacucagaagggcagcaacuauccuguggcaaaagggaguuacaauaacacauccggagagcagaugcuuaucauuugggguguccaccacccaaaugacgagaccgaacagaggacguuguaucaaaacgugggcacuuacguaucuguugggaccagcacacugaauaagcgguccacucccgauaucgccacccgcccuaaggugaacggacagggcgguagaauggaguuuucauggacacuacucgacaugugggauaccauaaacuucgaaaguacggggaaucugauugcuccagaguacggauuuaaaaucagcaagagggggucuuccggcauuaugaaaacugaaggcacacuugagaacugcgagaccaagugucagacuccgcugggagcaaucaauacaaccuugcccuuccauaacguccacccucucacgaucggugaaugcccaaaauaugugaagucagagaaacugguguuagccaccggccugcggaaugucccccagauugaaagccgcgggcucuuuggagcuauagccggcuucaucgaggguggguggcaaggcaugguugacggaugguacggcuaucaucacaguaacgaucaggggucuggauacgcggcagacaaggaauccacacagaaggccuuugacgguauuacuaauaaagugaacagcguaaucgagaagaugaauacccaguucgaggcugugggcaaagaauuuucgaaccuugagcgaagacuggaaaauuugaacaagaaaauggaggauggguuccuagacgucuggacauauaaugccgaacugcucgugcugauggagaacgagaggacucuugauuuccacgacucuaauguuaagaaccuguacgauaaggugcggaugcaauugcgugacaacgucaaagaacucggaaauggcuguuuugaguucuaucauaagugcgaugacgaauguaugaacuccgugaaaaaugguaccuacgauuacccuaaguaugaggaggaaucaaaacugaaccgcaaugagauaaaggggguaaaguuaaguagcaugggcguuuaccagauucuggcaaucuaugcuacaguggccggaucccuaucucucgcgaucaugauggccggcauuagcuuuuggaugugcucaaacgggagucugcagugcagaaucuguauuuga

SEQ ID NO: 130346 - RNA, 1689 nt, Artificial Sequence
  derived and/or modified CDS sequence (opt3) from hemagglutinin__InfluenzaA__ACD85220
auggccaucauuuaccugauacuccuuuucaccgcugugagaggcgaccagaucugcauuggguaucacgcaaacaauagcacagagaaggucgauacuauccuggaaaggaacguuacggugacccaugccaaagacauuuuggagaagacacacaauggaaaauuauguaagcugaacgguauacccccucuagaacucggcgauugcuccaucgcgggguggcugcuuggaaauccagagugugaccggcuguugcgcguaccggaauggucuuacaucauggagaaagagaaccccaaguauucacucugcuacccuggcaguuuuaaugauuaugaagaacugaagcaucugcucagcuccgugaaacacuucgaaaaggucaaaauuuuaccaaaggaccgauggacucaacauaccacaaccggugggucuaaggcuugugccgugucgggagagcccucauuuuuccguaacaugguuuggcugacuaagaagggcccuaauuacccaguggcaaaaggcagcuauaacaauacaaguggggagcagaugcuuaucauuuggggaguccaccaccccaaggaugaagccgagcagagagcuuuguaccagaacguggguaccuacguauccgcaucuacgagcacucugaauaaaagguccaccccugaaaucgccgcucggccagagguuaacggccuagggucacgcauggaauuuaguuggacacuccuggacgugugggauacuauaaauuucgagagcaccggaaaccuugucgccccggaguauggcuuuaagauuucuaaaagagguuccucagggaucaugaagacagaaggaacccugggcaacugcgagacgaaaugucaaacucccuugggcgcgauuaauacaacccucccuuuccauaacgugcacccacugacuaucggggaaugccccaaguacgugaaaagcgagaaauuaguccuggcaacaggacucaggaauguuccucagaucgaaagucggggucuuuuuggcgccauugcuggguucauagagggaggcuggcaggguaugguggacgggugguauggcuaccaucacucuaacgaucagggauccggcuaugccgcagacaaggagagcacccaaaaggcuuuugaugggaucacgaauaaaguaaacucggugauugagaaaaugaauacccaguucgaggccgucggaaaggaauuuaacaaucuggagaagcgcuuggaaaaccuaaauaaaaagauggaggacgguuuccuggacguguggacauacaacgcggagcuccugguucuuauggaaaaugagcgaacucuggauuuccacgacucuaacgugaaaaauuuguaugauaaggucagaaugcagcucagggacaacgugaaagaacugggcaacggguguuuugaguucuaccauaagugcgaugacgaguguaugaacuccguaaagaauggaaccuacgauuauccaaaauacgaaaaggagucaaaauuaaaucggaacgaaaucaagggcguuaaacugaguagcauggguguguaucagauacuagccauuuacgcaacagucgcugggucccucucucuggccaucaugauggcuggcaucagcuuuuggaugugcucaaauggaagucuucaaugccguauuuguaucuga

SEQ ID NO: 130347 - RNA, 1689 nt, Artificial Sequence
  derived and/or modified CDS sequence (opt3) from hemagglutinin__InfluenzaA__ACD85242
auggccaucauuuaccugauacuccuuuucgcuaccgugagaggcgaccagaucugcauuggguaucacgcaaacaauagcacagagaaggucgauacuauccuggaaaggaacguuacggugacccaugccaaagacauuuuggagaagacacacaauggaaaauuauguaagcugaacgguauacccccucuagaacucggcgauugcuccaucgcgggguggcugcuuggaaauccagagugugaccggcuguugcgcguaccggaauggucuuacaucauggagaaagagaacccccgauauucacucugcuacccuggcagucugaaugauuaugaagaacugaagcaucucuuaagcuccgugaagcacuuugaaaaaguccguauucugccaaaggacagauggacucaacauaccacaaccggugggucuaaggcuugugccgugucgggaaagcccucauucuuuaggaacaugguuuggcuuacuaaaaagggcccuaauuacccaguggcaaagggcagcuauaacaauacaaguggggagcagauguugaucauuuggggaguccaccaccccaaagaugaggccgaacagcgggcucuguaccaggagguggguaccuacguauccgcaucuacgagcacucuaaacaagcgcuccaucccugaaauagccgcuagaccagagguuaauggccucgggucaaggauggaguucaguuggacccugcuugacgugugggauacaauuaacuuugagagcacuggaaaucuggucgccccggaguauggcuucaaaaucucuaagcgggguuccucagggauuaugaaaaccgaaggaacauugggcaacugcgagaccaagugucaaacgccccucggcgcgaucaacacuacacugccuuuucauaaugugcacccauuaaccaucggggaaugccccaaauacgugaaaagcgagaagcugguccucgcaacuggacuucgcaacguuccucagauugaaagucgaggucuguucggcgccauagcuggguuuaucgagggaggcuggcaggguaugguggacgggugguauggcuaccaucacucuaaugaucagggauccggcuaugccgcagacaaagagagcacacaaaaggcuuucgaugggauuaccaacaaaguaaauucgaugaucgaaaagaugaacacgcaguuugaggccgugggaaaagaguucaauaacuuggaaaagagacuagaaaaucuggacaagaaaauggaggacgguuuucucgaugucuggaccuacaacgcggagcugcuugugcugauggaaaaugagaggacauuggacuuccacgauucuaacguuaagaaucucuaugaaaaagugcggaugcagcugcgugacaacgucaaggaguuaggcaauggguguuucgaguuuuaccauaaaugcgauaacgaauguaugaacuccgugaagaauggaacuuacgacuauccaaaguacgaggaagagucaaaacugaagcgcaacgaaauaaaaggcguaaagcuaaguagcauggguguuuaucagauucucgccaucuacgcaaccguggcugggucccugucucuugccaucauggucgcuggcauuagcuucuggaugugcucaaauggaaguuugcaaugcagaaucuguauuuga

SEQ ID NO: 130348 - RNA, 1689 nt, Artificial Sequence
  derived and/or modified CDS sequence (opt3) from hemagglutinin__InfluenzaA__ACD85253
auggccaucauuuaccugauacuccuuuucgcuaccgugagaggcgaccagaucugcauuggguaucacgcaaacaauagcacagagaaggucgauacuauccuggaaaggaacguuacggugacccaugccaaagacauuuuggagaagacacacaauggaaaauuauguaagcugaacgguauacccccucuagaacucggcgauugcuccaucgcgggguggcugcuuggaaauccagagugugaccggcuguugcgcguaccggaauggucuuacaucauggagaaagagaacccccgauauaaucucugcuacccuggcucacugaacgaauaugaggaacugaagcaucucuuaaguagcgugaagcacuuugagaaaguccguauucugccaaaggauagauggacucaacauaccacaaccgguggguccaaagccugugcugugucuggagagcccucguucuuuaggaauaugguuuggcuuacuaagaaaggcccuaacuacccaguggcaaagggcucauauaauaacacaagcggggaacagauguugaucauuuggggaguccaccaccccaaugacgaggccgaacagcgggcucuguaccagaagguggguaccuacguaagugcauccacgucuacucuaaacaaacgcagcaucccugagauagccgcuagaccaaagguuaauggccucggguccaggauggaguucuuuuggacccugcuugaugugugggacacaauuaacuucgaaucaacuggaaaccuggucgugccggaguauggcuuuaaaaucaguaagcgggguagcucugggauuaugaaaaccgaaggaacauugggcaauugcgagaccaagugucaaacgccccucggcgccaucaacacuacacugccuuuccauaaugugcacccauuaaccaucggggaaugccccaaauacgucaaguccgagaagcugguucucgcgacuggacuucgcaacgugccucagauugaaucacgaggucuguuuggcgcaauagccggguucaucgagggaggcuggcaggguaugguagaugggugguauggcuaccaucacagcaaugaccagggaaguggcuaugcugccgauaaagagucuacacaaaaggcauuugacgggauuaccaacaaagugaauagcgucaucgaaaagaugaacacgcaguucgagaccgugggaaaagaauuuaauaacuuggagaagagacuagaaaaucugaacaagaaaauggaggaugguuuccucgacguuuggacauacaaugcugagcugcuugugcugauggaaaacgagaggacuuuggacuuccacgauagcaaugucaagaaccucuaugaaaaagugcggaugcagcugcgugacaacguaaaggaguuaggcaauggguguuuugaguucuaccauaaaugcgaugacgaauguaugaacucgguuaagaauggaaccuacgauuauccaaaguacgaggaagagucuaaacugaagcgcaacgaaauaaaaggcgugaagcuauccucaaugggugucuaucagauucucgccaucuacgcgacaguggccgggagucugagccuugcaaucauggucgcuggcauuuccuuuuggaugugcucuaauggauccuugcaaugcagaaucuguauuuga

SEQ ID NO: 130349 - RNA, 1701 nt, Artificial Sequence
  derived and/or modified CDS sequence (opt3) from hemagglutinin__InfluenzaA__ACD85440
augaagaccaucauugcccugagcuacauacucugccuuguguucgcucagaaacugcccggcaacgacaauuccacagcaacuuuguguuuagggcaccaugccgucccuaacggaacgaucguuaagaccauuacaaaugaucaaaucgaggugacuaacgcgaccgaacugguacagucuucaaguacaggugagauuugcgacagcccacaccagauccuagauggcgaaaauuguacccucauagacgcucugcuuggggauccgcagugcgacggauuucaaaacaaaaagugggaucuguucguggagagauccaaagccuauucuaauuguuaccccuaugacgucccugauuacgcaucguugaggucacucguggccagcaguggcacucuggaauuuaacaaugaguccuucaacuggacagguguuacccagaaugggacgucuagcgcuugcauccggcgcuccaacaauucauuuuucagucgacugaacuggcucacucauuuaaaguuuaaguauccagcacugaaugugaccaugcccaacaacgagaaauucgacaaacuuuacauuuggggaguccaccauccuggcacagauaaugaccagaucuuuuuguaugcccaggcuagcggccguauuacugugucuaccaagagaucccaacagacaguaaucccaaacauagggucaaggccccggguucgcaauauuccuagcagaaucaguauuuacuggaccaucgugaagccaggagauauccugcuaauuaacucuacggguaaucucauagccccgaggggcuacuucaaaauccgguccggaaagagcucgauuaugcgcucugacgcgcccaucgggaaguguaacuccgaaugcauaacuccuaauggcucaauuccaaacgacaaacccuuucagaaugucaaccgaaucacauauggugcauguccuagauacgugaagcagaauacccugaaacuugccacugggaugaggaacgugccagagaagcaaacacggggaaucuucggcgcuauugccggcuuuaucgaaaaugggugggagggaauggucgaugguugguauggcuuccgucaccagaacagugaggggauuggacaggcagcugaccugaaaagcacccaagccgcgauagaucagaucaauggcaaguugaaccgccucauugguaaaacgaacgaaaaguuccaccagaucgagaaggaauuuuccgagguugaagggagaauccaggaccuggagaaauacguggaggauaccaagauugacuuauggucuuauaaugccgaacugcucguagcacuugagaaccaacauacaauagaucugacugacagcgaaaugaauaaauuguucgagaagaccaaaaagcagcuaagggaaaacgcugaggaucugggcaauggaugcuuuaagaucuaccacaaaugugacaacgccugcauuggcucaauccggaaugggacauaugaucaugacguguaccgagacgaggcucucaacaaucgcuuccagauuaagggagucgaacugaaaagugguuacaaggauuggauccuuuggauauccuuugccaucagcugcuuccuguuguguguggcacuccugggcuuuauuaugugggccugccagaaagggaacaucagauguaauauuugcaucuga

SEQ ID NO: 130350 - RNA, 1701 nt, Artificial Sequence; identical to SEQ ID NO: 130349
  derived and/or modified CDS sequence (opt3) from hemagglutinin__InfluenzaA__ACD85451

SEQ ID NO: 130351 - RNA, 1701 nt, Artificial Sequence; identical to SEQ ID NO: 130349
  derived and/or modified CDS sequence (opt3) from hemagglutinin__InfluenzaA__ACD85462

SEQ ID NO: 130352 - RNA, 1701 nt, Artificial Sequence; identical to SEQ ID NO: 129976
  derived and/or modified CDS sequence (opt3) from hemagglutinin__InfluenzaA__ACD85473

SEQ ID NO: 130353 - RNA, 1701 nt, Artificial Sequence
  derived and/or modified CDS sequence (opt3) from hemagglutinin__InfluenzaA__ACD85484
augaagaccaucauugcccugagcuacauacucugccuuguguucgcucagaaacugcccggcaacgacaauuccacagcaacuuuguguuuagggcaccaugccgucccuaacggaacgaucguuaagaccauuacaaaugaucaaaucgaggugacuaacgcgaccgaacugguacagucuucaaguacaggugagauuugcgacagcccacaccagauccuagauggcgaaaauuguacccucauagacgcucugcuuggggauccgcagugcgacggauuucaaaacaaaaagugggaucuguucguggagagauccaaagccuauucuaauuguuaccccuaugacgucccugauuacgcaucguugaggucacucguggccagcaguggcacucuggaauuuaacaaugaguccuucaacuggacagguguuacccagaaugggacgucuagcgcuugcauccggcgcuccaacaauucauuuuucagucgacugaacuggcucacucauuuaaaguuuaaguauccagcacugaaugugaccaugcccaacaacgaggaguucgacaaacuuuacauuuggggaguccaccauccuggcacagauaaugaccagaucuuuuuguaugcccaggcuagcggccguauuacugugucuaccaagagaucccaacagacaguaaucccaaacauagggucaaggccccggguucgcaauauuccuagcagaaucaguauuuacuggaccaucgugaaaccaggagauauccugcuaauuaacucuacggguaaucucauagccccgaggggcuacuucaagauccgguccgggaaaagcucgauuaugcgcucugacgcgcccaucggaaaguguaacuccgaaugcauaacuccuaauggcucaauuccaaacgacaagcccuuucagaaugucaaccgaaucacauauggugcauguccuagauacgugaaacagaauacccugaagcuggccacugggaugaggaacgugccagaaaaacaaacacggggaaucuucggcgcuauugccggcuuuaucgagaaugggugggagggaauggucgaugguugguauggcuuccgucaccagaacagugaagggauuggacaggcagcugaccuuaagagcacccaagccgcgauagaucagaucaauggcaaauugaaccgccucauugguaagacgaacgagaaauuccaccagaucgaaaaggaguuuuccgaaguugaggggagaauccaggaccuggagaaguacguggaagauaccaaaauugacuuauggucuuauaaugccgagcugcucguagcacuugaaaaccaacauacaauagaucugacugacagcgagaugaauaaguuguucgagaaaaccaagaaacagcuaagggaaaacgcugaggauaugggcaauggaugcuuuaagaucuaccacaagugugacaacgccugcauuggcucaauccggaaugggacauaugaucaugacguguaccgagacgaagcucugaacaaucgcuuccagauuaaaggagucgagcucaagagugguuacaaagauuggauccuguggauauccuuugccaucagcugcuuccuucuguguguggcauugcucggcuuuauuaugugggccugccagaaggggaacaucagauguaauauuugcaucuga

SEQ ID NO: 130354 - RNA, 1701 nt, Artificial Sequence; identical to SEQ ID NO: 129976
  derived and/or modified CDS sequence (opt3) from hemagglutinin__InfluenzaA__ACD85495

SEQ ID NO: 130355 - RNA, 1701 nt, Artificial Sequence
  derived and/or modified CDS sequence (opt3) from hemagglutinin__InfluenzaA__ACD85528
augaagaccaucauugcccugagcuacauacucugccuuguguucgcucagaaacugcccggcaacgacaauuccacagcaacuuuguguuuagggcaccaugccgucccuaacggaacgaucguuaagaccauuacaaaugaucaaaucgaggugacuaacgcgaccgaacugguacagucuucaaguacaggugagauuugcgacagcccacaccagauccuagauggcgaaaauuguacccucauagacgcucugcuuggggauccgcagugcgacggauuucaaaacaaaaagugggaucuguucguggagagauccaaagccuauucuaauuguuaccccuaugacgucccugauuacgugucguugaggucacucguugcaagcaguggcacucuggaauuuaacaaugaguccuucaacuggacaggugugacccagaaugggacgucuagcgccugcauccggcgcuccaacaagucauuuuucagucgacugaauuggcucacucauuuaaaguuuaaauauccagcucugaacgucaccaugcccaauaacgagaacuucgacaaacuuuacauuuggggagugcaccauccuggcacagauaaugaccagaucuuuuuguaugcacaggccagcggccguauuacuguaucuaccaagagaucccaacagacaguuaucccaaacauagggucaaggccccgggugcgcaauauuccuagcagaaucaguauuuacuggaccaucgucaagccaggagauauccugcuaauuaacucuacggguaaucucauagcuccgaggggcuacuucaaaauccgguccggaaagagcucgauuaugcgcucugacgcccccaucgggaaguguaacuccgaaugcauaacuccuaauggcucaauuccaaacgacaaacccuuucagaaugugaaccgaaucacauauggugcguguccuagauacgugaagcagaauacccugaaacuugcaacugggaugaggaacgucccagagaagcaaacacggggaaucuucggcgccauugcuggcuuuaucgaaaaugggugggagggaaugguugaugguugguauggcuuccgucaccagaacagugaggggauuggacaggccgcagaccugaaaagcacccaagcugccauagaucagaucaauggcaaguugaaccgccucauugguaaaacgaacgaaaaguuccaccagaucgagaaggaauuuuccgagguggaagggagaauccaggaccuggagaaauacguagaggauaccaagauugacuuauggucuuauaaugcggaacugcucguggcccuugagaaccaacauacaauagaucugacugacagcgaaaugaauaaauuguucgagaagaccaaaaagcagcuaagggaaaacgcagaggaucugggcaauggaugcuuuaagaucuaccacaaaugugacaacgcuugcauuggcucaauccggaaugggacauaugaucaugacgucuaccgagacgaggcccucaacaaucgcuuccagauuaagggaguggaacugaaaagugguuacaaggauuggauccuuuggauauccuuugcuaucagcugcuuccuguuguguguugcccuccugggcuuuauuaugugggcaugccagaaagggaacaucagauguaauauuugcaucuga

SEQ ID NO: 130356 - RNA, 1701 nt, Artificial Sequence
  derived and/or modified CDS sequence (opt3) from hemagglutinin__InfluenzaA__ACD85539
augaagaccaucauugcccugagcuacauacucugccuuguguucgcucagaaacugcccggcaacgacaauuccacagcaacuuuguguuuagggcaccaugccgucccuaacggaacgaucguuaagaccauuacaaaugaucaaaucgaggugacuaacgcgaccgaacugguacagucuucaaguacaggugagauuugcgacagcccacaccagauccuagauggcgaaaauuguacccucauagacgcucugcuuggggauccgcagugcgacggauuucaaaacaaaaagugggaucuguucguggagagauccaaagccuauucuaauuguuaccccuaugacgucccugauuacgcaucguugaggucacucguggccagcaguggcacucuggaauuuaacaaugaguccuucaacuggacagguguuacccagaaugggacgucuagcgcuugcauccggcgcacuaacaauuccuuuuucucacgacugaacuggcucacccauuuaaaguuuaaguauccagcacugaaugugacaaugcccaacaacgagaaauucgacaaacuuuacauuuggggaguccaccauccuggcacugauaaugaccagaucuuuuuguaugcccaggcuaguggccguauuaccgugagcacaaaaagaucucaacagaccguaaucccaaacauaggguccaggccccggguucgcaauauuccuucaagaaucagcauuuacuggacgaucgugaagccaggagauauccugcuaauuaacaguacugguaaucucauagccccgaggggcuacuucaaaauccggucugggaaguccagcauuaugcgcucggacgcgcccaucggaaaguguaacucugaaugcauaacaccuaauggcuccauuccaaacgacaaacccuuucagaaugucaaccgaaucaccuauggugcauguccuagauacgugaagcagaauacucugaaacuugccacagggaugaggaacgugccagagaagcaaacccggggaaucuucggcgcuauugccggcuuuaucgaaaaugggugggagggaauggucgaugguugguauggcuuccgucaccagaacucagaggggauuggacaggcagcugaccugaaaaguacgcaagccgcgauagaucagaucaauggcaaguugaaccgccucauugguaaaaccaacgaaaaguuccaccagaucgagaaggaauuuagcgagguugaagggagaauccaggaccuggagaaauacguggaggauacaaagauugacuuaugguccuauaaugccgaacugcucguagcacuugagaaccaacauacuauagaucugaccgacucugaaaugaauaaauuguucgagaagacaaagaagcagcuaagggaaaacgcugaggauaugggcaauggaugcuuuaagaucuaccacaaaugugacaacgccugcauuggcagcauccggaaugggacuuaugaucaugacguguaccgagacgaggcucugaacaaucgcuuccagauuaagggagucgaacucaaaucagguuacaaggauuggauccuguggauaaguuuugccaucuccugcuuccuucuguguguggcauugcucggcuuuauuaugugggccugccagaaagggaacaucagauguaauauuugcaucuga

SEQ ID NO: 130357 - RNA, 1701 nt, Artificial Sequence
  derived and/or modified CDS sequence (opt3) from hemagglutinin__InfluenzaA__ACD85550
augaagaccaucauugcccugagcuacauacucugccuuguguucgcucagaaacugcccggcaacgacaauuccacagcaacuuuguguuuagggcaccaugccgucccuaacggaacgaucguuaagaccauuacaaaugaucaaaucgaggugacuaacgcgaccgaacugguacagucuucaaguacaggugagauuugcgacagcccacaccagauccuagauggcgaaaauuguacccucauagacgcucugcuuggggauccgcagugcgacggauuucaaaacaaaaagugggaucuguucguggagagauccaaagccuauucuaauuguuaccccuaugacgucccugauuacgcaucguugaggucacucguggccagcaguggcacucuggaauuuaacaaugaguccuucaacuggacagguguuacccagaaugggacgucuagcgcuugcauccggcgcuccaacaauucauuuuucagucgacugaacuggcucacucauuuaaaguuuaaguauccagcacugaaugugaccaugcccaacaacgagaaauucgacaaacuuuacauuuggggaguccaccauccuggcacagauaaugaccagaucuuuuuguaugcccaggcuagcggccguauuacugugucuaccaagagaucccaacagacaguaaucccaaacauagggucaaggccccggguucgcaauauuccuagcagaaucaguauuuacuggaccaucgugaagccaggagauauccugcuaauuaacucuacggguaaucucauagccccgaggggcuacuucaaaauccgguccggaaagagcucgauuaugcgcucugacgcgcccaucgggaaguguaacuccgaaugcauaacuccuaauggcucaauuccaaacgacaaacccuuucagaaugucaaccgaaucacauauggugcauguccuagauacgugaagcagaauacccugaaacuugccacugggaugaggaacgugccagagaagcaaacacggggaaucuucggcgcuauugccggcuuuaucgaaaaugggugggagggaauggucgaugguugguauggcuuccgucaccagaacagugaggggauuggacaggcagcugaccugaaaagcacccaagccgcgauagaucagaucaauggcaaguugaaccgccucauugguaaaacgaacgaaaaguuccaccagaucgagaaggaauuuuccgagguugaagggagaauccaggaccuggagaaauacguggaggauaccaagauugacuuauggucuuauaaugccgaacugcucguagcacuugagaaccaacauacaauagaucugacugacagcgaaaugaauaaauuguucgagaagaccaaaaagcagcuaagggaaaacgcugaggaucugggcaauggaugcuuuaagaucuaccacaaaugugacaacgccugcauuggcucaauccggaaugggacauaugaucaugacguguaccgagacgaggcucucaacaaucgcuuccagauuaagggagucgaacugaaaagugguuacaaggauuggauccuuuggauauccuuugccaugagcugcuuccuguuguguguggcacuccugggcuuuaucaugugggccugccagaaagggaacauuagauguaauaucugcauuuga

SEQ ID NO: 130358 - RNA, 1701 nt, Artificial Sequence; identical to SEQ ID NO: 129976
  derived and/or modified CDS sequence (opt3) from hemagglutinin__InfluenzaA__ACD85561

SEQ ID NO: 130359 - RNA, 1701 nt, Artificial Sequence
  derived and/or modified CDS sequence (opt3) from hemagglutinin__InfluenzaA__ACD85572
augaagaccaucauugcccugagcuacauacucugccuuguguucgcucagaaacugcccggcaacgacaauuccacagcaacuuuguguuuagggcaccaugccgucccuaacggaacgaucguuaagaccauuacaaaugaucaaaucgaggugacuaacgcgaccgaacugguacagucuucaaguacaggugagauuugcgacagcccacaccagauccuagauggcgaaaauuguacccucauagacgcucugcuuggggauccgcagugcgacggauuucaaaacaaaaagugggaucuguucguggagagauccaaagccuauucuaauuguuaccccuaugacgucccugauuacgcaucguugaggucacucguggccagcaguggcacucuggaauuuaacaaugaguccuucaacuggacagguguuacccagaaugggacgucuagcgcuugcauccggcgcuccaacaauucauuuuucagucgacugaacuggcucacucauuuaaaguuuaaguauccagcacugaaugugaccaugcccaacaacgagaaauucgacaaacuuuacauuuggggaguccaccauccuggcacagauaaugaccagaucuuuuuguaugcccaggcuagcggccguauuacugugucuaccaaaagaucccaacagacaguaaucccaaacaccgggucaaggccccggguucgcaauauaccuagcagaauuaguaucuacuggacgauugugaagccaggagauauccugcuaaucaacucuacugguaaucucauugccccgaggggcuacuucaaaauacgguccggaaagagcucgaucaugcgcucugacgcgcccauugggaaguguaacuccgaaugcaucacaccuaauggcucaauaccaaacgacaaacccuuucagaaugucaaccgaauuaccuauggugcauguccuagauacgugaagcagaauacucugaaacuugccacagggaugaggaacgugccagagaagcaaacccggggaaucuucggcgcuaucgccggcuuuauugaaaaugggugggagggaauggucgaugguugguauggcuuccgucaccagaacagugaggggaucggacaggcagcugaccugaaaagcacgcaagccgcgauugaucagauaaauggcaaguugaaccgccucaucgguaaaaccaacgaaaaguuccaccagauugagaaggaauuuuccgagguugaagggagaauccaggaccuggagaaauacguggaggauacaaagaucgacuuauggucuuauaaugccgaacugcucguagcacuugagaaccaacauacuauugaucugaccgacagcgaaaugaauaaauuguucgagaagacaaagaagcagcuaagggaaaacgcugaggauaugggcaauggaugcuuuaagauauaccacaaaugugacaacgccugcaucggcucaauucggaaugggacuuaugaucaugacguguaccgagacgaggcucugaacaaucgcuuccagaucaagggagucgaacucaaaagugguuacaaggauuggauucuguggaucuccuuugccauaagcugcuuccuucuguguguggcauugcucggcuuuaucaugugggccugccagaaagggaacauuagauguaauaucugcauuuga

SEQ ID NO: 130360 - RNA, 1701 nt, Artificial Sequence; identical to SEQ ID NO: 130356
  derived and/or modified CDS sequence (opt3) from hemagglutinin__InfluenzaA__ACD85583

SEQ ID NO: 130361 - RNA, 1701 nt, Artificial Sequence
  derived and/or modified CDS sequence (opt3) from hemagglutinin__InfluenzaA__ACD93579
augaagaccaucauugcccugagcuacauacucugccuuguguucgcucagaaacugcccggcaacgacaauuccacagcaacuuuguguuuagggcaccaugccgucccuaacggaacgaucguuaagaccauuacaaaugaucaaaucgaggugacuaacgcgaccgaacugguacagucuucaaguacaggugagauuugcgacagcccacaccagauccuagauggcgaaaauuguacccucauagacgcucugcuuggggauccgcagugcgacggauuucaaaacaaaaagugggaucuguucguggagagauccaaagccuauucuaauuguuaccccuaugacgucccugauuacgcaucguugaggucacucguggccagcaguggcacucuggaauuuaacaaugaguccuucaacuggacagguguuacccagaaugggacgucuagcgcuugcauccggcgcuccaacaauucauuuuucagucgacugaacuggcucacucauuuaaaguuuaaguauccagcacugaaugugaccaugcccaacaacgagaaauucgacaaacuuuacauuuggggaguccaccauccuggcacagauaaugaccagaucuuuuuguaugcccaggcuagcggccguauuacugugucuaccaagagaucccaacagacaguaaucccaaacauagggucaaggccccggguucgcaauauuccuagcagaaucaguauuuacuggaccaucgugaagccaggagauauccugcuaauuaacucuacggguaaucucauagccccgaggggcuacuucaaaauccgguccggaaagagcucgauuaugcgcucugacgcgcccaucgggaaguguaacuccgaaugcauaacuccuaauggcucaauuccaaacgacaaacccuuucagaaugucaaccgaaucacauauggugcauguccuagauacgugaagcagaauacccugaaacuugccacugggaugaggaacgugccagagaagcaaacacggggaaucuucggcgcuauugccggcuuuaucgaaaaugggugggagggaauggucgaugguugguauggcuuccgucaccagaacagugaggggauuggacaggcagcugaccugaaaagcacccaagccgcgauagaucagaucaauggcaaguugaaccgccucauugguaaaacgaacgaaaaguuccaccagaucgagaaggaauuuuccgagguugaagggagaauccaggaccuggagaaauacguggaggauaccaagauugacuuauggucuuauaaugccgaacugcucguagcacuugagaaccaacauacaauagaucugacugacagcgaaaugaauaaauuguucgagaagaccaaaaagcagcuaagggaaaacgcugaggauaugggcaauggaugcuuuaagaucuaccacaaaugugacaacacaugcauuggcucaauccggaaugggacuuaugaucaugacguguaccgagacgaggcccugaacaaucgcuuccagauuaagggagucgaacucaaaagugguuacaaggauuggauccuguggauauccuuugcuaucagcugcuuccuucuguguguggccuugcucggcuuuauuaugugggcaugccagaaagggaacaucagauguaauauuugcaucuga

SEQ ID NO: 130362 - RNA, 1701 nt, Artificial Sequence; identical to SEQ ID NO: 128678
  derived and/or modified CDS sequence (opt3) from hemagglutinin__InfluenzaA__ACF09402

SEQ ID NO: 130363 - RNA, 1701 nt, Artificial Sequence
  derived and/or modified CDS sequence (opt3) from hemagglutinin__InfluenzaA__ACF22159
augaagaccaucauugcccugagcuacauacucugccuuguguucgcucagaaacugcccggcaacgacaauuccacagcaacuuuguguuuagggcaccaugccgucccuaacggaacgaucguuaagaccauuacaaaugaucaaaucgaggugacuaacgcgaccgaacugguacaaaauucuucaacagguggcauuugcgacaguccacaccagauccuagauggggagaacuguacccucauagacgcucugcuuggagauccgcagugcgacggcuuucagaauaaaaagugggaucuguucguggaaagaagcaaagccuauuccaacuguuaccccuaugacgucccugauuacgcaucuuugaggucgcucguggccucaagcgguacucuggaguuuaauaacgaaaguuucaauuggacagggguuacccagaacggaacguccucugcuugcaagcggcgcagcaauaaguccuuuuucucacgacugaacuggcucacucauuuaaaauauaaguacccagcacugaaugugaccaugcccaacaacgagaaauuugacaaacuuuauaucuggggcguccaccauccuggcacagauagugaccagauuagcuuguacgcccaggcuucugggcguaucacuguguccaccaagagaucacaacagacaguaauuccaaauaucggauucaggccccggguucgcgaugugagcaguagaauaucuauuuacuggaccaucgucaagccuggugacauucugcuaaucaacuccacgggcaaucucaucgccccaaggggguauuuuaagauucggagcggaaaaucgucuauaaugcgcuccgacgcgccgaucggcaaguguaacucagagugcauuacucccaaugguaguaucccuaacgauaaaccauuccagaaugugaaccgaauaacauacggggcaugucccagauaugugaagcagaauacccugaaacuugccacuggaaugaggaacgucccugaaaagcaaacacggggcauuuuuggcgcuaucgccggguucaucgagaauggaugggaagguaugguugacggcugguacggguuucgucaccagaacagcgagggaaccggccaggcagcugaucugaaauccacgcaagccgcgauuaaucagaucaacgguaaguugaaucgccucauugggaagaccaacgagaaauuccaccagauagaaaaggaguucucugaaguggagggcagaauccaggaccuggaaaaauauguagaggauacaaagauugacuuauggagcuacaacgccgagcugcucguggcacuugaaaaucaacauacuaucgaucugaccgacucagagaugaacaaauuguuugaaaggacaaagaagcagcuacgggagaaugcugaagauaugggaaacggcugcuucaaaaucuaucacaagugugacaaugccugcauugagaguauacgaaacgggacuuacgaucaugacgucuaccgcgacgaggcucugaauaacagauuucagaucaaaggaguggaacucaaguccgguuauaaagauuggauucuguggaucagcuucgccauuucuugcuuucuucuguguguugcauugcucggcuucaucaugugggccugccagaaggggaauauaagguguaacaucugcauuuga

SEQ ID NO: 130364 - RNA, 1701 nt, Artificial Sequence
  derived and/or modified CDS sequence (opt3) from hemagglutinin__InfluenzaA__ACF22188
augaagaccaucauugcccugagcuacauauucugccucgcucuuggccaggaccugcccgggaacgauaauuccacagcaacuuuguguuuaggacaccaugccgugccuaacgguacgcuggucaaaaccaucacagacgaucaaauugagguuacuaaugcgaccgaacuugugcagucuucaaguacaggcaagaucugcaacaauccacacaggauucucgacgggaucgauuguacccugauagacgcucuacugggagauccgcauugcgacguauuucagaacgagacuugggauuuguucguggaaagaagcaaagccuuuuccaauuguuaucccuacgacgucccugauuaugcaucucuccggucgcugguggccucaagcggcacacuggaguucaucaccgaagguuuuacguggacugggguuacccagaacggaggcaguaaugcuugcaagcgcggcccaggguccggauucuuuucucgacucaacugguuaacaaaaagcgguuccacuuaccccgugcugaaugucaccaugccuaacaaugacaacuucgauaaguuguauauuuggggcgugcaccauccaucaacaaaucaagagcagaccaguuuguacguacaggcaagcgggcguguuacggugucuacuagaaggucccagcaaacaaucauucccaacaucuggucacggccuuggguccgcggacugagcaguagaauaucuauuuauuggaccaucgugaagccaggcgacgugcuagucauuaacuccaaugguaaccucaucgccccgaggggguacuuuaaaaugcggacuggaaagagcucgaucaugcgcucugacgcucccauugauacauguauauccgagugcaucaccccuaauggcucaauuccaaacgacaaacccuuccagaauguuaacaagaucacguacggcgccuguccuaaauaugugaagcagaauacccugaaacuugcgacagggaugcgaaacguaccagaaaagcagacuagaggacuguuuggugcaauagccggcuucauugagaaugggugggaaggaaugaucgauggcugguacgguuuuaggcaccaaaacagugaggggaccggccaggcugccgaccuuaagagcacacaggcagcuaucgaucaaauuaauggaaaacucaaccgggugaucgagaagacuaaugaaaaauuccaccagauugagaaggaguucuccgaagucgaaggccguauacaggaccuggagaaauauguggaggauaccaagaucgacuuauggucuuacaacgccgaacugcucguugcgcuugagaaucagcauacaauugaucugaccgacagcgaaaugaacaaguuguuugagaaaacucgcagacaacuaagggaaaacgccgaggauauggggaauggaugcuucaagaucuaucacaaaugugacaacgcaugcaucgagucaauucggaaugguaacuacgaccaugauguguaucgagacgaagcucugaauaaccgcuuucagauaaagggcgucgagcucaaaaguggguacaaggauuggauccuguggauuuccuucgccaucagcugcuuucuucugugugugguauugcucggauucauuaugugggcuugccagagaggcaauaucagguguaacauaugcaucuga

SEQ ID NO: 130365 - RNA, 1701 nt, Artificial Sequence; identical to SEQ ID NO: 130364
  derived and/or modified CDS sequence (opt3) from hemagglutinin__InfluenzaA__ACF22199

SEQ ID NO: 130366 - RNA, 1701 nt, Artificial Sequence
  derived and/or modified CDS sequence (opt3) from hemagglutinin__InfluenzaA__ACF22210
augaagaccaucauugcccugagcuacauauucugccucgcucuuggccaggaccugcccgggaacgauaauuccacagcaacuuuguguuuaggacaccaugccgugccuaacgguacgcuggucaaaaccaucacagacgaucaaauugagguuacuaaugcgaccgaacuugugcagucuucaaguacaggcaagaucugcaacaauccacacaggauucucgacgggaucgauuguacccugauagacgcucuacugggagauccgcauugcgacguauuucagaacgagacuugggauuuguucguggaaagaagcaaagccuuuuccaauuguuaucccuacgacgucccugauuaugcaucucuccggucgcugguggccucaagcggcacacuggaguucaucaccgaagguuuuacguggacugggguuacccagaacggaggcaguaaugcuugcaagcgcggcccaggguccggauucuuuucucgacucaacugguuaacaaaaagcgguuccacuuaccccgugcugaaugucaccaugccuaacaaugacaacuucgauaaguuguauauuuggggcgugcaccauccaucaacaaaucaagagcagaccaguuuguacguacaggcaagcgggcguguuacggugucuacuagaaggucccagcaaacaaucauucccaacaucggaucacggccuuggguccgcggccugagcaguagaauaucuauuuauuggaccaucgugaagccaggugacgugcuagucauuaacuccaaugggaaccucaucgccccgaggggauacuuuaaaaugcggacuggcaagagcucgaucaugcgcucugacgcucccauugauacauguauauccgagugcaucaccccuaauggcucaauuccaaacgacaaacccuuccagaauguuaacaagaucacguacggggccuguccuaaauaugugaagcagaauacccugaaacuugcgacaggaaugcgaaacguaccagaaaagcagacuagaggucuguuuggcgcaauagccggguucauugagaauggaugggaaggcaugaucgaugguugguacggguuuaggcaccaaaacagugagggcaccggacaggcugccgaccuuaagagcacacaggcagcuaucgaucaaauuaauggcaaacucaaccgggugaucgagaagacuaaugaaaaauuccaccagauugagaaggaguucuccgaagucgaagggcguauacaggaccuggagaaauauguggaggauaccaagaucgacuuauggucuuacaacgccgaacugcucguugcgcuugagaaucagcauacaauugaucugaccgacagcgaaaugaacaaguuguuugagaaaacucgcagacaacuaagggaaaacgccgaggauaugggaaaugguugcuucaagaucuaucacaaaugugacaacgcaugcaucgagucaauucggaauggcacguacgaccaugauguguaucgagacgaagcucugaacaaucgcuuucagauaaagggggucgagcucaaaaguggauacaaggauuggauccuguggauuuccuucgccaucagcugcuuucuucugugugugguauugcucggcuucauuaugugggcuugccagagagguaacaucagguguaauauaugcaucuga

SEQ ID NO: 130367 - RNA, 1701 nt, Artificial Sequence; identical to SEQ ID NO: 130366
  derived and/or modified CDS sequence (opt3) from hemagglutinin__InfluenzaA__ACF22221

SEQ ID NO: 130368 - RNA, 1701 nt, Artificial Sequence; identical to SEQ ID NO: 130366
  derived and/or modified CDS sequence (opt3) from hemagglutinin__InfluenzaA__ACF22232

SEQ ID NO: 130369 - RNA, 1701 nt, Artificial Sequence; identical to SEQ ID NO: 130366
  derived and/or modified CDS sequence (opt3) from hemagglutinin__InfluenzaA__ACF22243

SEQ ID NO: 130370 - RNA, 1701 nt, Artificial Sequence; identical to SEQ ID NO: 130366
  derived and/or modified CDS sequence (opt3) from hemagglutinin__InfluenzaA__ACF22254

SEQ ID NO: 130371 - RNA, 1701 nt, Artificial Sequence; identical to SEQ ID NO: 130366
  derived and/or modified CDS sequence (opt3) from hemagglutinin__InfluenzaA__ACF22265

SEQ ID NO: 130372 - RNA, 1701 nt, Artificial Sequence; identical to SEQ ID NO: 130366
  derived and/or modified CDS sequence (opt3) from hemagglutinin__InfluenzaA__ACF22276

SEQ ID NO: 130373 - RNA, 1701 nt, Artificial Sequence; identical to SEQ ID NO: 130366
  derived and/or modified CDS sequence (opt3) from hemagglutinin__InfluenzaA__ACF22287

SEQ ID NO: 130374 - RNA, 1701 nt, Artificial Sequence; identical to SEQ ID NO: 130366
  derived and/or modified CDS sequence (opt3) from hemagglutinin__InfluenzaA__ACF22298

SEQ ID NO: 130375 - RNA, 1701 nt, Artificial Sequence; identical to SEQ ID NO: 130366
  derived and/or modified CDS sequence (opt3) from hemagglutinin__InfluenzaA__ACF22320

SEQ ID NO: 130376 - RNA, 1701 nt, Artificial Sequence; identical to SEQ ID NO: 130366
  derived and/or modified CDS sequence (opt3) from hemagglutinin__InfluenzaA__ACF22342

SEQ ID NO: 130377 - RNA, 1701 nt, Artificial Sequence
  derived and/or modified CDS sequence (opt3) from hemagglutinin__InfluenzaA__ACF22364
augaagaccaucauugcccugagcuacauauucugccucgcucuuggccaggaccugcccgggaacgauaauuccacagcaacuuuguguuuaggacaccaugccgugccuaacgguacgcuggucaaaaccaucacagacgaucaaauugagguuacuaaugcgaccgaacuugugcagucuucaaguacaggcaagaucugcaacaauccacacaggauucucgacgggaucgauuguacccugauagacgcucuacugggagauccgcauugcgacguauuucagaacgagacuugggauuuguucguggaaagaagcaaagccuuuuccaauuguuaucccuacgacgucccugauuaugcaucucuccggucgcugguggccucaagcggcacacuggaguucaucaccgaagguuuuacguggacugggguuacccagaacggaggcaguaaugcuugcaagcgcggcccaggguccggauucuuuucucgacucaacugguuaacaaaaagcgguuccacuuaccccgugcugaaugucaccaugccuaacaaugacaacuucgauaaguuguauauuuggggcgugcaccauccaucaacaaaucaagagcagaccaguuuguacguacaggcaagcgggcguguuacggugucuacuagaaggucccagcaaacaaucauucccaacaucgagucacggccuuggguccgcggacugagcaguagaauaucuauuuauuggaccaucgugaagccaggcgacgugcuagucauuaacuccaaugguaaccucaucgccccgaggggguacuuuaaaaugcggacuggaaagagcucgaucaugcgcucugacgcucccauugauacauguauauccgaaugcaucaccccuaauggcucaauuccaaacgacaaacccuuccagaauguuaacaagaucacguacggcgccuguccuaaauaugugaagcagaauacccugaaacuugcgacagggaugcgaaacguaccagagaaacagacuagaggacuguuuggugcaauagccggcuucauugaaaaugggugggagggaaugaucgauggcugguacgguuuuaggcaccaaaacagugaggggaccggccaggcugccgaccuuaagagcacacaggcagcuaucgaucaaauuaauggaaaacucaaccgggugaucgaaaagacuaaugagaaauuccaccagauugaaaaggaguucuccgaagucgagggccguauacaggaccuggagaaauauguggaagauaccaagaucgacuuauggucuuacaacgccgagcugcucguugcgcuugaaaaucagcauacaauugaucugaccgacagcgagaugaacaaguuguuugaaaagacucgcagacaacuaagggagaacgccgaggauauggggaauggaugcuucaagaucuaucacaaaugugacaacgcaugcaucgaaucaauucggaaugguacguacgaccaugauguguaucgagacgaggcucugaacaaucgcuuucagauaaagggcgucgaacucaaaaguggguacaaggauuggauccuguggauuuccuucgccaucagcugcuuucuucugugugugguauugcucggauucauuaugugggcuugccagagaggcaacaucagguguaauauaugcaucuga

SEQ ID NO: 130378 - RNA, 1701 nt, Artificial Sequence; identical to SEQ ID NO: 130356
  derived and/or modified CDS sequence (opt3) from hemagglutinin__InfluenzaA__ACF22408

SEQ ID NO: 130379 - RNA, 1701 nt, Artificial Sequence; identical to SEQ ID NO: 129976
  derived and/or modified CDS sequence (opt3) from hemagglutinin__InfluenzaA__ACF41669

SEQ ID NO: 130380 - RNA, 1698 nt, Artificial Sequence; identical to SEQ ID NO: 129962
  derived and/or modified CDS sequence (opt3) from hemagglutinin__InfluenzaA__ACF41680

SEQ ID NO: 130381 - RNA, 1689 nt, Artificial Sequence
  derived and/or modified CDS sequence (opt3) from hemagglutinin__InfluenzaA__ACF41691
auggccaucauuuaccugauacuccuuuucaccgcugugagaggcgaccagaucugcauuggguaucacgcaaacaauagcacagagaaggucgauacuauccuggaaaggaacguuacggugacccaugccaaagacauuuuggagaagacacacaauggaaaauuauguaagcugaacgguauacccccucuagaacucggcgauugcuccaucgcgggguggcugcuuggaaauccagagugugaccggcuguugcgcguaccggaauggucuuacaucauggagaaagagaacccccgauauucacucugcuacccuggcaguuuuaaugauuaugaagaacugaagcaucugcucagcuccgugaagcacuucgaaaaagucaagauuuuaccaaaagacgguuggacucaacaugagaccgaugggggaucuaaggcuugugccgugucgggcaaacccucauuuuuccguaacaugguuuggcugacaaagaagggcccuaauuacccaguggcaaaaagaagcuauaacaauaccaguggggagcagaugcuuaucauuuggggaguccaccaccccaacgacgaagccgagcagagggcuuuguaccaggaaguggguacuuacguauccgcaucuacaagcacccugaauaagcgguccacgccugagaucgccgcucgcccaaaaguuucaggccuagggaguagaauggaauuuagcuggacucuccuggaugugugggacaccauaucuuucgaguccacaggaaaccuugucgccccggaguauggcuuuaagauuucaaaaagggguagcagugggaucaugaagacugaaggaacccugggcaauugcgagacaaaaugucaaacccccuugggcgcgauuaacacgacucucccuuuccauaacgugcacccacugacaaucggggaaugccccaaguacgugaagucugagaaauuaguccuggcaaccggacuccggaauguuccucagaucgaaucccgcggucuuuuuggcgccauugcuggguucauagagggaggcuggcaggguaugguggaugggugguauggcuaccaucacagcaacgaccagggaucgggcuaugccgcagauaaggagucuacucaaaaggcuuuugaccgaaucacaaauaaaguaaacuccgugauugagaaaaugaauacccaguucgaggccgucgggaaggaauuuucaaaccuggagaagagauuggaaaaucuaaacaaaaagauggaggacggauuccuggauguguggacguacaaugcggagcuccugguucuuauggaaaacgagaggacccuggacuuccacgauaguaaugugaaaaacuuguaugacaagguccggaugcagcuccgugauaaugugaaagaacuggguaacggcuguuuugaguucuaccauaagugcgacgaugaguguaugaauagcguaaagaacgggacauacgacuauccaaaauacgaagaggaauccaaguuaaaacgcaacgagaucaagggaguugaacugucuagcaugggcguguaucagauacuagccauuuacgcaacugucgcugguucacucagucuggccaucaugaucgcugggauuuccuuuuggaugugcagcaauggcucucuucaaugcagaaucuguauuuga

SEQ ID NO: 130382 - RNA, 1701 nt, Artificial Sequence; identical to SEQ ID NO: 130364
  derived and/or modified CDS sequence (opt3) from hemagglutinin__InfluenzaA__ACF41735

SEQ ID NO: 130383 - RNA, 1701 nt, Artificial Sequence
  derived and/or modified CDS sequence (opt3) from hemagglutinin__InfluenzaA__ACF41790
augaagaccaucauugcccugagcuacauauucugccucgcucuuggccaggaccugcccgggaacgauaauuccacagcaacuuuguguuuaggacaccaugccgugccuaacgguacgcuggucaaaaccaucacagacgaucaaauugagguuacuaaugcgaccgaacuugugcagucuucaaguacaggcaagaucugcaacaauccacacaggauucucgacgggaucgauuguacccugauagacgcucuacugggagauccgcauugcgacguauuucagaacgagacuugggauuuguucguggaaagaagcaaagccuuuuccaauuguuaucccuacgacgucccugauuaugcaucucuccggucgcugguggccucaagcggcacacuggaguucaucaccgaagacuuuacguggacugguguuacccagaacgggggaaguaaugcuugcaagcgcggcccaggcuccggguucuuuucucgacucaacugguuaacaaaaagcggauccacuuaccccgugcuggaugucaccaugccuaauaacgacaauuucgacaaguuguauauuuggggugugcaccauccaucaacaaaccaagagcagaccaguuuguacguacaggcaagcggccguguuacggugucuacuagaaggucccagcaaacaaucauucccaauaucgggucacggccuuggguccgcggacugagcaguagaauaucuauuuauuggaccaucgugaagccaggcgaugugcuagucauuaacuccaacgguaaucucaucgccccgaggggguacuuuaaaaugcggacuggaaagagcucgaucaugcgcucugacgcucccauugauacauguauauccgagugcaucaccccuaacggcucaauuccaaaugacaaacccuuccagaacguuaauaagaucacguacggcgccuguccuaaauaugugaagcagaacacccugaaacuugcgacagggaugcgaaauguaccagaaaagcagacuagaggacuguuuggugcaauagccggcuucauugagaacgggugggaaggaaugaucgauggcugguacgguuuuaggcaccaaaauagugaggggaccggccaggcugccgaccuuaagagcacacaggcagcuaucgaucaaauuaacggaaaacucaaucgggugaucgagaagacuaacgaaaaauuccaccagauugagaaggaguucuccgaagucgaaggccguauacaggaccuggagaaauauguggaggauaccaagaucgacuuauggucuuacaaugccgaacugcucguugcgcuugagaaccagcauacaauugaucugaccgacagcgaaaugaauaaguuguuugagaaaacucgcagacaacuaagggaaaacgccgaggacauggggaacggaugcuucaagaucuaucacaaaugugauaaugcaugcaucgagucaauucggaacgguacguacgaccaugauguguaucgagacgaagcucugaauaaccgcuuucagauaaagggcgucgagcucaaaaguggguacaaggauuggauccuguggauuuccuucgccaucagcugcuuucuucugugugugguauugcucggauucauuaugugggcuugccagagaggcaauaucagguguaacauaugcaucuga

SEQ ID NO: 130384 - RNA, 1701 nt, Artificial Sequence
  derived and/or modified CDS sequence (opt3) from hemagglutinin__InfluenzaA__ACF41823
augaagaccaucauugcccugagcuacauauucugccucgcucuuggccaggaccugcccgggaacgauaauuccacagcaacuuuguguuuaggacaccaugccgugccuaacgguacgcuggucaaaaccaucacagacgaucaaauugagguuacuaaugcgaccgaacuugugcagucuucaaguacaggcaagaucugcaacaauccacacaggauucucgacgggaucgauuguacccugauagacgcucuacugggagauccgcauugcgacguauuucagaacgagacuugggauuuguucguggaaagaagcaaagccuuuuccaauuguuaucccuacgacgucccugauuaugcaucucuccggucgcugguggccucaagcggcacacuggaguucaucaccgaagguuuuacguggacugggguuacccagaacggaggcaguaaugcuugcaagcgcggcccaggguccggauucuuuucucgacucaacugguuaacaaaaagcgguuccacuuaccccgugcugaaugucaccaugccuaacaaugacaacuucgauaaguuguauauuuggggcgugcaccauccaucaacaaaucaagagcagaccaguuuguacguacaggcaagcgggcguguuacggugucuacuagaaggucccggcagacaaucauucccaacaucggaucacgcccuugggucagaggccugagcaguaggauaucuauuuauuggaccaucgugaagccaggugacgugcuagucauuaacuccaaugggaaccucaucgccccgcggggauacuuuaaaaugcgcacuggcaagagcucgaucaugcgaucugacgcucccauugauacauguauauccgagugcaucaccccuaauggcucaauuccaaacgacaaacccuuccaaaauguuaacaagaucacguacggggccuguccuaaauaugugaagcagaauacccugaaacuugcgacaggaaugagaaacguaccagaaaagcagacuaggggucuguuuggcgcaauagccggguucauugagaauggaugggaaggcaugaucgaugguugguacggguuucggcaccagaacagugagggcaccggacaagcugccgaccuuaagagcacacaggcagcuaucgaucagauuaauggcaaacucaaccgugugaucgagaagacuaaugaaaaauuccaccaaauugagaaggaguucuccgaagucgaagggcgcauacaggaccuggagaaauauguggaggauaccaagaucgacuuauggucuuacaacgccgaacugcucguugcgcuugagaaucagcauacaauugaucugaccgacagcgaaaugaacaaguuguuugagaaaacuagaaggcagcuacgggaaaacgccgaggauaugggaaaugguugcuucaagaucuaucacaaaugugacaacgcaugcaucgagucaauucgaaauggcacguacgaccauaacguguaucgcgaugaagcucugaauaacagauuucaaauaaagggggucgagcucaaaaguggauacaaggacuggauccuguggauuuccuucgccaucagcugcuuucuucugugugugguauugcucggcuucauuaugugggcuugccagagggguaauauccgguguaacauaugcaucuga

SEQ ID NO: 130385 - RNA, 1698 nt, Artificial Sequence
  derived and/or modified CDS sequence (opt3) from hemagglutinin__InfluenzaA__ACF41834
augaaggccaaccugcucgugcuucugugcgcuuuggcagccgcggacgcugauaccaucuguauuggcuaccacgccaauaacagcacagacacugucgauacgguuuuagagaaaaaugugaccguaacacauuccgugaaccugcuagaagacucucacaaugggaagcucugcagacugaaaggaauagcaccccuucagcuggguaaguguaacaucgccggcugguugcucgggaauccugagugcgauccacugcugccggucaggucauggaguuauauuguggaaacucccaacagcgagaauggaaucuguuacccuggcgacuucauugauuaugaggaacuccgggagcaauuauccucuguuucgucauuugaacgcuucgagaucuuuccaaaagaaagcaguuggcccaaccauaauaccaacggugugacagcugcaugcucccacgaggggaagucuagcuucuaccgaaaucugcuuugguugaccgagaaggaaggauccuauccuaaccugaaaaauucauacgucaacaagaaaggcaaggaggugcuaguacucuggggcauacaucacccaaguaacagcaaagaacagcagaaucuguaucagaacgagaaugccuacguuucuguggucacuuccaacuacaaucguagauuuacacccgaaaucgcugagaggccuaaggugcgggaccaagccgggcgcaugaacuauuacuggacccuucugaagccaggagauacgauuaucuucgaggcgaaugguaacuugauugcaccgauguaugccuuugcucucucaagaggcuucgggagcggaaucauaaccaguaaugccucuaugcacgaauguaacacuaaaugccagacaccccugggcgcaauuaauuccagcuuaccuuaccagaacauccauccagugacuauuggugagugucccaaguaugucaggucggcuaaacugcggaugguuaccgggcuccgcaauaucccuucuauccagucccgaggacuuuuuggcgccauugcgggcuucauagaagggggauggacagguaugaucgacggcugguacggguaucaccaucaaaacgagcagggaucaggcuacgccgcagaucagaagaguacccagaaugcuauuaacgguaucacgaacaaagugaauacuguaauagaaaagaugaacauucaauuuacagccguggggaaagaguucaauaagcuggagaagagaauggaaaacuugaauaaaaaggucgacgauggcuuucuagacaucuggaccuacaacgcugagcugcucgugcugcuugaaaaugagaggacucuggacuuccacgauagcaacguuaaaaauuuguaugaaaaggugaaaucccagcucaagaacaaugccaaggagaucggaaacggcugcuucgaguuuuaccacaaaugugacaaugaaugcauggagucuguccggaacgggacauaugauuacccaaaguauagcgaagagucaaaacugaaucgugagaagguggacggaguaaaauuagaaaguauggguauuuaccagauccuggcaauuuauuccaccguugccagcucucuagugcuccuggucucacuuggcgcuauaaguuucuggaugugcagcaacggguccuugcaaugucgcaucugcauuuga

SEQ ID NO: 130386 - RNA, 1701 nt, Artificial Sequence
  derived and/or modified CDS sequence (opt3) from hemagglutinin__InfluenzaA__ACF41856
augaagaccaucauugcccugagcuacauacucugccuuguguucgcucagaaacugcccggcaacgacaauuccacagcaacuuuguguuuagggcaccaugccgucccuaacggaacgcugguuaagaccaucacaaaugaucaaauugaggugacuaacgcgaccgaacuuguacagucuucaaguacagguagaaucugcgacagcccacacaggauucucgauggcaaaaauuguacccugaucgacgcucuacugggggauccgcauugcgacggauuucagaacaaggagugggauuuguucguggaacgguccaaagccuauucuaauuguuaccccuaugacgucccugauuacgcaucgcuccgcucacugguggccagcaguggcacucuggaguuuauaaacgaagacuucaauuggacagguguugcucaggaugggggauccuaugcaugcaagcgaggcucugugaacagcuuuuucucccgucucaauugguuacacaagucagaguacaaauauccagcccugaacgucaccaugcccaauaacggcaaguuugacaaacuuuacaucuggggagugcaucacccuaguacggauagagaccaaacuagcuuguacguaagggcuucugggcggguuaccguguccacaaagcgcucacagcagacugucaccccaaauauugguagcagacccugggugaggggccagaguucucggaucuccauuuauuggacaaucgugaaaccuggggacauacugcuaauuaacagcaccggaaaccucaucgccccacgcggcuacuucaagauucgaaaugguaagucgucuaucaugagauccgaugcgccgaucgggacguguucaagugagugcauuacucccaacggaagcauaccuaaugacaaaccauuucaaaacgucaauaggaucacauauggcgcauguccccgguacguuaagcagaacacccugaaacuugccacuggcaugcguaaugugccugaaaagcagacacgcgggauuuucggagcuaucgccgguuuuauagagaacggcugggaagggaugguagauggaugguauggcuucagacaccaaaauuccgaggguaccgggcaggcagcugaccugaaaucuacgcaggccgcgauugaucagaucaacggcaaguugaauaggcucaucgagaaaaccaacgaaaaguuucaucaaauugagaaggaguucagcgaaguggaaggacggauccaggaccuggagaaauacgucgaggauacaaagauugacuuauggucauauaaugccgaacugcucguggcacuugagaaccagcacacuauagaucugaccgacagugaaaugaauaaauuguucgagaagacacgaaaacagcuacgcgaaaacgcugaggauaugggcaacgggugcuuuaagaucuaccauaagugugacaaugccugcauuggauccaucagaaacgguacuuacgaccacgauguuuauagggacgaggcucugaauaaccgguuccaaaucaaaggcguggaacucaagagcggguacaaagauuggauucuguggauaucuuuugccaucucaugcuuccuucugugugucguguugcucggauuuauuaugugggcaugccagaagggcaauauccgcuguaacauuugcaucuga

SEQ ID NO: 130387 - RNA, 1698 nt, Artificial Sequence
  derived and/or modified CDS sequence (opt3) from hemagglutinin__InfluenzaA__ACF41867
augaaggccaaacugcucgugcuucugugcaccuucacagcuacuuacgcagacacgaucuguauuggcuaucacgccaacaauagcaccgauacagucgacacuguuuuggagaagaacgugaccguaacacauuccgugaauuuacuggaagauucucacaacgggaaacuaugccuccugaagggaauagcgccccuucagcuggguaauuguucagucgcuggcuggaucuuggggaacccugagugcgaaagucucauuagcaaagaguccuggucuuacaucguggaaaccccaaauccggagaacggaacuuguuaucccggcuacuuugccgacuaugaggaacugagagagcaacugucgucaguuagcaguuucgaaagguuugagauuuucccuaaggaguccucuuggccaaaucauacagugaccggugucacggcaagcugcucccacaacgggaagucaaguuuuuaccggaaucucuuauggcugacugagaaaaacggacuuuaucccaauuugagcaacucuuacgugaauaacaaggagaaagaaguacugguucuauggggcgugcaucacccuuccaacauccgcgaucagcgagccauauaccacaccgagaaugcuuaugucucaguggugagcagucauuacucucguagauucacaccagaaaucgcaaagaggcccaaaguccggggccaggaggggcgcauuaacuauuacuggacucuccuggagccuggagacaccaucauuuuugaagccaaugguaaccuuaucgcuccaugguaugccuucgcgcuguccagaggcuuugggagcggaauaauuacaucgaaugcaccgaugaacgagugugaugccaagugccagacgccccaaggcgcuaucaauucuuccuugccuuuccagaacguucacccagugaccauuggugaaugucccaaguacguaaggucaacuaaacuccggauggugacagggcugcgcaauaucccuaguauccagagccgaggauuauuuggcgccauugcaggcuucauagaagggggauggaccgguaugauggacggcugguauggguaccaucaccagaacgaacaaggauccggcuacgcugccgaucagaagucuacucagaaugcgaucaacgguauuacaaauaaagucaacagcgugaucgagaagaugaauacccaguuuacggccguugggaaagaguucaacaagcuggaaagaaggauggagaaccucaauaaaaagguggacgauggcuuccuugacauauggaccuauaacgcagaacuguugguccuacuggagaaugaacggacacucgauuuucacgacucaaacgugaagaaucuguacgagaaaguaaagagucaacuuaaaaacaaugcuaaggagauuggaaacggcugcuucgaauuuuaucauaaauguaauaacgagugcauggaauccguuaagaaugggacuuacgacuauccaaaguacagcgaggagucuaaacugaaccgugaaaagaucgauggagugaaauuggagucaaugggugucuaucagauccucgccauuuacaguaccguggcuagcucccuggucuuacuggugucucuaggcgccaucucguucuggaugugcagcaaugggucccuccagugucgcauuugcauauga

SEQ ID NO: 130388 - RNA, 1698 nt, Artificial Sequence; identical to SEQ ID NO: 130163
  derived and/or modified CDS sequence (opt3) from hemagglutinin__InfluenzaA__ACF41878

SEQ ID NO: 130389 - RNA, 1701 nt, Artificial Sequence
  derived and/or modified CDS sequence (opt3) from hemagglutinin__InfluenzaA__ACF41922
augaaggccaaacugcucgugcuucugugcgcuuucaccgcaacauacgccgacacuaucuguauuggcuaucacgcgaacaauagcacggauaccgucgacacaguuuuggagaagaacgugacuguaacccauuccgugaauuuacuggaagauucucacaacgggaaacuaugcagacucaagggaauagcuccccugcagcuugguaauuguucagucgccggcuggauccuggggaacccuaaaugcgagaguuuguuuagcaaggaauccuggucuuacauugcagagacaccaaauccggaaaacggaaccuguuaucccggcuacuucgccgacuaugaggagcucagggaacaacugucgucagugagcaguuuugagcgguucgaaaucuuuccuaaggaguccucuuggccaaaucauacuguuacaaaaggugugaccgcuagcugcucccacaacgggaagucaaguuucuaccgcaaucugcucugguuaacggagaaaaacggacuguaucccaaucuuagcaagucuuacgucaacaauaaagaaaaggagguguugguacuguggggcguucaucacccuuccaacauucgagaucagcgugcaaucuaccacacugaaaacgccuaugugucagucgugagcagucauuacucuagaagguuuaccccagagauagcuaagcggcccaaagugcgcgaccaggaaggcagaaucaauuauuacuggacacuacucgagccuggggauacuauuaucuucgaggccaacggaaaucugauugcgccaugguaugcauuugcccuuuccagggguuucggcagcgggaucauaaccucgaacgcuucuauggacgaaugugaugccaagugccagacaccgcaaggagcaauuaauuccucacugcccuuucagaacguccacccuguuaccaucggcgaguguccaaaauacgugcggaguacgaaguugcgcaugguaacuggucuccgaaauauucccagcauccaguccagagggcuguucggagcuaucgccggcuuuauugaaggcggguggacaggaaugauagacgguugguauggcuaccaucaccagaacgagcaagggucuggauacgcggccgaucagaaaagcacccagaaugcaaucaacggcauuacuaauaaggugaacucagucaucgaaaagaugaauacacaguucaccgcuguggguaaggaguucaacaaguuagagaggcggauggaaaaucugaacaaaaagguugacgauggguuucucgacauauggacguauaacgccgagcuucugguguugcuagaaaauggccguacccuggacuuccacgauaguaacgucaaaaaucucuacgagaaggugaaaucccaacugaagaacaaugcuaaggaaauuggaaacggcugcuuugaguucuaucauaaauguaauaacgagugcauggaaagcguaaagaaugggacauacgacuauccuaaauacucugaggaaucaaaacuuaaccgcggaaaaaucgaugguguuaagcuggagaguaugggcguguaucagaucuuggccauuuacagcacugucgcauccucucucgugcuguuagucucgcugggggccaucagcuuuuggaugugcuccaauggaucacuacaguguagaauuugcauauga

SEQ ID NO: 130390 - RNA, 1689 nt, Artificial Sequence
  derived and/or modified CDS sequence (opt3) from hemagglutinin__InfluenzaA__ACF54389
auggccaucauuuaccugauacuccuuuucgcuaccgugagaggcgaccagaucugcauuggguaucacgcaaacaauagcacagagaaggucgauacuauccuggaaaggaacguuacggugacccaugccaaagacauuuuggagaagacacacaauggaaaauuauguaagcugaacgguauacccccucuagaacucggcgauugcuccaucgcgggguggcugcuuggaaauccagagugugaccggcuguugcgcguaccggaauggucuuacaucauggagaaagagaacccccgauauucacucugcuacccuggcagucugaaugauuaugaagaacugaagcaucucuuaagcuccgugaagcacuuugaaaaaguccguauucugccaaaggacagauggacucaacauaccacaaccggugggucuaaggcuugugccgugucgggaaaacccucauucuuuaggaacaugguuuggcuuacuaaaaagggcacaaauuacccuguggcaaagggcagcuauaacaauaccaguggggagcagauguugaucauuuggggaguccaccacccaaucgaugaggccgaacagcgggcucuguaccaggagguggguacguacguauccgcaucuacuagcacccuaaacaaacgcuccauacccgaaauugccgcuagaccugagguuaauggccucgggucaaggauggaguucaguuggacacugcuugacgugugggauacuaucaacuuugagagcaccggaaaucuggucgccccagaguauggcuucaagauuucuaaacgggguuccucagggaucaugaagacagaaggaaccuugggcaacugcgagacgaaaugucaaacuccgcucggcgcgaucaacacaacccugcccuuucauaaugugcacccuuuaacuauuggggaaugcccaaaguacgugaaaagcgagaagcugguccucgcaacaggacuucgcaacguuccccagauagaaagucgaggucuguucggcgccaucgcuggguuuauugagggaggcuggcaggguaugguggacgggugguauggcuaccaucacucuaaugagcagggauccggcuaugccgcagauaaggaaagcacccaaaaggcuuucgacgggaucacgaacaaaguaaauucggugauagagaaaaugaacacccaguuugaagccgucggaaaggaguucaauaacuuggagaaaagacuagaaaaucugaacaagaagauggaggaugguuuucucgacguguggacauacaaugcggaacugcuuguucugauggagaacgaaaggacuuuggacuuccacgauucuaaugugaaaaaccucuaugagaagguccggaugcagcugcgugacaaugugaaagaguuaggcaacggguguuucgaauuuuaccauaagugcgaugacgaguguaugaacuccguuaaaaauggaaccuacgauuauccuaaguacgaagaggaaucaaagcugaaacgcaacgagauuaagggcguaaaacuaaguagcauggguguguaucagauccucgccaucuacgcaacagucgcugggucccugucucuugccauuaugguggcuggcaucagcuucuggaugugcucaaauggaaguuugcaaugcagaauuuguauauga

SEQ ID NO: 130391 - RNA, 1701 nt, Artificial Sequence; identical to SEQ ID NO: 130364
  derived and/or modified CDS sequence (opt3) from hemagglutinin__InfluenzaA__ACF54400

SEQ ID NO: 130392 - RNA, 1701 nt, Artificial Sequence; identical to SEQ ID NO: 130366
  derived and/or modified CDS sequence (opt3) from hemagglutinin__InfluenzaA__ACF54411

SEQ ID NO: 130393 - RNA, 1701 nt, Artificial Sequence; identical to SEQ ID NO: 130366
  derived and/or modified CDS sequence (opt3) from hemagglutinin__InfluenzaA__ACF54422

SEQ ID NO: 130394 - RNA, 1701 nt, Artificial Sequence; identical to SEQ ID NO: 130377
  derived and/or modified CDS sequence (opt3) from hemagglutinin__InfluenzaA__ACF54433

SEQ ID NO: 130395 - RNA, 1701 nt, Artificial Sequence; identical to SEQ ID NO: 130366
  derived and/or modified CDS sequence (opt3) from hemagglutinin__InfluenzaA__ACF54444

SEQ ID NO: 130396 - RNA, 1701 nt, Artificial Sequence; identical to SEQ ID NO: 130384
  derived and/or modified CDS sequence (opt3) from hemagglutinin__InfluenzaA__ACF54466

SEQ ID NO: 130397 - RNA, 1689 nt, Artificial Sequence
  derived and/or modified CDS sequence (opt3) from hemagglutinin__InfluenzaA__ACF54477
auggccaucauuuaccugauacuccuuuucaccgcugugagaggcgaccagaucugcauuggguaucacgcaaacaauagcacagagaaggucgauacuauccuggaaaggaacguuacggugacccaugccaaagacauuuuggagaagacacacaauggaaaauuauguaagcugaacgguauacccccucuagaacucggcgauugcuccaucgcgggguggcugcuuggaaauccagagugugaccggcuguugucuguaccggaauggucauacaucauggagaaagagaacccccgcgauggccucugcuauccugguaguuuuaaugacuacgaggaacugaagcaucugcucagcuccgugaagcacuucgaaaaagucaagauuuuaccaaaagaucgauggacucaacauaccacaaccgggggaucucgugcuugugccgugucgggcaaccccucauuuuucagaaauaugguuuggcugacuaagaaaggcagcaacuauccuguggcaaaggggaguuacaauaacacauccggagagcagaugcuuaucauuugggguguccaccacccaaaugacgagaccgaacagaggacguuguaucagaacgugggcacuuacguaucuguugggaccagcacacugaauaagcgguccacucccgauaucgccacccgcccuaaagugaacggacuaggcucaagaauggaguuuaguuggacacuccuggacaugugggauaccauaaacuucgaaagcacggguaaucuuauugcuccagaguacggguuuaagaucucuaaaaggggauccucaggcauuaugaagacugaaggcacacuggagaacugcgagaccaaaugucaaacuccguugggggcaaucaauacaacccuccccuuccauaacguccacccucugacgaucggagaaugcccaaaguaugugaaaagcgagaaguuagugcuggccaccggucuccggaaugucccccagauugaaagucgcggccuuuuuggggcuauagccggauucaucgagggcgguuggcaggggaugguugacggcugguacggauaucaucacucuaacgaucagggcuccggguacgcggcagacaaggaaagcacacaaaaagccuuugacggaauuacuaauaaggugaacucgguaaucgagaaaaugaauacccaguucgaggcuguggguaaggaauuuucuaaccuggagcgaagauuggaaaaucuaaacaaaaagauggaggauggcuuccuggacgucuggacauauaaugccgaacuccuggugcuuauggagaacgagaggacucuggauuuccacgacuccaauguuaagaacuuguacgauaaagugcggaugcagcuccgugacaacgucaaggaacuggggaauggauguuuugaguucuaucauaaaugcgaugacgaauguaugaacucagugaagaauggcaccuacgauuacccuaaauaugaggaggaaaguaaguuaaaccgcaaugagauaaaggguguaaaacugagcuccauggggguuuaccagauucuagcaaucuaugcuacaguggccggcucucucagccuggcgaucaugauggccggaauuucauuuuggaugugcaguaacggcucccuucaaugcagaaucuguauuuga

SEQ ID NO: 130398 - RNA, 1689 nt, Artificial Sequence
  derived and/or modified CDS sequence (opt3) from hemagglutinin__InfluenzaA__ACF54499
auggccaucauuuaccugauacuccuuuucaccgcugugagaggcgaccagaucugcauuggguaucacgcaaacaauagcacagagacugucgauacgauccuggaaaggaacguuaccgugacacaugccaaggacauuuuggagaaaacucacaauggaaaguuauguaaacugaacgguauacccccucuagaacucggcgauugcuccaucgcgggguggcugcuuggaaauccagagugugaccggcuguugucuguaccggaauggucauacaucauggagaaggagaacccccgcgauggccucugcuauccugguaguuuuaaugacuacgaggaacugaaacaucugcucagcuccgugaagcacuucgaaaaggucaaaauuuuaccaaaggaucgauggacccaacauacaaccacugggggaucucgugcuugugccgugucgggcaaccccucauuuuucagaaauaugguuuggcugacaaagaagggcagcaacuauccuguggcaaaagggaguuacaauaacaccuccggagagcagaugcuuaucauuugggguguccaccacccaaaugacgagacggaacagaggacuuuguaucagaacgugggcaccuacguaucuguugggacaagcacucugaauaagcgguccacccccgauaucgccacacgcccuaaggugaacggacuaggcucaagaauggaguuuaguuggacccuccuggacaugugggauacgauaaacuucgaaagcacugguaaucuuauugcuccagaguacggguuuaaaaucucuaagaggggauccucaggcauuaugaaaacagaaggcacccuggagaacugcgagacuaagugucaaacaccguugggggcaaucaauaccacgcuccccuuccauaacguccacccucugaccaucggagaaugcccaaaauaugugaaaagcgagaaauuagugcuggccacaggucuccggaaugucccccagauugaaagucgcggccuuuuuggggcuauagccggauucaucgagggcgguuggcaggggaugguugacggcugguacggauaucaucacucuaacgaucagggcuccggguacgcggcagacaaggaaagcacucaaaaggccuuugacggaauuaccaauaaagugaacucgguaaucgagaagaugaauacacaguucgaggcuguggguaaagaauuuucuaaccuggagcgaagauuggaaaaucuaaacaagaaaauggaggauggcuuccuggacgucuggacuuauaaugccgaacuccuggugcuuauggagaacgagaggacccuggauuuccacgacuccaauguuaagaacuuguacgauaaggugcggaugcagcuccgugacaacgucaaagaacuggggaauggauguuuugaguucuaucauaagugcgaugacgaauguaugaacucagugaaaaauggcacauacgauuacccuaaguaugaggaggaaaguaaauuaaaccgcaaugagauaaaggguguaaagcugagcuccauggggguuuaccagauucuagcaaucuaugcuaccguggccggcucucucagccuggcgaucaugauggccggaauuucauuuuggaugugcaguaacggcucccuucaaugcagaaucuguauuuga

SEQ ID NO: 130399 - RNA, 1689 nt, Artificial Sequence; identical to SEQ ID NO: 130398
  derived and/or modified CDS sequence (opt3) from hemagglutinin__InfluenzaA__ACF54510

SEQ ID NO: 130400 - RNA, 1689 nt, Artificial Sequence; identical to SEQ ID NO: 130398
  derived and/or modified CDS sequence (opt3) from hemagglutinin__InfluenzaA__ACF54521

SEQ ID NO: 130401 - RNA, 1701 nt, Artificial Sequence
  derived and/or modified CDS sequence (opt3) from hemagglutinin__InfluenzaA__ACF54532
augaagaccaucauugcccugagcuacauacucugccuuguguucgcucagaaacugcccggcaacgacaauuccacagcaacuuuguguuuagggcaccaugccgucccuaacggaacgaucguuaagaccauuacaaaugaucaaaucgaggugacuaacgcgaccgaacugguacagucuucaaguacaggugagauuugcgacagcccacaccagauccuagauggcgaaaauuguacccucauagacgcucugcuuggggauccgcagugcgacggauuucaaaacaaaaagugggaucuguucguggagagauccaaagccuauucuaauuguuaccccuaugacgucccugauuacgcaucguugaggucacucguggccagcaguggcacucuggaauuuaacaaugaguccuucaacuggacagguguuacccagaaugggacgucuagcgcuugcauccggcgcuccaacaauucauuuuucagucgacugaacuggcucacucauuuaaaguuuaaguauccagcacugaaugugaccaugcccaacaacgagaaauucgacaaacuuuacauuuggggaguccaccauccuggcacagauaaugaccagaucuuuuuguaugcccaggcuagcggccguauuacugugucuaccaagagaucccaacagacaguaaucccaaacauagggucaaggccccggguucgcaauauuccuagcagaaucaguauuuacuggaccaucgugaagccaggagauauccugcuaauuaacucuacggguaaucucauagccccgaggggcuacuucaaaauccgguccgggaagaguucgauuaugcgcucugacgcgcccaucggaaaguguaacuccgaaugcauaacuccuaauggcucaauuccaaacgacaaacccuuucagaaugucaaccgaaucacauauggugcauguccuagauacgugaagcagaauacccugaaacuugccacugggaugaggaacgugccagagaagcaaacacggggaaucuucggcgcuauugccggcuuuaucgaaaaugggugggagggaauggucgaugguugguauggcuuccgucaccagaacagugaggggauuggacaggcagcugaccugaaaagcacccaagccgcgauagaucagaucaauggcaaguugaaccgccucauugguaaaacgaacgaaaaguuccaccagaucgagaaggaauuuuccgagguugaagggagaauccaggaccuggagaaauacguggaggauaccaagauugacuuauggucuuauaaugccgaacugcucguagcacuugagaaccaacauacaauagaucugacugacagcgaaaugaauaaauuguucgagaagaccaaaaagcagcuaagggaaaacgcugaggauaugggcaauggaugcuuuaagaucuaccacaaaugugacaacgccugcauuggcucaauccggaaugggacauaugaucaugacguguaccgagacgaggcucugaacaaucgcuuccagauuaagggagucgaacucacuagcgguuacaaagauuggauccuguggauauccuuugccaucagcugcuuccuucuguguguggcauugcucggcuuuauuaugugggccugccagaaggggaacaucagauguaauauuugcaucuga

SEQ ID NO: 130402 - RNA, 1701 nt, Artificial Sequence
  derived and/or modified CDS sequence (opt3) from hemagglutinin__InfluenzaA__ACF54543
augaagaccaucauugcccugagcuacauacucugccuuguguucgcucagaaacugcccggcaacgacaauuccacagcaacuuuguguuuagggcaccaugccgucccuaacggaacgaucguuaagaccauuacaaaugaucaaaucgaggugacuaacgcgaccgaacugguacagucuucaaguacaggugagauuugcgacagcccacaccagauccuagauggcgaaaauuguacccucauagacgcucugcuuggggauccgcagugcgacggauuucaaaacaaaaagugggaucuguucguggagagauccaaagccuauucuaauuguuaccccuaugacgucccugauuacgugucguugaggucacucguugcaagcaguggcacucuggaauuuaacaaugaguccuucaacuggacaggugugacccagaaugggacgucuagcgccugcauccggcgcuccaacaauucauuuuucagucgacugaacuggcucacucauuuaaaguuuaaguauccagcucugaaugucaccaugcccaacaacgagaauuucgacaaacuuuacauuuggggagugcaccauccuggcacagauaacgaccagaucuuuuuguaugcacaggccagcggccguauuacuguaucuaccaagagaucccaacagacaguuaucccaaauauagggucaaggccccgggugcgcaacauuccuagcagaaucaguauuuacuggaccaucgucaaaccaggagauauccugcuaauuaauucuacggguaaccucauagcuccgaggggcuacuucaagauccgguccgggaaaagcucgauuaugcgcucugacgcccccaucggaaaguguaauuccgaaugcauaacuccuaacggcucaauuccaaaugacaagcccuuucagaacgugaaucgaaucacauauggugcguguccuagauacgugaaacagaacacccugaagcuggcaacugggaugaggaaugucccagagaaacaaacacggggaaucuucggcgccauugcuggcuuuaucgaaaacgggugggagggaaugguugaugguugguauggcuuccgucaccagaauagugaggggauuggacaggccgcagaccuuaagagcacccaagcugccauagaucagaucaacggcaaauugaaccgccucauugguaagacgaaugaaaaauuccaccagaucgagaaggaauuuuccgagguggaagggagaauccaggaccuggagaaguacguagaggauaccaaaauugacuuauggucuuauaacgcggaacugcucguggcccuugagaaucaacauacaauagaucugacugacagcgaaaugaacaaguuguucgagaaaaccaagaaacagcuaagggaaaaugcagaggaucugggcaacggaugcuuuaagaucuaccacaagugugacaaugcuugcauuggcucaauccggaacgggacauaugaucaugacgucuaccgagacgaggcccucaauaaccgcuuccagauuaaaggaguggaacugaagagugguuacaaagauuggauccuuuggauauccuuugcuaucagcugcuuccuguuguguguugcccuccugggcuuuauuaugugggcaugccagaaggggaauaucagauguaacauuugcaucuga

SEQ ID NO: 130403 - RNA, 1701 nt, Artificial Sequence
  derived and/or modified CDS sequence (opt3) from hemagglutinin__InfluenzaA__ACF54565
augaagaccaucauugcccugagcuacauacucugccuuguguucucccagaaacugcccggcaacgacaauucuacagcuacuuuguguuuagggcaccaugcagucccuaacggaacgaucguuaagaccauuacaaaugaucaaaucgaggugacuaacgccaccgaacugguacagucaaguagcacagguggcauuugcgacuccccacaccagauccuagauggggagaauuguacccucauagacgcgcugcuuggagauccgcagugcgacggcuuucaaaacaaaaagugggaucuguucguggaaagaucuaaggcuuauucgaauuguuaccccuaugacgucccugauuacgccucauugaggagccucguggcaaguuccgguacucuggaguuuaacaaugaaucuuucaacugggccgggguuacacagaauggaaccagcuccgcuugcaagcggcgcucaaacaagagcuuuuucagucgacugaauuggcucacgcauuuaaaauauaaguacccagcacugaacgugacuaugcccaauaacgagaaauuugacaaacuuuauaucuggggcguccaccauccugugaccgauucugaccagauuuccuuguacgcccaggcuucaggccguaucacaguaagcacuaaaagaagucaacagaccguuauuccaaacaucggguacaggccccgggugcgcgauauaucuuccagaauuagcaucuauuggacaauugucaagccuggagacauccugcuaaucaauucgaccgguaaccucauugccccaaggggcuacuucaagauacggucugggaaauccucaaucaugcgcagugacgcgccgauuggaaaguguaauagcgagugcaucacgcccaacggcuccauaccuaaugauaaaccauuucagaacgugaaucgaauuacuuauggugcaugucccagauacgugaagcagaacacacugaaacuugccaccgggaugaggaaugucccugaaaagcaaacucggggaaucuucggcgcuaucgccggcuuuauugagaacgggugggaaggaaugguugacgguugguauggcuuccgucaccaaaauucugaggggacaggacaggcagcugaucugaaaagcacccaggccgcgaucaaccagauuaauggcaaguugaaccgccucauagguaagacgaaugagaaauuucaccagaucgaaaaggaguucucagaaguggaggggaggauucaggaccuggaaaaauacguagaggauaccaagaucgacuuauggaguuauaacgccgagcugcucguggcacuugaaaaccaacauacaaucgaucugacugacuccgagaugaauaaauuguucgaaagaaccaagaagcagcuacgggagaacgcugaagauaugggcaauggaugcuuuaaaauuuaccacaagugugacaacgccugcauagagagcauccgaaauggcacauacgaucaugacgucuaucgcgacgaggcucugaacaauagauuccagauuaaagggguggaacucaagucuggauacaaagauuggauccuguggauuucauuugccaucaguugcuuccuucuguguguugcauugcucgguuuuauaaugugggccugccagaagggcaacaucagguguaauauuugcaucuga

SEQ ID NO: 130404 - RNA, 1701 nt, Artificial Sequence
  derived and/or modified CDS sequence (opt3) from hemagglutinin__InfluenzaA__ACF54576
augaagaccaucauugcccugagcuacauacucugccuuguguucgcucagaaacugcccggcaacgacaauuccacagcaacuuuguguuuagggcaccaugccgucccuaacggaacgaucguuaagaccauuacaaaugaucaaaucgaggugacuaacgcgaccgaacugguacagucuucaaguacagguggcauuugcgacagcccacaccagauccuagauggggagaauuguacccucauagacgcucugcuuggagauccgcagugcgacggcuuucaaaacaaaaagugggaucuguucguggaaagauccaaagccuauucuaauuguuaccccuaugacgucccugauuacgcaucguugaggucacucguggccagcagugguacucuggaguuuaacgacgaauccuucaauuggacagggguuacccagaacggaacgucuagcuccugcaagcggcgcucaaauaacagcuuuuucagccgacugaauuggcucacucaguuaaaguuuaaauauccagcucugaacgugaccaugcccaauaacgagaaguucgauaaacuuuacaucuggggcguccaucacccugugacagacaacgaucagauuuuucuuuaugcacaagccucuggccguaucacuguauccaccaagagaucacagcagacaguuauuccaaauaucgggagcaggccccggauacgcaacauuccuaguagaaucucuauuuacuggaccaucgugaaaccaggagacauccugcuaauuaauuccacggguaaccucauagcuccgaggggcuacuucaagauccggagcgggaagucgucuauuaugcgcuccgacgcccccaucggaaaauguaauucagagugcauaacuccuaacggcaguauuccaaaugauaagcccuuucagaacgucaaucgaaucacauauggugcguguccuagauacgugaaacaaaacacccugaaguuggcaacugggaugaggaaugugccagaaaaacagacacggggaaucuucggcgccauugcuggcuuuaucgagaacgggugggaaggaauggucgacgguugguauggcuuccgucaucagaauagcgaggggauuggacaagccgcagaucugaaguccacccaggcugccauaaaccagaucaauggcaaauugaaccgccucauugguaagacgaacgagaaguuccaccagaucgaaaaagaguuuucugaaguugaggggagaauccaagaccuggaaaaguacguggaggauaccaaaauugacuuauggagcuauaaugcggagcugcucguagcccuugaaaaccagcacacaauagaucugacugacucagagaugaauaaguuguucgaaaggaccaaaaagcagcuacgggagaacgcagaagauaugggcaauggaugcuuuaagaucuaccauaaaugugacaacgcuugcauuggcaguauccgaaaugggacauaugaucacgacguguaccgcgacgaggcccugaacaauagauuccagauuaagggagucgagcucaaauccgguuacaaggauuggauccuguggauaaguuuugcuaucucuugcuuccuucuguguguggccuugcucggcuuuauuaugugggcaugccaaaaagggaacaucagguguaauauuugcaucuga

SEQ ID NO: 130405 - RNA, 1698 nt, Artificial Sequence
  derived and/or modified CDS sequence (opt3) from hemagglutinin__InfluenzaA__ACF54598
augaaggccaaacugcucgugcuucuguacgcuuucgucgcaaccgacgccgauacaaucugcauuggcuaucacgcgaacaauagcacugacacgguugauaccauauuugagaagaacguggcuguaacacauuccgugaauuuguuagaagacagacacaacgggaaacuguguaagcuaaaaggaaucgcaccccuccagcuggguaagugcaauauuaucggcuggcuucuggggaacccugagugugauucuuugcucccagccaggucauggaguuacauugucgaaacuccgaauagcgagaacggagccugcuaucccggcgacuucaucgauuacgaagaacugcgggagcaacuguccucugugucgucacucgaacgcuuugagauauucccuaaggaaagcaguuggccaaaucauaccuuuaacgguguuacagcuuccuguucucaccgagggaaaagcuccuucuaucguaauuuacuguggcuuaccaagaaaggagacucauaccccaaguugacuaacaguuaugugaauaacaaaggcaaggagguccuggugcuauggggcguacaucacccuucuagcuccgaugagcagcagucacucuacagcaaugggaacgcauacguuaguguggccucuuccaacuauaauagaagguuuacaccagaaaucgcugcccggcccaaggucaaagaccagcacggacgcaugaacuacuauuggacccugcuugagccuggugauacgauuaucuucgaagcgacuggcaaucugauugcaccaugguacgccuuugcuuugagcagaggguucgagucgggaaucauaaccucuaacgccuccaugcaugaaugcaauacaaagugucaaacuccgcagggcucaauuaacaguaaucuccccuuucagaacauccacccugugaccauuggugagugcccaaaauaugugaggagcacaaagcugcggauggucaccggguuacgcaauauccccuccauccaguaccgaggacuguucggcgcaauugcuggcuuuauagaagggggauggacggguaugaucgacggcugguauggguaccaucaccaaaacgaacagggaucuggcuacgccgcggaucagaaaagcacucagaaugccauuaacgguaucacaaauaagguuaacucaauaauugagaaaaugaauacccaauucacugcaguggggaaggaguucaacaaccucgagaagagaauggaaaaucuuaacaaaaagguagacgacggcuuucuggauaucuggacauauaaugcugaguugcuagugcugcucgagaacggaaggacccuggacuuccacgaucuuaaugucaaaaaccuguacgaaaaggugaaaagucaguugaagaauaacgccaaggagaucggcaauggguguuuugaguucuaucauaaaugcgacaacgaguguauggaauccguucggaauggaacguacgauuauccuaaguacagcgaggagucuaaacucaaccgugaaaagauugacggugugaaacuggagucaaugggcgucuaucagaucuuagcuauuuacaguaccguggccagcucccugguacuacucguuucucugggggcaauaucguuuuggaugugcagcaauggaucccuucaaugccgcaucuguauuuga

SEQ ID NO: 130406 - RNA, 1704 nt, Artificial Sequence
  derived and/or modified CDS sequence (opt3) from hemagglutinin__InfluenzaA__ACG50699
auggagaagaucgugcugcuccuugccauugucagccugguuaaauccgaccagauaugcaucggcuaccacgcuaacaauucuaccgaacaaguggauacaauuauggagaagaacguaacugugacgcaugcacaggacaucuuggaaaagacccacaaugggaaguuaugugaucuggacggagucaaaccccuaauucucagagauugcucaguggccgguuggcugcuuggcaacccuaugugugacgaguucaucaauguuccagaauggaguuauaugguggagaaggcgaacccggcuaaugaucugugcuaccccgggaacuuuaaugacuaugaggaauugaagcaucuccugagcaggauaaaccacuucgagaaaauccagauuaucccuaaguccucuuggucggaucaugaagccucacugggagucagcagugcauguccauaccagggcuccucuagcuuuuuccggaaugugguauggcucauuaaaaagaacaaugccuaucccacaaucaaacgcuccuacaacaauacuaaccaagaggacuuacugguucuuugggguauacaccacccuaacgaugaggcugaacagacccgauuguaucagaauccaacaaccuacauuucaguggggacaaguacucugaaccagcgucuaauccccaagauugcaaccagaagcaaggucaauggacaaucuggcaggauggacuuuuucuggacgauccucaaaccuaacgaugccaucaauuuugaguccaacggcaauuucauugcuccagaauacgccuauaagauagugaaaaagggggacucagcgaucaugaaaagcgagguggaauacggaaacugcaauacuaagugucagaccccgaugggugcaauuaacaguucuaugcccuuucauaauauccacccucugacaauaggcgagugcccaaaauaugucaaguccaacaaacuuguucuggccacuggguugcggaauagcccccagcgcgagagaaggcggaaacgcggacucuucggcgcuauugccgguuuuaucgaagggggauggcagggcaugguggacggcugguacggguaucaucacucgaacgagcaaggaucugguuacgcagcugauaaggaauccacccagaaagccaucgacggcguaacaaauaaggugaacucaauuaucgauaaaaugaacacccaguucgaggcggucgggcgagaauuuaauaaccuggagagaaggauugagaauuuaaacaagaagauggaagacggauuccuggauguguggacguauaaugccgagcuccuuguucugauggaaaacgagcggacuuuggacuuccacgauaguaaugugaaaaaccuauacgacaagguccgucugcaacuccgcgauaaugcaaaagaacugggcaacgguuguuuugaguucuaccauaagugcgacaaugaguguauggaaagcgugagaaacgggacauaugauuacccucaguauuccgaggaagcuaggcuuaaacgggaggagauaucuggcguaaagcuggaaagcaucggaaccuaccagauuuugucaaucuauaguacuguugccuccagccucgcucuggccaucaugguggcaggcuuaucucuguggaugugcucaaaugggagucuacagugccgaauuuguauauga

SEQ ID NO: 130407 - RNA, 1701 nt, Artificial Sequence; identical to SEQ ID NO: 129976
  derived and/or modified CDS sequence (opt3) from hemagglutinin__InfluenzaA__ACG70142

SEQ ID NO: 130408 - RNA, 1701 nt, Artificial Sequence; identical to SEQ ID NO: 129976
  derived and/or modified CDS sequence (opt3) from hemagglutinin__InfluenzaA__ACG70153

SEQ ID NO: 130409 - RNA, 1701 nt, Artificial Sequence
  derived and/or modified CDS sequence (opt3) from hemagglutinin__InfluenzaA__ACG80410
augaagaccaucauugcccugagcuacauacucugccuuguguucgcucagaaacugcccggcaacgacaauuccacagcaacuuuguguuuagggcaccaugccgucccuaacggaacgaucguuagaaccauuacaaaugaucaaaucgaggugacuaacgcgaccgaacugguacagucuucaaguacaggugagauuugcgacagcccacaccagauccuagauggcgaaaauuguacccucauagacgcucugcuuggggauccgcagugcgacggauuucaaaacaagaaaugggaucuguucguggagagguccaaggccuauucuaauuguuaccccuaugacgucccugauuacgcaucguugcggucacucguggccagcaguggcacucuggaauuuaacaaugaguccuucaacuggacagguguuacccagaaugggacgucuagcgcuugcauccgccgauccaacaauucauuuuucagucgucugaacuggcucacucauuuaagauuuaaauauccagcacugaaugugaccaugcccaacaacgagcaguucgacaaacuuuacauuuggggaguccaccauccuggcacagauaaugaccagaucuuuuuguaugcccaagcuagcggcaggauuacugugucuaccaagcggucccagcagacaguaaucccaaacauagggucacgccccagaguuaggaauauuccuagccggaucaguauuuacuggaccaucgugaagccaggagauauccugcuaauuaacucuacggguaaucucauagccccgcgcggcuacuucaagauccgaaacgggaaauccagcauuaugagaucggacgcgcccaucggaaaguguaauucugaaugcauaacuccuaacggcuccauuccaaaugacaaacccuuucagaacgucaauaggaucacauauggugcauguccucgguacgugaagcaaaacacccugaaacuugccacugggaugcguaaugugccagagaagcagacacgcggaaucuucggcgcuauugccggcuuuaucgaaaacgggugggagggaauggucgaugguugguauggcuucagacaccaaaauucagaggggaggggacaggcagcugaccugaagaguacccaggccgcgauugaucagauaaacggcaaauugaaccggcucaucgguaagacgaaugaaaaauuccaccagauugagaaggaauuuagcgagguugaagggcgaauccaagaccuggagaaauacguggaggauaccaagaucgacuuaugguccuauaacgccgaacugcucguagcacuugagaaucagcauacaauugaucugacugacucugaaaugaacaaguuguucgagaaaaccaagaaacagcuacgcgaaaaugcugaggauaugggcaacggaugcuuuaagauauaccacaaaugugacaaugccugcaucggcagcauuagaaacgggacauaugaucaugacguguacagggacgaggcucugaauaaccgguuccagaucaagggagucgaacucaagucagguuacaaagauuggauucuguggaucaguuuugccauauccugcuuccuucuguguguggcauugcucggcuuuaucaugugggccugccaaaaggggaauauucgcuguaacaucugcauuuga

SEQ ID NO: 130410 - RNA, 1701 nt, Artificial Sequence
  derived and/or modified CDS sequence (opt3) from hemagglutinin__InfluenzaA__ACG80420
augcagaccaucauugcccugagcuacauacucugccuuguguucgcucaaaagcugcccggcaacgacaauuccacagcaacuuuguguuuagggcaccaugccgucccuaacggaacgaucguuagaaccauuacaaaugaucagaucgaggugacuaacgcgaccgaacugguacagucuucaaguacaggugagauuugcgacagcccacaccagauccuagauggcgaaaauuguacccucauagacgcucugcuuggggauccgcaaugcgacggauuucagaacaaaaagugggaucuguucguggagagguccaaagccuauucuaauuguuaccccuaugacgucccugauuacgcaucguugcggucacucguggccagcaguggcacucuggaauuuaacaaugaguccuucaacuggacagguguuacccagaaugggacgucuagcgcuugcauccgccgauccaacaauucauuuuucagucgucugaacuggcucacucauuuaagauuuaaguauccagcacugaaugugaccaugcccaacaacgagcaguucgacaaacuuuacauuuggggaguccaccauccuggcacagauaaugaccaaaucuuuuuguaugcccaggcuagcggcaggauuacugugucuaccaagcggucccagcagacaguaaucccaaacauagggucacgccccagaguuaggaauauuccuagccggaucaguauuuacuggaccaucgugaagccaggagauauccugcuaauuaacucuacggguaaucucauagccccgcgcggcuacuucaaaauccgaaacgggaaguccagcauuaugagaucggacgcgcccaucggaaaauguaauucugaaugcauaacuccuaacggcuccauuccaaaugacaagcccuuucaaaacgucaauaggaucacauauggugcauguccucgguacgugaaacagaacacccugaaacuugccacugggaugcguaaugugccagagaagcagacacgcggaaucuucggcgcuauugccggcuuuaucgaaaacgggugggagggaauggucgaugguugguauggcuucagacaccaaaauucagaggggaggggacaggcagcugaccugaagaguacccaggccgcgauugaucagauaaacggcaaguugaaccggcucaucgguaaaacgaaugaaaaguuccaccaaauugagaaagaauuuagcgagguugaagggcgaauccaggaccuggagaaguacguggaggauaccaaaaucgacuuaugguccuauaacgccgaacugcucguagcacuugagaaucagcauacaauugaucugacugacucugaaaugaacaaguuguucgagaagaccaaaaagcagcuacgcgaaaaugcugaggauaugggcaacggaugcuuuaaaauauaccacaagugugacaaugccugcaucggcagcauuagaaacgggacauaugaucaugacguguacagggacgaggcucugaauaaccgguuccaaaucaaaggagucgaacucaagucagguuacaaggauuggauucuguggaucaguuuugccauauccugcuuccuucuguguguggcauugcucggcuuuaucaugugggccugccagaaagggaauauucgcuguaacaucugcauuuga

SEQ ID NO: 130411 - RNA, 1701 nt, Artificial Sequence; identical to SEQ ID NO: 130409
  derived and/or modified CDS sequence (opt3) from hemagglutinin__InfluenzaA__ACG80426

SEQ ID NO: 130412 - RNA, 1701 nt, Artificial Sequence; identical to SEQ ID NO: 130409
  derived and/or modified CDS sequence (opt3) from hemagglutinin__InfluenzaA__ACG80430

SEQ ID NO: 130413 - RNA, 1701 nt, Artificial Sequence
  derived and/or modified CDS sequence (opt3) from hemagglutinin__InfluenzaA__ACG80436
augaagaccaucauugcccugagcuacauacucugccuuguguucgcucagaaauuucccggcaacgacaauuccacagcaacucuguguuuggggcaccaugccgucccuaacggaacgaucguuaagaccauuacaaaugaucaaaucgaggugacuaacgcgaccgaauuaguacagucuucaaguacaggugagauuugcgacagcccacaccagauccuggauggcgaaaauuguacccuaauagacgcucuccugggggauccgcagugcgacggauuccaaaacaaaaagugggaucuuuuuguggagagauccaaagccuauucuaauuguuaccccuaugacgucccugauuacgcaucgcugaggucauugguggccagcaguggcacucucgaguucaacaaugaauccuuuaacuggacagguguuacccagaaugggacgucuagcgcuugcauccggcgcuccaacaauucauucuuuagucgacugaacuggcugacucaucuccguuucaaguauccagcauuaaaugugaccaugcccaacaacgagaauuuugacaagcuguacauuuggggaguccaccauccuggcacagauaacgaccagaucuuccuuuaugcccaggcuagcggcagaauuacugugucuaccaaaaggucccaacagacaguaaucccaaauauagggucacggccccgcguuagaaacauuccuagcaggaucaguauuuacuggaccaucgugaagccaggagauaucuugcugauuaauucuacggguaaccuaauagccccgcggggcuacuuuaaaauccgcuccggaaagagcucgauuaugcgaucugacgcgcccaucgggaaauguaauuccgaaugcauaacuccuaacggcucaauuccaaaugacaagcccuuccagaacgucaauagaaucacauauggugcauguccuagguacgugaagcagaacacccucaaacuggccacugggaugcggaaugugccagagaagcaaacacguggaaucuuuggcgcuauugccggcuucaucgaaaacgggugggagggaauggucgaugguugguauggcuuccgccaccagaauagugaggggauuggacaggcagcugaccuuaaaagcacccaagccgcgcuggaucagauaaacggcaaguugaacagacucaucgguaaaacgaaugaaaaguuucaccagauugagaaagaguucuccgaaguugaagggaggauccaggaccuggagaaguacguggaggauaccaagaucgacuuauggucuuauaacgccgaacugcucguagcacuugagaaucaacauacaauugaucugacugacagcgaaaugaacaaauuguuugagaagaccaaaaagcagcuacgggaaaaugcugaggauaugggcaacggaugcuucaaaauauaccacaagugugacaaugccugcaucggcucaauucgaaacgggacauaugaucauaauguguaccgcgacgaggcucugaacaauagauuucagaucaagggagucgaacucaaaagugguuacaaggacuggauucuguggaucuccuucgccauaagcugcuuucuucuguguguggcauugcucggcuucaucaugugggccugccagaaagggaacauuagguguaauaucugcauuuga

SEQ ID NO: 130414 - RNA, 1701 nt, Artificial Sequence
  derived and/or modified CDS sequence (opt3) from hemagglutinin__InfluenzaA__ACG80445
augaagaccaucauugcccugagcuacauacucugccuuguguucgcucagaaacugcccggcaacgacaauuccacagcaacuuuguguuuagggcaccaugccgucccuaacggaacgaucguuagaaccauuacaaaugaucaaaucgaggugacuaacgcgaccgaacugguacagucuucaaguacaggugagauuugcgacagcccacaccagauccuagauggcgaaaauuguacccucauagacgcucugcuuggggauccgcagugcgacggauuucaaaacaagaaaugggaucuguucguggagagguccaaggccuauucuaauuguuaccccuaugacgucccugauuacgcaucguugcggucacucguggccagcaguggcacucuggaauuuaacaaugaguccuucaacuggacagguguuacccagaaugggacgucuagcgcuugcauccgccgauccaacaauucauuuuucagucgucugaacuggcucacucauuuaagauuuaaauauccagcacugaaugugaccaugcccaacaacgagcaguucgacaaacuuuacauuuggggaguccaccauccuggcacagauaaugaccagaucuuuuuguaugcccaagcuagcggcaggauuacugugucuaccaagcggucccagcagacaguaaucccaaacauagggucacgccccagaguuaggaauauuccuagccggaucaguauuuacuggaccaucgugaagccaggagauauccugcuaauuaacucuacggguaaucucauagccccgcgcggcuacuucaagauccgaaacgggaaauccagcauuaugagaucggacgcgcccaucggaaaguguaauucugaaugcauaacuccuaacggcuccauuccaaaugacaaacccuuucagaacgucaauaggaucacauauggugcauguccucgguacgugaagcaaaacacccugaaacuugccacugggaugcguaaugugccagagaagcagacacgcggaaucuucggcgcuauugccggcuuuaucgaaaacgggugggagggaauggucgaugguugguauggcuucagacaccaaaauucagaggggaggggacaggcagcugaccugaagaguacccaggccgcgauugaucagauaaacggcaaauugaaccggcucaucgguaagacgaaugaaaaauuccaccagauugagaaggaauuuagcgagguugaagggcgaauccaagaccuggagaaauacguggaggauaccaagaucgacuuaugguccuauaacgccgaacugcucguagcacuugagaaucagcauacaauugaucugacugacucugaaaugaacaaguuguucgagaaaaccaagaaucagcuacgcgaaaacgcugaggauaugggcaauggaugcuuuaaaauauaccacaagugugacaacgccugcaucggcagcauuagaaaugggacauaugaucaugacguguacagggacgaggcucugaacaaucgguuccagaucaaaggagucgaacucaagucagguuacaaggauuggauucuguggaucaguuuugccauauccugcuuccuucuguguguggcauugcucggcuuuaucaugugggccugccaaaaagggaacauucgcuguaauaucugcauuuga

SEQ ID NO: 130415 - RNA, 1701 nt, Artificial Sequence; identical to SEQ ID NO: 130409
  derived and/or modified CDS sequence (opt3) from hemagglutinin__InfluenzaA__ACG80454

SEQ ID NO: 130416 - RNA, 1701 nt, Artificial Sequence; identical to SEQ ID NO: 130409
  derived and/or modified CDS sequence (opt3) from hemagglutinin__InfluenzaA__ACG80463

SEQ ID NO: 130417 - RNA, 1701 nt, Artificial Sequence
  derived and/or modified CDS sequence (opt3) from hemagglutinin__InfluenzaA__ACG80472
augaagaccaucauugcccugagcuacauacucugccuuguguucgcucagaaacugcccggcaacgacaauuccacagcaacuuuguguuuagggcaccaugccgucccuaacggaacgaucguuagaaccauuacaaaugaucaaaucgaggugacuaacgcgaccgaacugguacagucuucaaguacaggugagauuugcgacagcccacaccagauccuagauggcgaaaauuguacccucauagacgcucugcuuggggauccgcagugcgacggauuucaaaacaagaaaugggaucuguucguggagagguccaaggccuauucuaauuguuaccccuaugacgucccugauuacgcaucguugcggucacucguggccagcaguggcacucuggaauuuaacaaugaguccuucaacuggacagguguuacccagaaugggacgucuagcgcuugcauccgccgauccaacaauucauuuuucagucgucugaacuggcucacucauuuaagauuuaaauauccagcacugaaugugaccaugcccaacaacgagcaguucgacaagcuguacauuuggggaguccaccauccuggcacagauaaugaccagaucuuuuuguaugcccaagcuagcggcaggauuacugugucuaccaagcggucccagcagacaguaaucccaaacauagggucacgccccagaguuaggaauauuccuagccggaucaguauuuacuggaccaucgugaaaccaggagauauccugcuaauuaacucuacggguaaucucauagccccgcgcggcuacuucaagauccgauccgggaaaagcucgauuaugagaucugacgcgcccaucggaaaguguaacuccgaaugcauaacuccuaauggcucaauuccaaacgacaaacccuuucagaaugucaacaggaucacauauggugcauguccucgguacgugaagcaaaauacccugaaacuugccacugggaugcguaacgugccagagaagcagacacgcggaaucuucggcgcuauugccggcuuuaucgaaaaugggugggagggaauggucgaugguugguauggcuucagacaccagaacagugaggggauuggacaagcagcugaccuuaagagcacccaggccgcguuggaucagauaaauggcaaacucaacaggcugaucgguaagacgaacgaaaaauuccaccagauugagaaggaauuuuccgagguugaagggcggauccaagacuuagagaaauacguggaggauaccaagaucgaccuguggucuuauaaugccgaacuccuuguagcacuggagaaccagcauacaauugauuugacugacagcgaaaugaauaagcuauucgagaaaaccaagaaacagcugcgagaaaacgcugaggauaugggcaauggaugcuuuaagauauaccacaaaugugacaacgccugcaucggcucaauucgcaaugggacauaugaucauaacguguacagagacgaggcucucaauaacagguuccagaucaagggagucgaacugaagagugguuacaaagacuggauucuuuggaucuccuuugccauaagcugcuuccuguuguguguggcacuccugggcuuuaucaugugggccugccaaaaggggaauauucgguguaacaucugcauuuga

SEQ ID NO: 130418 - RNA, 1701 nt, Artificial Sequence
  derived and/or modified CDS sequence (opt3) from hemagglutinin__InfluenzaA__ACH69558
augaagaccaucauugcccugagcuacauacucugccuuguguucgcucagaaacugcccggcaacgacaauuccacagcaacuuuguguuuagggcaccaugccgucccuaacggaacgaucguuaagaccauuacaaaugaucaaaucgaggugacuaacgcgaccgaacugguacagucuucaaguacagguggcauuugcaauagcccacaccagauccuagacggggagaacuguacccucauagaugcucugcuuggagacccgcagugcgauggcuuucaaaauaaaaagugggaccuguucguggaaagauccaaagccuauucuaacuguuaccccuaugaugucccugacuacgcaucguugaggucacucguggccagcagugguacucuggaguuuaauaacgaauccuucaauuggacagggguuacccagaacggaacgucuagcgcuugcaagcggcgcuccaauaacucauuuuucagucgacugaauuggcucacucauuuacguuuuaaguauccagcacugaacgugaccaugcccaacaaugagaaauucgauaaguuguacaucuggggcguccaccauccuggcacagacaacgaucagauuuuucuuuaugcccaggcuagcgggagaaucacugugucuaccaaaaggucccaacagacaguaauuccaaauaucggaucacggccccgcguuagaaacauaccuagcaggauuaguaucuacuggaccauugugaagccaggugacauccugcuaaucaauucuacgggcaaccucauugccccgcggggguacuucaaaauacgcuccggaaagagcucgaucaugcgaucugaugcgcccauuggcaaguguaauuccgagugcaucacuccuaacgguucaauaccaaaugacaaacccuuucagaacgucaauagaauuacauauggggcauguccuagguacgugaagcagaacacccugaaacuugccacuggaaugcggaaugugccagaaaagcaaacacguggcaucuucggcgcuaucgccggguuuauugagaacggaugggaagguauggucgacggcugguauggguuccgccaccagaauagugagggaaucggccaggcagcugaucugaaaagcacccaagccgcgauuaaccagauaaacgguaaguugaauagacucaucgggaaaacgaacgagaaguuccaccagauugaaaaggaguuuuccgaaguugagggcaggauccaggaccuggaaaaauacguggaggauaccaagaucgacuuauggucuuauaaugccgagcugcucguagcacuugaaaaccaacauacaauugaucugacugacagcgagaugaauaaauuguucgaacggaccaagaaacagcuacgagagaacgcugaagauaugggaaauggcugcuuuaagauauaccacaagugugacaacgccugcaucgggucaauucgcaauggaacauaugaucaugacguguacagagaugaggcucugaacaauagguuccagaucaaaggugucgagcucaagaguggcuacaaagacuggauucuguggaucuccuuugccauaagcugcuuccuucuguguguggcauugcucggguuuaucaugugggccugccagaagggaaacauucgguguaauaucugcauuuga

SEQ ID NO: 130419 - RNA, 1701 nt, Artificial Sequence
  derived and/or modified CDS sequence (opt3) from hemagglutinin__InfluenzaA__ACH69569
augaagaccaucauugcccugagcuacauacucugccuuguguucgcucagaaacugcccggcaacgacaauuccacagcaacuuuguguuuagggcaccaugccgucccuaacggaacgaucguuaagaccauuacaaaugaucaaaucgaggugacuaacgcgaccgaacugguacagucuucaaguacagguggcauuugcaauagcccacaccagauccuagacggggagaacuguacccucauagaugcucugcuuggagacccgcagugcgauggcuuucaaaauaaaaagugggaccuguucguggaaagauccaaagccuauucuaacuguuaccccuaugaugucccugacuacgcaucguugaggucacucguggccagcagugguacucuggaguuuaauaacgaauccuucaauuggacagggguuacccagaacggaacgucuagcgcuugcaagcggcgcuccaauaacucauuuuucagucgacugaauuggcucacucauuuaaaguuuaaauauccagcacugaacgugaccaugcccaacaaugagaaguucgauaaacuuuacaucuggggcguccaccauccuggcacagacaacgaucagauuuuucuuuaugcccaggcuagcgggcguaucacugugucuaccaagagaucccaacagacaguaauuccaaauaucggaucaaggccccggguucgcaacauaccuagcagaauuaguaucuacuggaccauugugaaaccaggugacauccugcuaaucaauucuacgggcaaccucauugccccgaggggguacuucaagauacgguccggaaagagcucgaucaugcgcucugaugcgcccauuggcaaauguaauuccgagugcaucacuccuaacgguucaauaccaaaugacaagcccuuucagaacgucaaucgaauuacauauggggcauguccuagauacgugaaacagaacagucugaaguuggccaccggaaugaggaaugugccagaaaaacaaacucggggcaucuucggcgcuaucgccggguuuauugagaacggaugggaagguauggucgacggcugguauggguuccgucaccagaauagcgagggaaucggccaggcagcugaucugaaguccacacaagccgcgauuaaccagauaaacgguaaauugaaucgccucaucgggaagaccaacgagaaguuccaccagauugaaaaagaguuuucugaaguugagggcagaauccaggaccuggaaaaguacguggaggauacgaaaaucgacuuauggagcuauaaugccgagcugcucguagcacuugaaaaccaacauaccauugaucugacagacucagagaugaauaaguuguucgaaaggacuaaaaagcagcuacgggagaacgcugaagauaugggaaauggcugcuuuaagauauaccacaaaugugacaacgccugcaucgggaguauucgaaauggaaccuaugaucaugacguguaccgcgaugaggcucugaacaauagauuccagaucaagggugucgagcucaaauccggcuacaaggacuggauucuguggaucagcuuugccauaucuugcuuccuucuguguguggcauugcucggguuuaucaugugggccugccagaaaggaaacauuagguguaauaucugcauuuga

SEQ ID NO: 130420 - RNA, 1701 nt, Artificial Sequence
  derived and/or modified CDS sequence (opt3) from hemagglutinin__InfluenzaA__ACH69580
augaagaccaucauugcccugagcuacauacucugccuuguguucgcucagaaacugcccggcaacgacaauuccacagcaacuuuguguuuagggcaccaugccgucccuaacggaacgaucguuaagaccauuacaaaugaucaaaucgaggugacuaacgcgaccgaacugguacagucuucaaguacagguggcauuugcgacagcccacaccagauccuagauggggagaauuguacccucauagacgcucugcuuggagauccgcagugcgacgauuuucaaaacaaaaagugggaccuguucguggaaagauccaaagccuauucuaauuguuaccccuaugaugucccugacuacgcaucguugaggucacucguggccagcaguggcacucuggaguuuaacaaugaauccuucaacuggacagguguuacccagaaugggacgucuagcgcuugcaagcggcgcuccaacaauucauuuuucagucgacugaacuggcucacucauuuaaaguuuaaauauccagcacugaaugugaccaugcccaacaacgagaaguucgauaaacuuuacaucuggggaguccaccauccuggcacagacaaugaucagaucuuuuuguaugcccaggcuagcggccguauuacugugucuaccaagagaucccaacagacaguaauuccaaacaucgggucaaggccccggguucgcaauauaccuagcagaauuaguaucuacuggaccauugugaaaccaggagacauccugcuaaucaacucuacggguaaucucauugccccgaggggcuacuucaagauacgguccggaaagagcucgaucaugcgcucugacgcgcccauugggaaauguaacuccgagugcaucacuccuaauggcucaauaccaaacgauaagcccuuucagaaugucaaccgaauuacauauggugcauguccuagauacgugaaacagaauacccugaagcuggccacugggaugaggaacgugccagaaaaacaaacacggggaaucuucggcgcuaucgccggcuuuauugagaaugggugggaaggaauggucgacgguugguauggcuuccgucaccagaacagugaggggaucggacaggcagcugaucuuaagagcacccaagccgcgauuaaucagauaaacggcaaauugaaccgccucaucgguaagacgaaugagaaguuccaccagauugaaaaagaguuuuccgaaguugaggggagaauccaggaccuggaaaaguacguggaggauaccaaaaucgacuuauggucuuauaacgccgagcugcucguagcacuugaaaaucaacauacaauugaucugacugacagcgagaugaacaaguuguucgaaaggaccaaaaagcagcuacgggagaaugcugaagauaugggcaacggaugcuuuaagauauaccacaaaugugacaaugccugcaucggcucaauucgaaacgggacauaugaucaugacguguaccgcgacgaggcucugaauaacagauuccagaucaagggagucgagcucaaaagugguuacaaggauuggauucuguggaucuccuuugccauaagcugcuuccuucuguguguggcauugcucggcuuuaucaugugggccugccagaaagggaauauuagguguaacaucugcauuuga

SEQ ID NO: 130421 - RNA, 1701 nt, Artificial Sequence
  derived and/or modified CDS sequence (opt3) from hemagglutinin__InfluenzaA__ACH69591
augaagaccaucauugcccugagcuacauacucugccuugcuuucgcacagaaacugcccggcaacgacaauuccacagccacuuuguguuuagggcaccaugcggugccuaacggaacgcuggucaagaccaucacaaaugaucaaauugagguuacuaacgcuaccgaacuugugcagucuucaaguacagguagaaucugcgacagcccacaccagauucucgauggcgagaauuguacccugaucgacgcccuucugggggauccgcauugcgacggauuucagaacaaagaaugggauuuguucguagagagguccaaggcauauucuaauuguuaccccuaugacgugccugauuacgccucgcuccggucacuggucgcuagcaguggcacucuggaauuuaacaaugaguccuucaacuggacagguguggcacaaaaugggaccucuagcgccugcaaacgccgauccauaaacucauuuuucagucgucucaauugguuacaccagcugaaguauagauacccagcucuuaacguuacgaugcccaauaacgacaaguuugauaaauuguauaucuggggagugcaucacccuagcacugacucugaucagauuuccgucuacgcccaggcgucaggcagggugaccguaagcacaaagcggagucaacagacuguuaucccaaacauuggcucucgccccugggugagagggaucuccagcaggauaucgauuuacuggaccaucgucaaaccuggagacauucugcuaaucaauucuacagguaaccucaucgcaccacggggcuauuucaagauucgcuccgggaaaucaaguauaaugcgaagcgacgccccgaucggaaaguguaauuccgagugcauuacccccaacggcucuaucccuaaugauaagccauuucagaacgugaauagaauaacguacggugcuugucccagguaugugaaacagaacacucugaagcuagccacagggaugcggaaugucccugaaaaacaaacccguggaauuuucggcgcaaucgcuggcuuuaucgagaacgggugggaaggaaugauggacgguugguacggcuuccgccaccagaauagcgaggggacuggacaggccgcggaucugaagucaacacaagccgcaauuaaccagaucaauggcaaauugaacaagcucauugagaaaaccaaugaaaaguuucaucagauagagaacgaguucagugaaguugaagguagaauccaggaccuggagaaguauguggaggauacgaaaauugacuuaugguccuacaacgcugaacugcucguagcccuugagaaucaacacaccaucgaucugacagacagcgaaaugaacaaguuguucgagaggacucggaaacagcuacgagaaaaugcugaggauauggggaacggcugcuuuaagaucuaucauaaaugugacaaugccugcauuggaucuauacgcaacggcaccuacgaucacgacguguacagagacgaggcacugaauaacagguuccagaucaagggggucgaacucaagucaggauauaaagauuggauucuguggaucaguuuugccauuagcugcuuccuucugugugugguuuugcucgguuuuaucaugugggcuugccagaagggcaauauacgguguaacaucugcauuuga

SEQ ID NO: 130422 - RNA, 1701 nt, Artificial Sequence
  derived and/or modified CDS sequence (opt3) from hemagglutinin__InfluenzaA__ACH69602
augaagaccaucauugcccugagcuacauacucugccuugcuuucgcacagaaacugcccggcaacgacaauuccacagccacuuuguguuuagggcaccaugcggugccuaacggaacgcuggucaagaccaucacaaaugaucaaauugagguuacuaacgcuaccgaacuugugcagucuucaaguacagguagaaucugcgacagcccacaccagauucucgauggcgagaauuguacccugaucgacgcccuucugggggauccgcauugcgacggauuucagaacaaagaaugggauuuguucguagagagguccaaggcauauucuaauuguuaccccuaugacgugccugauuacgccucgcuccggucacuggucgcuagcaguggcacucuggaauuuaacaaugaguccuucaacuggacagguguggcacaaaaugggaccucuagcgccugcaaacgccgauccauaaacucauuuuucagucgucucaauugguuacaccagcugaaguauagauacccagcucuuaacguuacgaugcccaauaacgacaaguuugauaaauuguauaucuggggagugcaucacccuagcacugacucugaucagauuuccgucuacgcccaggcgucaggcagggugaccguaagcacaaagcggagucaacagacuguuaucccaaacauuggcucucgccccugggugagagggaucuccagcaggauaucgauuuacuggaccaucgucaaaccuggagacauucugcuaaucaauucuacagguaaccucaucgcaccacggggcuauuucaagauucgcuccgggaaaucaaguauaaugcgaagcgacgccccgaucggaaaguguaauuccgagugcauuacccccaacggcucuaucccuaaugauaagccauuucagaacgugaauagaauaacguacggugcuugucccagguaugugaaacagaacacucugaagcuagccacagggaugcggaaugucccugaaaaacaaacccguggaauuuucggcgcaaucgcuggcuuuaucgagaacgggugggaaggaaugauggacgguugguacggcuuccgccaccagaauagcgaggggacuggacaggccgcggaucugaagucaacacaagccgcaauuaaccagaucaauggcaaauugaacaagcucauugagaaaaccaaugaaaaguuucaucagauagagaaggaguucagugaaguugaagguagaauccaggaccuggagaaauauguggaggauacgaagauugacuuaugguccuacaacgcugaacugcucguagcccuugagaaccaacacaccaucgaucugacagacagcgaaaugaauaaauuguucgagaggacucggaagcagcuacgagaaaacgcugaggauauggggaauggcugcuuuaaaaucuaucauaagugugacaacgccugcauuggaucuauacgcaauggcaccuacgaucacgacguguacagagacgaggcacugaacaauagguuccagaucaagggggucgaacucaaaucaggauauaaggauuggauucuguggaucaguuuugccauuagcugcuuccuucugugugugguuuugcucgguuuuaucaugugggcuugccagaaaggcaacauacgguguaauaucugcauuuga

SEQ ID NO: 130423 - RNA, 1701 nt, Artificial Sequence
  derived and/or modified CDS sequence (opt3) from hemagglutinin__InfluenzaA__ACH69613
augaagaccaucauugcccugagcuacauacucugccuugcuuucgcacagaaacugcccggcaacgacaauuccacaccuacuuuguguuuagggcaccaugccgugccaaacggaacgcuggucaagaccaucacaaaugaucaaauugagguuacuaacgcgaccgagcuagugcagucuucaaguacagguggcaucugcgacagcccgcaccagauuaucgauggggaaaauuguacccucauagacgcucugcuuggagauccccauugcgacggcuuucagaacaaagaaugggaucuguucguagagagauccaaggccuauucuaauuguuacccuuaugacgugccagauuacgcaucguugaggucacucgucgccagcagugguacucuggaauuuaacaaugaguccuucaacuggacagggguggcucaaaauggaaccucuagcgcaugcaaacggcgcuccaucaacucauuuuucagucgacugaauuggcuccaccaguuaaaguaucguuaccccgcccugaacguuacgaugccuaauaacgacaaguuugauaaacuuuauauuuggggcgugcaucacccaagcacugacucugaucagaucuccgucuacgcucaggccucaggcagagugaccguaagcacaaagaggagucaacagacuguuauucccaacaucgggucucggccuugggugcgcggaauauccagcagaauuucgaucuacuggaccauugucaaaccaggugacaucuugcugaucaauucuacaggcaacccgauugcgcccaggggguauuucaagauacgguccggaaaaucaaguaucaugcgcagcgacgcaccuauuggcaaguguaauuccgagugcaucaccccaaacgguucuauacccaaugauaagccuuuucagaacgugaaucgaauuacguacggggccuguccaagauaugugaaacagaacacucuaaagcucgcuacaggaaugaggaauguccccgaaaaacaaacccggggcaucuucggcgccaucgcaggguuuauugagaacggaugggaagguaugauggacggcugguacgggcugcgucaccagaauagcgagggaacuggccaggcugccgaucuuaagucaacacaagcggccaucaaccagauuaaugguaaacugaacaaguugauagagaaaaccaaugaaaaguuccaucagaucgagaacgaauuuagugagguugaagggcgcauucaggaccucgagaaguauguggaggauacgaaaaucgaccugugguccuacaacgcagaauuacugguagcucucgagaaucaacacaccaucgaucuuacagacagcgaaaugaacaagcuguucgagagaacuaggaaacaguugcgggaaaaugccgaggauaugggcaacggaugcuucaagauuuaucauaaaugugacaaugcuugcauaggcucuauccgaaacgggaccuacgaucacgacguguaccgcgacgaggcccuaaauaacagauuucagauuaagggagucgaacugaagucagguuauaaagauuggauccucuggauuaguuucgcaaucagcugcuuucugcuuugugugguucuguugggcuucauaaugugggccugccagaaggggaauaucagguguaacauuugcaucuga

SEQ ID NO: 130424 - RNA, 1701 nt, Artificial Sequence; identical to SEQ ID NO: 128678
  derived and/or modified CDS sequence (opt3) from hemagglutinin__InfluenzaA__ACH82060

SEQ ID NO: 130425 - RNA, 1701 nt, Artificial Sequence; identical to SEQ ID NO: 130364
  derived and/or modified CDS sequence (opt3) from hemagglutinin__InfluenzaA__ACI06123

SEQ ID NO: 130426 - RNA, 1701 nt, Artificial Sequence; identical to SEQ ID NO: 130364
  derived and/or modified CDS sequence (opt3) from hemagglutinin__InfluenzaA__ACI06126

SEQ ID NO: 130427 - RNA, 1701 nt, Artificial Sequence; identical to SEQ ID NO: 130364
  derived and/or modified CDS sequence (opt3) from hemagglutinin__InfluenzaA__ACI06127

SEQ ID NO: 130428 - RNA, 1701 nt, Artificial Sequence; identical to SEQ ID NO: 130364
  derived and/or modified CDS sequence (opt3) from hemagglutinin__InfluenzaA__ACI06129

SEQ ID NO: 130429 - RNA, 1701 nt, Artificial Sequence; identical to SEQ ID NO: 130364
  derived and/or modified CDS sequence (opt3) from hemagglutinin__InfluenzaA__ACI06130

SEQ ID NO: 130430 - RNA, 1701 nt, Artificial Sequence; identical to SEQ ID NO: 130364
  derived and/or modified CDS sequence (opt3) from hemagglutinin__InfluenzaA__ACI06132

SEQ ID NO: 130431 - RNA, 1701 nt, Artificial Sequence; identical to SEQ ID NO: 130366
  derived and/or modified CDS sequence (opt3) from hemagglutinin__InfluenzaA__ACI06133

SEQ ID NO: 130432 - RNA, 1701 nt, Artificial Sequence; identical to SEQ ID NO: 130366
  derived and/or modified CDS sequence (opt3) from hemagglutinin__InfluenzaA__ACI06134

SEQ ID NO: 130433 - RNA, 1701 nt, Artificial Sequence; identical to SEQ ID NO: 130366
  derived and/or modified CDS sequence (opt3) from hemagglutinin__InfluenzaA__ACI06135

SEQ ID NO: 130434 - RNA, 1701 nt, Artificial Sequence; identical to SEQ ID NO: 130366
  derived and/or modified CDS sequence (opt3) from hemagglutinin__InfluenzaA__ACI06136

SEQ ID NO: 130435 - RNA, 1701 nt, Artificial Sequence; identical to SEQ ID NO: 130366
  derived and/or modified CDS sequence (opt3) from hemagglutinin__InfluenzaA__ACI06137

SEQ ID NO: 130436 - RNA, 1701 nt, Artificial Sequence; identical to SEQ ID NO: 130366
  derived and/or modified CDS sequence (opt3) from hemagglutinin__InfluenzaA__ACI06138

SEQ ID NO: 130437 - RNA, 1701 nt, Artificial Sequence; identical to SEQ ID NO: 130366
  derived and/or modified CDS sequence (opt3) from hemagglutinin__InfluenzaA__ACI06139

SEQ ID NO: 130438 - RNA, 1701 nt, Artificial Sequence; identical to SEQ ID NO: 130366
  derived and/or modified CDS sequence (opt3) from hemagglutinin__InfluenzaA__ACI06140

SEQ ID NO: 130439 - RNA, 1701 nt, Artificial Sequence; identical to SEQ ID NO: 130366
  derived and/or modified CDS sequence (opt3) from hemagglutinin__InfluenzaA__ACI06141

SEQ ID NO: 130440 - RNA, 1701 nt, Artificial Sequence; identical to SEQ ID NO: 130366
  derived and/or modified CDS sequence (opt3) from hemagglutinin__InfluenzaA__ACI06142

SEQ ID NO: 130441 - RNA, 1701 nt, Artificial Sequence; identical to SEQ ID NO: 130366
  derived and/or modified CDS sequence (opt3) from hemagglutinin__InfluenzaA__ACI06143

SEQ ID NO: 130442 - RNA, 1701 nt, Artificial Sequence
  derived and/or modified CDS sequence (opt3) from hemagglutinin__InfluenzaA__ACI06144
augaagaccaucauugcccugagcuacauauucugccucgcucuuggccaggaccugcccgggaacgauaauuccacagcaacuuuguguuuaggacaccaugccgugccuaacgguacgcuggucaaaaccaucacagacgaucaaauugagguuacuaaugcgaccgaacuugugcagucuucaaguacaggcaagaucugcaacaauccacacaggauucucgacgggaucgauuguacccugauagacgcucuacugggagauccgcauugcgacguauuucagaacgagacuugggauuuguucguggaaagaagcaaagccuuuuccaauuguuaucccuacgacgucccugauuaugcaucucuccggucgcugguggccucaagcggcacacuggaguucaucaccgaagguuuuacguggacugggguuacccagaacggaggcaguaaugcuugcaagcgcggcccaggguccggauucuuuucucgacucaacugguuaacaaaaagcgguuccacuuaccccgugcugaaugucaccaugccuaacaaugacaacuucgauaaguuguauauuuggggcgugcaccauccaucaacaaaucaagagcagaccaguuuguacguacaggcaagcgggcguguuacggugucuacuagaaggucccagcaaacaaucauucccaacaucggaucacggccuuggguccgcggccugagcaguagaauaucuauuuauuggaccaucgugaagccaggugacgugcuagucauuaacuccaaugggaaccucaucgccccgaggggauacuuuaaaaugcggacuggcaagagcucgaucaugcgcucugacgcucccauugauacauguauauccgagugcaucaccccuaauggcucaauuccaaacgacaaacccuuccagaauguuaacaagaucacguacggggccuguccuaaauaugugaagcagaauacccugaaacuugcgacaggaaugcgaaacguaccagaaaagcagacuagaggucuguuuggcgcaauagccggguucauugagaauggaugggaaggcaugaucgaugguugguacggguuuaggcaccaaaacagugagggcaccggacaggcugccgaccuuaagagcacacaggcagcuaucgaucaaauuaauggcaaacucaaccgggugaucgagaagacuaaugaaaaauuccaccagauugagaaggaguucuccgaagucgaagggcguauacaggaccuggagaaauauguggaggauaccaagaucgacuuauggucuuacaacgccgaacugcucguugcgcuugagaaucagcauacaauugaucugaccgacagcgaaaugaaccgcuuguuugagaagacuagaaggcaacuacgggaaaacgccgaggauaugggaaaugguugcuucaaaaucuaucacaagugugacaacgcaugcaucgagucaauucgaaauggcacguacgaccaugauguguaucgcgacgaagcucugaacaauagauuucagauaaaaggggucgagcucaagaguggauacaaagauuggauccuguggauuuccuucgccaucagcugcuuucuucugugugugguauugcucggcuucauuaugugggcuugccagagggguaacauccgguguaauauaugcaucuga

SEQ ID NO: 130443 - RNA, 1701 nt, Artificial Sequence; identical to SEQ ID NO: 130366
  derived and/or modified CDS sequence (opt3) from hemagglutinin__InfluenzaA__ACI06145

SEQ ID NO: 130444 - RNA, 1701 nt, Artificial Sequence
  derived and/or modified CDS sequence (opt3) from hemagglutinin__InfluenzaA__ACI06146
augaagaccaucauugcccugagcuacauauucugccucgcucuuggccaggaccugcccgggaacgauaauuccacagcaacuuuguguuuaggacaccaugccgugccuaacgguacgcuggucaaaaccaucacagacgaucaaauugagguuacuaaugcgaccgaacuugugcagucuucaaguacaggcaagaucugcaacaauccacacaggauucucgacgggaucgauuguacccugauagacgcucuacugggagauccgcauugcgacguauuucagaacgagacuugggauuuguucguggaaagaagcaaagccuuuuccaauuguuaucccuacgacgucccugauuaugcaucucuccggucgcugguggccucaagcggcacacuggaguucaucaccgaagguuuuacguggacugggguuacccagaacggaggcaguaaugcuugcaagcgcggcccaggguccggauucuuuucucgacucaacugguuaacaaaaagcgguuccacuuaccccgugcugaaugucaccaugccuaacaaugacaacuucgauaaguuguauauuuggggcgugcaccauccaucaacaaaucaagagcagaccaguuuguacguacaggcaagcgggcguguuacggugucuacuagaaggucccagcaaacaaucauucccaacaucggaucaagcccuuggguccggggccugaguucucgcauauccauuuauuggaccaucgugaagccaggugacgugcuagucauuaacagcaaugggaaccucaucgccccgagaggauacuuuaaaaugaggacuggcaagucgucuaucaugcgguccgacgcucccauugauacauguauaucagagugcaucaccccuaauggcaguauuccaaacgacaaacccuuccagaauguuaacaagaucacguacggggccuguccuaaauaugugaagcagaauacccugaaacuugcgacaggaaugcgcaacguaccagaaaagcagacucgaggucuguuuggcgcaauagccggguucauugagaauggaugggaaggcaugaucgaugguugguacggguuuagacaccaaaacuaugagggcaccggacaggcugccgaccuuaagagcacacaggcagcuaucgaucaaauuaauggcaaacucaacagggugaucgagaagacuaaugaaaaauuccaccagauugagaaggaguucuccgaagucgaagggcggauacaggaccuggagaaauacguggaggauaccaagaucgacuuauggucuuauaacgccgaacugcucguugcgcuugagaaucagcauacaauugaucugaccgacagcgaaaugaacaaguuguuugagaaaacucgucgccaacuaagagaaaacgccgaggauaugggaaaugguugcuucaagaucuaccacaaaugugacaacgcaugcaucgagucaauuaggaauggcacguaugaccaugauguguaccgggacgaagcucugaacaaucgauuucagauaaagggggucgagcucaaaaguggauacaaggauuggauccuguggauuuccuucgccaucagcugcuuucuucugugugugguauugcucggcuucauuaugugggcuugccagcgcgguaacaucagauguaauauaugcaucuga

SEQ ID NO: 130445 - RNA, 1701 nt, Artificial Sequence; identical to SEQ ID NO: 130366
  derived and/or modified CDS sequence (opt3) from hemagglutinin__InfluenzaA__ACI06147

SEQ ID NO: 130446 - RNA, 1701 nt, Artificial Sequence; identical to SEQ ID NO: 130366
  derived and/or modified CDS sequence (opt3) from hemagglutinin__InfluenzaA__ACI06148

SEQ ID NO: 130447 - RNA, 1701 nt, Artificial Sequence
  derived and/or modified CDS sequence (opt3) from hemagglutinin__InfluenzaA__ACI06149
augaagaccaucauugcccugagcuacauauucugccucgcucuuggccaggaccugcccgggaacgauaauuccacagcaacuuuguguuuaggacaccaugccgugccuaacgguacgcuggucaaaaccaucacagacgaucaaauugagguuacuaaugcgaccgaacuugugcagucuucaaguacaggcaagaucugcaacaauccacacaggauucucgacgggaucgauuguacccugauagacgcucuacugggagauccgcauugcgacguauuucagaacgagacuugggauuuguucguggaaagaagcaaagccuuuuccaauuguuaucccuacgacgucccugauuaugcaucucuccggucgcugguggccucaagcggcacacuggaguucaucaccgaagguuuuacguggacugggguuacccagaacggaggcaguaaugcuugcaagcgcggcccaggguccggauucuuuucucgacucaacugguuaacaaaaagcgguuccacuuaccccgugcugaaugucaccaugccuaacaaugacaacuucgauaaguuguauauuuggggcgugcaccauccaucaacaaaucaagagcagaccaguuuguacguacaggcaagcgggcguguuacggugucuacuagaaggucccggcagacaaucauucccaacaucggaucacgcccuugggucagaggccugagcaguaggauaucuauuuauuggaccaucgugaagccaggugacgugcuagucauuaacuccaaugggaaccucaucgccccgcggggauacuuuaaaaugcgcacuggcaagagcucgaucaugcgaucugacgcucccauugauacauguauauccgagugcaucaccccuaauggcucaauuccaaacgacaaacccuuccaaaauguuaacaagaucacguacggggccuguccuaaauaugugaagcagaauacccugaaacuugcgacaggaaugagaaacguaccagaaaagcagacuaggggucuguuuggcgcaauagccggguucauugagaauggaugggaaggcaugaucgaugguugguacggguuucggcaccagaacagugagggcaccggacaagcugccgaccuuaagagcacacaggcagcuaucgaucagauuaauggcaaacucaaccgugugaucgagaagacuaaugaaaaauuccaccaaauugagaaggaguucuccgaagucgaagggcgcauacaggaccuggagaaauauguggaggauaccaagaucgacuuauggucuuacaacgccgaacugcucguugcgcuugagaaucagcauacaauugaucugaccgacagcgaaaugaacaaguuguuugagaaaacuagaaggcagcuacgggaaaacgccgaggauaugggaaaugguugcuucaagaucuaucacaaaugugacaacgcaugcaucgagucaauucgaaauggcacguacgaccaugauguguaucgcgacgaagcucugaacaauagauuucaaauaaagggggucgagcucaaaaguggauacaaggauuggauccuguggauuuccuucgccaucagcugcuuucuucugugugugguauugcucggcuucauuaugugggcuugccagagggguaacauccgguguaauauaugcaucuga

SEQ ID NO: 130448 - RNA, 1701 nt, Artificial Sequence; identical to SEQ ID NO: 130377
  derived and/or modified CDS sequence (opt3) from hemagglutinin__InfluenzaA__ACI06151

SEQ ID NO: 130449 - RNA, 1701 nt, Artificial Sequence; identical to SEQ ID NO: 130377
  derived and/or modified CDS sequence (opt3) from hemagglutinin__InfluenzaA__ACI06152

SEQ ID NO: 130450 - RNA, 1701 nt, Artificial Sequence
  derived and/or modified CDS sequence (opt3) from hemagglutinin__InfluenzaA__ACI06153
augaagaccaucauugcccugagcuacauauucugccucgcucuuggccaggaccugcccgggaacgauaauuccacagcaacuuuguguuuaggacaccaugccgugccuaacgguacgcuggucaaaaccaucacagacgaucaaauugagguuacuaaugcgaccgaacuugugcagucuucaaguacaggcaagaucugcaacaauccacacaggauucucgacgggaucgauuguacccugauagacgcucuacugggagauccgcauugcgacguauuucagaacgagacuugggauuuguucguggaaagaagcaaagccuuuuccaauuguuaucccuacgacgucccugauuaugcaucucuccggucgcugguggccucaagcggcacacuggaguucaucaccgaagguuuuacguggacugggguuacccagaacggaggcaguaaugcuugcaagcgcggcccaggguccggauucuuuucucgacucaacugguuaacaaaaagcgguuccacuuaccccgugcugaaugucaccaugccuaacaaugacaacuucgauaaguuguauauuuggggcgugcaccauccaucaacaaaucaagagcagaccaguuuguacguacaggcaagcgggcguguuacggugucuacuagaaggucccagcaaacaaucauucccaacaucggaucacggccuuggguccgcggccugagcaguagaauaucuauuuauuggaccaucgugaagccaggugacgagcuagugauuaacuccaaugggaaccucaucgccccgaggggauacuuuaaaaugcggacuggcaagagcucgaucaugcgcucugacgcucccauugauacauguauauccgaaugcaucaccccuaauggcucaauuccaaacgacaaacccuuccagaaugucaacaagaucacguacggggccuguccuaaauauguuaagcagaauacccugaaacuugcgacaggaaugcgaaacgugccagagaaacagacuagaggucuguuuggcgcaauagccggguucauugaaaauggaugggagggcaugaucgaugguugguacggguuuaggcaccaaaacagugagggcaccggacaggcugccgaccuuaagagcacacaggcagcuaucgaucaaauuaauggcaaacucaaccggguaaucgaaaagacuaaugagaaauuccaccagauugaaaaggaguucuccgaaguggaggggcguauacaggaccuggagaaauaugucgaagauaccaagaucgacuuauggucuuacaacgccgagcugcucguggcgcuugaaaaucagcauacaauugaucugaccgacagcgagaugaacaaguuguuugaaaagacucgcagacaacuaagggagaacgccgaggauaugggaaaugguugcuucaagaucuaucacaaaugugacaacgcaugcaucgaaucaauucggaauggcacguacgaccaugauguuuaucgagacgaggcucugaacaaucgcuuucagauaaaggggguggaacucaaaaguggauacaaggauuggauccuguggauuuccuucgccaucagcugcuuucuucugugugucguguugcucggcuucauuaugugggcuugccagagagguaacaucagguguaauauaugcaucuga

SEQ ID NO: 130451 - RNA, 1701 nt, Artificial Sequence
  derived and/or modified CDS sequence (opt3) from hemagglutinin__InfluenzaA__ACI06155
augaagaccaucauugcccugagcuacauauucugccucgcucuuggccaggaccugcccgggaacgauaauuccacagcaacuuuguguuuaggacaccaugccgugccuaacgguacgcuggucaaaaccaucacagacgaucaaauugagguuacuaaugcgaccgaacuugugcagucuucaaguacaggcaagaucugcaacaauccacacaggauucucgacgggaucgauuguacccugauagacgcucuacugggagauccgcauugcgacguauuucagaacgagacuugggauuuguucguggaaagaagcaaagccuuuuccaauuguuaucccuacgacgucccugauuaugcaucucuccggucgcugguggccucaagcggcacacuggaguucaucaccgaagguuuuacguggacugggguuacccagaacggaggcaguaaugcuugcaagcgcggcccaggguccggauucuuuucucgacucaacugguuaacaaaaagcgguuccacuuaccccgugcugaaugucaccaugccuaacaaugacaacuucgauaaguuguauauuuggggcgugcaccauccaucaacaaaucaagagcagaccaguuuguacguacaggcaagcgggcguguuacggugucuacuagaaggucccagcaaacaaucauucccaacaucgagucacggccuuggguccgcggacugagcaguagaauaucuauuuauuggaccaucgugaagccaggcgacgugcuagucauuaacuccaaugguaaccucaucgccccgaggggguacuuuaaaaugcggacuggaaagagcucgaucguucgcucugacgcucccauugauacauguauauccgaaugcaucaccccuaauggcucaauuccaaacgacaaacccuuccagaaugugaacaagaucacguacggcgccuguccuaaauauguaaagcagaauacccugaaacuugcgacagggaugcgaaacgugccagagaaacagacuagaggacuguuuggugcaauagccggcuucauugaaaaugggugggagggaaugaucgauggcugguacgguuuuaggcaccaaaacagugaggggaccggccaggcugccgaccuuaagagcacacaggcagcuaucgaucaaauuaauggaaaacucaaccgggucaucgaaaagacuaaugagaaauuccaccagauugaaaaggaguucuccgaaguggagggccguauacaggaccuggagaaauauguugaagauaccaagaucgacuuauggucuuacaacgccgagcugcucguggcgcuugaaaaucagcauacaauugaucugaccgacagcgagaugaacaaguuguuugaaaagacucgcagacaacuaagggagaacgccgaggauauggggaauggaugcuucaagaucuaucacaaaugugacaacgcaugcaucgaaucaauucggaaugguacguacgaccaugaugucuaucgagacgaggcucugaacaaucgcuuucagauaaagggcguggaacucaaaaguggguacaaggauuggauccuguggauuuccuucgccaucagcugcuuucuucuguguguaguuuugcucggauucauuaugugggcuugccagagaggcaacaucagguguaauauaugcaucuga

SEQ ID NO: 130452 - RNA, 1701 nt, Artificial Sequence; identical to SEQ ID NO: 130377
  derived and/or modified CDS sequence (opt3) from hemagglutinin__InfluenzaA__ACI06156

SEQ ID NO: 130453 - RNA, 1701 nt, Artificial Sequence; identical to SEQ ID NO: 130377
  derived and/or modified CDS sequence (opt3) from hemagglutinin__InfluenzaA__ACI06157

SEQ ID NO: 130454 - RNA, 1701 nt, Artificial Sequence; identical to SEQ ID NO: 130377
  derived and/or modified CDS sequence (opt3) from hemagglutinin__InfluenzaA__ACI06158

SEQ ID NO: 130455 - RNA, 1701 nt, Artificial Sequence; identical to SEQ ID NO: 130377
  derived and/or modified CDS sequence (opt3) from hemagglutinin__InfluenzaA__ACI06159

SEQ ID NO: 130456 - RNA, 1701 nt, Artificial Sequence; identical to SEQ ID NO: 130366
  derived and/or modified CDS sequence (opt3) from hemagglutinin__InfluenzaA__ACI06160

SEQ ID NO: 130457 - RNA, 1701 nt, Artificial Sequence
  derived and/or modified CDS sequence (opt3) from hemagglutinin__InfluenzaA__ACI06161
augaagaccaucauugcccugagcuacauauucugccucgcucuuggccaggaccugcccgggaacgauaauuccacagcaacuuuguguuuaggacaccaugccgugccuaacgguacgcuggucaaaaccaucacagacgaucaaauugagguuacuaaugcgaccgaacuugugcagucuucaaguacaggcaagaucugcaacaauccacacaggauucucgacgggaucgauuguacccugauagacgcucuacugggagauccgcauugcgacguauuucagaacgagacuugggauuuguucguggaaagaagcaaagccuuuuccaauuguuaucccuacgacgucccugauuaugcaucucuccggucgcugguggccucaagcggcacacuggaguucaucaccgaagguuuuacguggacugggguuacccagaacggaggcaguaaugcuugcaagcgcggcccaggguccggauucuuuucucgacucaacugguuaacaaaaagcgguuccacuuaccccgugcugaaugucaccaugccuaacaaugacaacuucgauaaguuguauauuuggggcgugcaccauccaucaacaaaucaagagcagaccaguuuguacguacaggcaagcgggcguguuacggugucuacuagaaggucccagcaaacaaucauucccaacaucgagucacggccuuggguccgcggacugagcaguagaauaucuauuuauuggaccaucgugaagccaggcgacgugcuagucauuaacuccaaugguaaccucaucgccccgaggggguacuuuaaaaugcggacuggaaagagcucgaucaugcgcucugacgcucccauugauacauguauauccgaaugcaucaccccuaauggcucaauuccaaacgacaaacccuuccagaauguuaacaagaucacguacggcgccuguccuaaauaugugaagcagaauacccugaaacuugcgacagggaugcgaaacguaccagagaaacagacuagaggacuguuuggugcaauagccggcuucauugaaaaugggugggagggaaugaucgauggcugguacgguuuuaggcaccaaaacagugaggggaccggccaggcugccgaccuuaagagcacacaggcagcuaucgaucaaauuaauggaaaacucaaccgggugaucgaaaagacuaaugagaaauuccaccagauugaaaaggaguucuccgaagucgagggccguauacaggaccuggagaaauauguggaagauaccaagaucgacuuauggucuuacaacgccgagcugcucguugcgcuugaaaaucagcauacaauugaucugaccgacagcgagaugaacaaguuguuugaaaagacucgcagacaacuaagggagaacgccgaggauauggggaauggaugcuucaagaucuaucacaaaugugacaacgcaugcaucgaaucaauucggaaggguacguacgaccaugauguguaucgagacgaggcucugaauaaccgcuuucagauaaaaggcgucgaacucaagaguggguacaaggauuggauccuguggauuuccuucgccaucagcugcuuucuucugugugugguauugcucggauucauuaugugggcuugccagagaggcaauaucagguguaacauaugcaucuga

SEQ ID NO: 130458 - RNA, 1701 nt, Artificial Sequence
  derived and/or modified CDS sequence (opt3) from hemagglutinin__InfluenzaA__ACI06162
augaagaccaucauugcccugagcuacauauucugccucgcucuuggccaggaccugcccgggaacgauaauuccacagcaacuuuguguuuaggacaccaugccgugccuaacgguacgcuggucaaaaccaucacagacgaucaaauugagguuacuaaugcgaccgaacuugugcagucuucaaguacaggcaagaucugcaacaauccacacaggauucucgacgggaucgauuguacccugauagacgcucuacugggagauccgcauugcgacguauuucagaacgagacuugggauuuguucguggaaagaagcaaagccuuuuccaauuguuaucccuacgacgucccugauuaugcaucucuccggucgcugguggccucaagcggcacacuggaguucaucaccgaagguuuuacguggacugggguuacccagaacggaggcaguaaugcuugcaagcgcggcccaggguccggauucuuuucucgacucaacugguuaacaaaaagcgguuccacuuaccccgugcugaaugucaccaugccuaacaaugacaacuucgauaaguuguauauuuggggcgugcaccauccaucaacaaaucaagagcagaccagucuuuacguacaggcaagcgggcguguuacggugucuacuagaaggucccagcaaacaaucauucccaacaucgagucacggccuuggguccgcggacugagcaguagaauaucuauuuauuggaccaucgugaacccaggcgacgugcuagucauuaauuccaacgguaaucucaucgccccgaggggguacuuuaagaugcggacuggaaaaagcucgaucaugcgcucugacgcucccauugauacauguauauccgaaugcaucaccccuaacggcucaauuccaaaugacaagcccuuccagaacguuaauaaaaucacguacggcgccuguccuaaguaugugaaacagaacacccugaaacuugcgacagggaugcgaaauguaccagagaagcagacuagaggacuguuuggugcaauagccggcuucauugaaaacgggugggagggaaugaucgauggcugguacgguuuuaggcaccaaaauagugaggggaccggccaggcugccgacuugaaaagcacacaggcagcuaucgaucaaauuaacggaaagcucaaucgggugaucgaaaagacuaacgagaaguuccaccagauugaaaaagaguucuccgaagucgagggccguauacaggaccuggagaaguauguggaagauaccaaaaucgacuuauggucuuacaaugccgagcugcucguugcgcuugaaaaccagcauacaauugaucugaccgacagcgagaugaacaaguuguuugaaaagacucgcagacaacuaagggagaaugccgaggauauggggaacggaugcuucaaaaucuaucacaagugugacaaugcaugcaucgaaucaauucggaacgguacguacgaccaugauguguaucgagacgaggcucugaauaaccgcuuucagauaaaaggcgucgaacucaagaguggguacaaagauuggauccuguggauuuccuucgccaucagcugcuuucuucugugugugguauugcucggauucauuaugugggcuugccagagaggcaauaucagguguaacauaugcaucuga

SEQ ID NO: 130459 - RNA, 1701 nt, Artificial Sequence
  derived and/or modified CDS sequence (opt3) from hemagglutinin__InfluenzaA__ACI06163
augaagaccaucauugcccugagcuacauauucugccucgcucuuggccaggaccugcccgggaacgauaauuccacagcaacuuuguguuuaggacaccaugccgugccuaacgguacgcuggucaaaaccaucacagacgaucaaauugagguuacuaaugcgaccgaacuugugcagucuucaaguacaggcaagaucugcaacaauccacacaggauucucgacgggaucgauuguacccugauagacgcucuacugggagauccgcauugcgacguauuucagaacgagacuugggauuuguucguggaaagaagcaaagccuuuuccaauuguuaucccuacgacgucccugauuaugcaucucuccggucgcugguggccucaagcggcacacuggaguucaucaccgaagguuuuacguggacugggguuacccagaacggaggcaguaaugcuugcaagcgcggcccaggguccggauucuuuucucgacucaacugguuaacaaaaagcgguuccacuuaccccgugcugaaugucaccaugccuaacaaugacaacuucgauaaguuguauauuuggggcgugcaccauccaucaacaaaucaagagcagaccaguuuguacguacaggcaagcgggcguguuacggugucuacuagaaggucccagcaaacaaucauucccaacaucggaucacggccuuggguccgcggccugagcaguagaauaucuauuuauuggaccaucgugaagccaggugacgugcuagucauuaacuccaaugggaaccucaucgccccgaggggauacuuuaaaaugcggacuggcaagagcucgaucaugcgcucugacgcucccauugauacauguauauccgagugcaucaccccuaauggcucaauuccaaacgacaaacccuuccagaauguuaacaagaucacguacggggccuguccuaaauaugugaagcagaauacccugaaacuugcgacaggaaugcgaaacguaccagaaaagcagacuagaggucuguuuggcgcaauagccggguucauugagaauggaugggaaggcaugaucgaugguugguacggguuuaggcaccaaaacagugagggcaccggacaggcugccgaccuuaagagcacacaggcagcuaucgaucaaauuaauggcaaacucaaccgggugaucgagaagacuaaugaaaaauuccaccagauugagaaggaguucuccgaagucgaagggcguauacaggaccuggagaaauauguggaggauaccaagaucgacuuauggucuuacaacgccgaacugcucguugcgcuugagaaucagcauacaauugaucugaccgacagcgaaaugaacaaguuguuugagaaaacucgcagacaacuaagggaaaacgccgaggauaugggaaaugguugcuucaagaucuaucacaaaugugacaacgcaugcaucgagucaauucggaagggcacguacgaccaugauguguaucgagacgaagcucugaauaaccgcuuucagauaaaaggggucgagcucaagaguggauacaaggauuggauccuguggauuuccuucgccaucagcugcuuucuucugugugugguauugcucggcuucauuaugugggcuugccagagagguaauaucagguguaacauaugcaucuga

SEQ ID NO: 130460 - RNA, 1701 nt, Artificial Sequence
  derived and/or modified CDS sequence (opt3) from hemagglutinin__InfluenzaA__ACI06164
augaagaccaucauugcccugagcuacauauucugccucgcucuuggccaggaccugcccgggaacgauaauuccacagcaacuuuguguuuaggacaccaugccgugccuaacgguacgcuggucaaaaccaucacagacgaucaaauugagguuacuaaugcgaccgaacuugugcagucuucaaguacaggcaagaucugcaacaauccacacaggauucucgacgggaucgauuguacccugauagacgcucuacugggagauccgcauugcgacguauuucagaacgagacuugggauuuguucguggaaagaagcaaagccuuuuccaauuguuaucccuacgacgucccugauuaugcaucucuccggucgcugguggccucaagcggcacacuggaguucaucaccgaagguuuuacguggacugggguuacccagaacggaggcaguaaugcuugcaagcgcggcccaggguccggauucuuuucucgacucaacugguuaacaaaaagcgguuccacuuaccccgugcugaaugucaccaugccuaacaaugacaacuucgauaaacuuuauauuuggggcgugcaccauccaucaacaaaucaagagcagaccaguuuguacguacaggcaagcgggcguguuacggugucuacuagaaggucccagcaaacaaucauucccaacaucggaucacggccuuggguccgcggccugagcaguagaauaaacauuuauuggaccaucgugaagccaggugacgugcuagucauuaauucuaacgggaaucucaucgccccgaggggauacuuuaagaugcggaacggcaaguccagcaucaugcgcucggacgcucccauugauacuuguauaucugagugcaucacaccuaauggcuccauuccaaacgacaaacccuuccagaauguuaacaagaucaccuacggggccuguccuaaauaugugaagcagaauacgcugaaacuugcgaccggaaugcgaaacguaccagaaaagcagacaagaggucuguuuggcgcaauagccggguucauugagaauggaugggaaggcaugaucgaugguugguacggguuuaggcaccaaaacucagagggcacuggacaggcugccgacuugaagaguacccaggcagcuaucgaucaaauuaauggcaaacucaaccgggugaucgagaagacaaaugaaaaauuccaccagauugagaaggaguucagcgaagucgaagggcguauacaggaccuggagaaauauguggaggauacuaagaucgacuuaugguccuacaacgccgaacugcucguugcgcuugagaaccagcauaccauugaucugacagacucugaaaugaauaaguuguuugagaaaacccgcagacaacuaagggaaaacgccgaggauaugggaaaugguugcuucaagaucuaucacaaaugugacaacgcaugcaucgagagcauucggaauggcacuuacgaccaugauguguaucgagacgaagcucugaacaaucgcuuucagauaaagggggucgagcucaaaucaggauacaaggauuggauccuguggauuaguuucgccaucuccugcuuucuucugugugugguauugcucggcuucauuaugugggcuugccagagagguaacaucagguguaauauaugcaucuga

SEQ ID NO: 130461 - RNA, 1701 nt, Artificial Sequence
  derived and/or modified CDS sequence (opt3) from hemagglutinin__InfluenzaA__ACI06165
augaagaccaucauugcccugagcuacauauucugccucgcucuuggccaggaccugcccgggaacgauaauuccacagcaacuuuguguuuaggacaccaugccgugccuaacgguacgcuggucaaaaccaucacagacgaucaaauugagguuacuaaugcgaccgaacuugugcagucuucaaguacaggcaagaucugcaacaauccacacaggauucucgacgggaucgauuguacccugauagacgcucuacugggagauccgcauugcgacguauuucagaacgagacuugggauuuguucguggaaagaagcaaagccuuuuccaauuguuaucccuacgacgucccugauuaugcaucucuccggucgcugguggccucaagcggcacacuggaguucaucaccgaagguuuuacguggacugggguuacccagaacggaggcaguaaugcuugcaagcgcggcccaggguccggauucuuuucucgacucaacugguuaacaaaaagcgguuccacuuaccccgugcugaaugucaccaugccuaacaaugacaacuucgauaaguuguauauuuggggcgugcaccauccaucaacaaaucaagagcagaccaguuuguacguacaggcaagcgggcguguuacggugucuacuagaaggucccagcaaacaaucauucccaacaucggaucacggccuuggguccgcggccugagcaguagaauaucuauuuauuggaccaucgugaagccaggugacgugcuagucauuaacuccaaugggaaccucaucgccccgaggggauacuuuaaaaugcggaauggcaagagcucgaucaugcgcucugacgcucccauugauacuuguauauccgagugcaucacaccuaacggcucaauuccaaaugacaaacccuuccagaacguuaauaagaucaccuacggggccuguccuaaauaugugaagcagaacacgcugaaacuugcgaccggaaugcgaaauguaccagaaaagcagacaagaggucuguuuggcgcaauagccggguucauugagaacggaugggaaggcaugaucgaugguugguacggguuuaggcaccaaaauagugagggcacuggacaggcugccgaccuuaagagcacccaggcagcuaucgaucaaauuaacggcaaacucaaucgggugaucgagaagacaaacgaaaaauuccaccagauugagaaggaguucuccgaagucgaagggcguauacaggaccuggagaaauauguggaggauacuaagaucgacuuauggucuuacaaugccgaacugcucguugcgcuugagaaccagcauaccauugaucugacagacagcgaaaugaacaaguuguuugagaaaacccgcagacaacuaagggaaaaugccgaggauaugggaaacgguugcuucaagaucuaucacaaaugugacaaugcaugcaucgagucaauucggaacggcacuuacgaccaugauguguaucgagacgaagcucugaauaaccgcuuucagauaaagggggucgagcucaaaaguggauacaaggauuggauccuguggauuuccuucgccaucagcugcuuucuucugugugugguauugcucggcuucauuaugugggcuugccagagagguaauaucagguguaacauaugcaucuga

SEQ ID NO: 130462 - RNA, 1701 nt, Artificial Sequence
  derived and/or modified CDS sequence (opt3) from hemagglutinin__InfluenzaA__ACI06166
augaagaccaucauugcccugagcuacauauucugccucgcucuuggccaggaccugcccgggaacgauaauuccacagcaacuuuguguuuaggacaccaugccgugccuaacgguacgcuggucaaaaccaucacagacgaucaaauugagguuacuaaugcgaccgaacuugugcagucuucaaguacaggcaagaucugcaacaauccacacaggauucucgacgggaucgauuguacccugauagacgcucuacugggagauccgcauugcgacguauuucagaacgagacuugggauuuguucguggaaagaagcaaagccuuuuccaauuguuaucccuacgacgucccugauuaugcaucucuccggucgcugguggccucaagcggcacacuggaguucaucaccgaagguuuuacguggacugggguuacccagaacggaggcaguaaugcuugcaagcgcggcccaggguccggauucuuuucucgacucaacugguuaacaaaaagcgguuccacuuaccccgugcugaaugucaccaugccuaacaaugacaacuucgauaaacuuuauauuuggggcgugcaccauccaucaacaaaucaagagcagaccaguuuguacguacaggcaagcgggcguguuacggugucuacuagaaggucccagcaaacaaucauucccaacaucggaucacggccuuggauacgcggccugagcaguagaauuaacaucuauuggaccauugucaagccaggugacgugcuagugaucaauucuaacgggaaucucaucgccccgaggggauacuuuaagaugcggaacggcaaguccagcauuaugcgcucggacgcucccauagauacuuguaucucugagugcauuacaccuaauggcuccaucccaaacgacaaacccuuccagaaugucaacaagauaaccuacggggccuguccuaaauauguuaagcagaauacgcugaaacuugcgaccggaaugcgaaacgugccagaaaagcagacaagaggucuguuuggcgcaauugccggguucaucgagaauggaugggaaggcaugaucgaugguugguacggguuuaggcaccaaaacucagagggcacuggacaggcugccgacuugaagaguacccaggcagcuauugaucaaaucaauggcaaacucaaccggguaauugagaagacaaaugaaaaauuccaccagauagagaaggaguucagcgaaguggaagggcguauccaggaccuggagaaauaugucgaggauacuaagauugacuuaugguccuacaacgccgaacugcucguggcgcuugagaaccagcauaccaucgaucugacagacucugaaaugaauaaguuguuugagaaaacccgcagacaacuaagggaaaacgccgaggauaugggaaaugguugcuucaagaucuaucacaaaugugacaacgcaugcauugagagcauacggaauggcacuuacgaccaugauguuuaucgagacgaagcucugaacaaucgcuuucagaucaaggggguggagcucaaaucaggauacaaggauuggauucuguggaucaguuucgccauuuccugcuuucuucugugugucguguugcucggcuucaucaugugggcuugccagagagguaacauaagguguaauaucugcauuuga

SEQ ID NO: 130463 - RNA, 1701 nt, Artificial Sequence; identical to SEQ ID NO: 130447
  derived and/or modified CDS sequence (opt3) from hemagglutinin__InfluenzaA__ACI06167

SEQ ID NO: 130464 - RNA, 1701 nt, Artificial Sequence
  derived and/or modified CDS sequence (opt3) from hemagglutinin__InfluenzaA__ACI06168
augaagaccaucauugcccugagcuacauauucugccucgcucuuggccaggaccugcccgggaacgauaauuccacagcaacuuuguguuuaggacaccaugccgugccuaacgguacgcuggucaaaaccaucacagacgaucaaauugagguuacuaaugcgaccgaacuugugcagucuucaaguacaggcaagaucugcaacaauccacacaggauucucgacgggaucgauuguacccugauagacgcucuacugggagauccgcauugcgacguauuucagaacgagacuugggauuuguucguggaaagaagcaaagccuuuuccaauuguuaucccuacgacgucccugauuaugcaucucuccggucgcugguggccucaagcggcacacuggaguucaucaccgaagguuuuacguggacugggguuacccagaacggaggcaguaaugcuugcaagcgcggcccaggguccggauucuuuucucgacucaacugguuaacaaaaagcgguuccacuuaccccgugcugaaugucaccaugccuaacaaugacaacuucgauaaguuguauauuuggggcgugcaccauccaucaacaaaucaagagcagaccaguuuguacguacaggcaagcgggcguguuacggugucuacuagaaggucccagcaaacaaucauucccaacaucggaucacggccuuggguccgcggccugagcaguagaauaucuauuuauuggaccaucgugaagccaggugacgugcuagucauuaacuccaaugggaaccucaucgccccgaggggauacuuuaaaaugcggacuggcaagagcucgaucaugcgcucugacgcucccauugauacauguauauccgagugcaucaccccuaauggcucaauuccaaacgacaaacccuuccagaauguuaacaagaucacguacggggccuguccuaaauaugugaagcagaauacccugaaacuugcgacaggaaugcgaaacguaccagaaaagcagacuagaggucuguuuggcgcaauagccggguucauugagaauggaugggaaggcaugaucgaugguugguacggguuuaggcaccaaaacagugagggcaccggacaggcugccgaccuuaagagcacacaggcagcuaucgaucaaauuaauggcaaacucaaccgggugaucgagaagacuaaugaaaaauuccaccagauugagaaggaguucuccgaagucgaagggcguauacaggaccuggagaaauauguggaggauaccaagaucgacuuauggucuuacaacgccgaacugcucguugcgcuugagaaucagcauacaauugaucugaccgacagcgaaaugaacaaguuguuugagaaaacucgcaagcaacuaagagaaaacgccgaggauaugggaaaugguugcuucaaaaucuaucacaagugugacaacgcaugcaucgagucaauuaggaauggcacguacgaccaugauguguaucgggacgaagcucugaacaaucgauuucagauaaaaggggucgagcucaagaguggauacaaggauuggauccuguggauuuccuucgccaucagcugcuuucuucugugugugguauugcucggcuucauuaugugggcuugccagcgcgguaacaucagauguaauauaugcaucuga

SEQ ID NO: 130465 - RNA, 1701 nt, Artificial Sequence; identical to SEQ ID NO: 130366
  derived and/or modified CDS sequence (opt3) from hemagglutinin__InfluenzaA__ACI06169

SEQ ID NO: 130466 - RNA, 1701 nt, Artificial Sequence; identical to SEQ ID NO: 130383
  derived and/or modified CDS sequence (opt3) from hemagglutinin__InfluenzaA__ACI06171

SEQ ID NO: 130467 - RNA, 1701 nt, Artificial Sequence; identical to SEQ ID NO: 130383
  derived and/or modified CDS sequence (opt3) from hemagglutinin__InfluenzaA__ACI06172

SEQ ID NO: 130468 - RNA, 1701 nt, Artificial Sequence
  derived and/or modified CDS sequence (opt3) from hemagglutinin__InfluenzaA__ACI06173
augaagaccaucauugcccugagcuacauauucugccucgcucuuggccaggaccugcccgggaacgauaauuccacagcaacuuuguguuuaggacaccaugccgugccuaacgguacgcuggucaaaaccaucacagacgaucaaauugagguuacuaaugcgaccgaacuugugcagucuucaaguacaggcaagaucugcaacaauccacacaggauucucgacgggaucgauuguacccugauagacgcucuacugggagauccgcauugcgacguauuucagaacgagacuugggauuuguucguggaaagaagcaaagccuuuuccaauuguuaucccuacgacgucccugauuaugcaucucuccggucgcugguggccucaagcggcacacuggaguucaucaccgaagguuuuacguggacugggguuacccagaacggaggcaguaaugcuugcaagcgcggcccaggguccggauucuuuucucgacucaacugguuaacaaaaagcgguuccacuuaccccgugcugaaugucaccaugccuaacaaugacaacuucgauaaguuguauauuuggggcgugcaccauccaucaacaaaucaagagcagaccaguuuguacguacaggcaagcgggcguguuacggugucuacuagaaggucccagcaaacaaucauucccaacaucggaucacggccuuggguccgcggccugagcaguagaauaucuauuuauuggaccaucgugaagccaggugacgugcuagagauuaacuccaaugggaaccucaucgccccgaggggauacuuuaaaaugcggacuggcaagagcucgaucaugcgcucugacgcucccauugauacauguauauccgaaugcaucaccccuaauggcucaauuccaaacgacaaacccuuccagaaugucaacaagaucacguacggggccuguccuaaauauguuaagcagaauacccugaaacuugcgacaggaaugcgaaacgugccagagaaacagacuagaggucuguuuggcgcaauagccggguucauugaaaauggaugggagggcaugaucgaugguugguacggguuuaggcaccaaaacagugagggcaccggacaggcugccgaccuuaagagcacacaggcagcuaucgaucaaauuaauggcaaacucaaccggguaaucgaaaagacuaaugagaaauuccaccagauugaaaaggaguucuccgaaguggaggggcguauacaggaccuggagaaauaugucgaagauaccaagaucgacuuauggucuuacaacgccgagcugcucguggcgcuugaaaaucagcauacaauugaucugaccgacagcgagaugaacaaguuguuugaaaagacucgcagacaacuaagggagaacgccgaggauaugggaaaugguugcuucaagaucuaucacaaaugugacaacgcaugcaucgaaucaauucggaauggcacguacgaccaugauguuuaucgagacgaggcucugaacaaucgcuuucagauaaaggggguggaacucaaaaguggauacaaggauuggauccuguggauuuccuucgccaucagcugcuuucuucugugugucguguugcucggcuucauuaugugggcuugccagagagguaacaucagguguaauauaugcaucuga

SEQ ID NO: 130469 - RNA, 1701 nt, Artificial Sequence; identical to SEQ ID NO: 130383
  derived and/or modified CDS sequence (opt3) from hemagglutinin__InfluenzaA__ACI06174

SEQ ID NO: 130470 - RNA, 1701 nt, Artificial Sequence; identical to SEQ ID NO: 130384
  derived and/or modified CDS sequence (opt3) from hemagglutinin__InfluenzaA__ACI06175

SEQ ID NO: 130471 - RNA, 1701 nt, Artificial Sequence; identical to SEQ ID NO: 130384
  derived and/or modified CDS sequence (opt3) from hemagglutinin__InfluenzaA__ACI06176

SEQ ID NO: 130472 - RNA, 1701 nt, Artificial Sequence; identical to SEQ ID NO: 130384
  derived and/or modified CDS sequence (opt3) from hemagglutinin__InfluenzaA__ACI06177

SEQ ID NO: 130473 - RNA, 1689 nt, Artificial Sequence
  derived and/or modified CDS sequence (opt3) from hemagglutinin__InfluenzaA__ACI25724
auggccaucauuuaccugauacuccuuuucgcuaccgugagaggcgaccagaucugcauuggguaucacgcaaacaauagcacagagaaggucgauacuauccuggaaaggaacguuacggugacccaugccaaagacauuuuggagaagacacacaauggaaaauuauguaagcugaacgguauucccccucuagaacucggcgauugcuccauagcgggguggcugcuuggaaauccagagugugaccggcuguugcgcguaccggaauggucuuacaucauggagcgagagaacccccguuauucacucugcuacccuggcagucugaaugauuaugaagaacugaaacaucucuuaagcuccgugaagcacuuugaaaaggucagaauccugccaaaagacagguggacucaacauaccacaaccggugggucuaaggcuugugccgugucgggaaaacccucauucuuucggaacaugguuuggcuuacuaagaaaggcccuaauuacccaguggcaaagggcagcuauaacaauacaaguggggagcagauguugaucauuuggggaguccaccaccccaaggaugaggccgaacagcgcgcucuguaccaggagguggguaccuacguauccgcaucuacgagcacucuaaacaaaagauccaucccugaaauagccgcuaggccagagguuaauggccucgggucacggauggaauuuaguuggacccugcuugacgugugggauacaauuaacuucgagagcacuggaaaucuggucgccccggaguauggcuucaagaucucuaaacgcgguuccucagggauuaugaagaccgaaggaacauugggcaacugcgagaccaaaugucaaacgccccucggcgcgaucaacacuacacugccuuuucauaaugugcacccauuaaccaucggggaaugccccaaguacgugaaaagcgagaagcugguccucgcaacuggacuucgaaacguuccucagauugaaaguagaggucuguucggcgccauagcuggguuuaucgagggaggcuggcaggguaugguggacgggugguauggcuaccaucacucuaaugaucagggauccggcuaugccgcagacaaggagagcacacaaaaggcuuucgaugggauuaccaacaaaguaaauucggugaucgaaaagaugaacacgcaguuugaggccgucggaaaagaguucaauaacuuggagaaaaggcuagaaaaucugaacaagaagauggaggacgguuuucucgacguguggaccuacaaugcggagcugcuuguucugauggaaaacgagcggacauuggauuuccacgacucuaaugugaaaaaccucuaugaaaagguccguaugcagcugcgcgauaaugugaaagaguuaggcaacggguguuucgaguuuuaccauaagugcgacgaugaauguaugaacuccguuaaaaauggaacuuacgacuauccaaaguacgaggaagagucaaagcugaaaagaaacgaaauaaagggcguaaaacuaaguagcauggguguguaucagauucucgccaucuacgcaaccgucgcugggucccugucucuugccaucaugguggcuggcauuagcuucuggaugugcucaaauggaaguuugcaaugcaggaucuguauuuga

SEQ ID NO: 130474 - RNA, 1701 nt, Artificial Sequence
  derived and/or modified CDS sequence (opt3) from hemagglutinin__InfluenzaA__ACI25746
augaagaccaucauugcccugagcuacauauucugccucgcucuuggccaguaucugcccgggaacgacaauuccacagcaacuuuguguuuaggacaccaugccgugccuaacgguacgcuggucaaaaccaucacagaugaccaaauugagguuacuaaugcgaccgaacuugugcagucuucaaguacaggcaagaucugcaacaauccacacaggauucucgaugggaucgacuguacccugauagaugcucuacugggagacccgcauugcgauguauuucagaacgagacuugggacuuguucguggaaagaagcaaagccuuuuccaauuguuaccccuaugaugucccugacuacgcaucucuccggucgcugguggccucaagcggcacacuggaguucaucaccgaagguuuuacguggacugggguuacccagaacggaggcaguaaugcuugcaagcgcggcccaggguccggauucuuuucucgacucaacugguuaacaaaaagcgguuccacuuaucccgugcugaaugucaccaugccuaacaaugauaacuucgacaaguuguacauuuggggcgugcaccauccaucaacaaaucaagagcagaccaguuuguauguacaggcaagcgggcguguuacggugucuacuagaaggucccagcaaacaaucauucccaacaucggaucacggccuuggguccgcggccugagcaguagaauaucuauuuacuggaccaucgugaagccaggugaugugcuagucauugacuccaacgggaaucucaucgccccgaggggauacuuuaaaaugcggacuggcaagagcucgaucaugcgcucugacgcucccauugauacauguauauccgagugcaucaccccuaacggcucaauuccaaaugacaaacccuuccagaacguuaauaagaucacguauggggccuguccuaaauacgugaagcagaacacccugaaacuugcgacaggaaugcgaaauguaccagaaaagcagacuagaggucuguuuggcgcaauagccggguucauugagaacggaugggaaggcaugaucgaugguugguauggguuuaggcaccaaaauagugagggcaccggacaggcugccgaccuuaagagcacacaggcagcuaucgaucaaauuaacggcaaacucaaucgggugaucgagaagacuaacgaaaaauuccaccagauugagaaggaguucuccgaagucgaagggcguauacaggaccuggagaaauacguggaggauaccaagaucgacuuauggucuuauaaugccgaacugcucguugcgcuugagaaccagcauacaauugaucugaccgacagcgaaaugaauaaguuguuugagaaaacucgcagacaacuaagggaaaacgccgaggauaugggaaacgguugcuucaagaucuaccacaaaugugacaaugcaugcaucgagucaauucggaacggcacguaugaccaugauguguaccgagacgaagcucugaauaaccgcuuucagauaaagggggucgagcucaaaaguggauacaaggauuggauccuguggauuuccuucgccaucagcugcuuucuucugugugugguauugcucggcuucauuaugugggcuugccagagagguaauaucagguguaacauaugcaucuga

SEQ ID NO: 130475 - RNA, 1701 nt, Artificial Sequence
  derived and/or modified CDS sequence (opt3) from hemagglutinin__InfluenzaA__ACI25757
augaagaccaucauugcccugagcuacauauucugccucgcucuuggccaggaccugcccgggaacgauaauuccacagcaacuuuguguuuaggacaccaugccgugccuaacgguacgcuggucaaaaccaucacagacgaucaaauugagguuacuaaugcgaccgaacuugugcagucuucaaguacaggcaagaucugcaacaauccacacaggauucucgacgggaucgauuguacccugauagacgcucuacugggagauccgcauugcgacguauuucagaacgagacuugggauuuguucguggaaagaagcaaagccuuuuccaauuguuaucccuacgacgucccugauuaugcaucucuccggucgcugguggccucaagcggcacacuggaguucaucaccgaagguuuuacguggacugggguuacccagaacggaggcaguaaugcuugcaagcgcggcccaggguccggauucuuuucucgacucaacugguuaacaaaaagcgguuccacuuaccuggugcuuaaugucaccaugcccaacaaugacaacuucgauaaguuguauauuuggggcgugcaccauccuucaacaaaucaagagcagaccagucuguacguacaggcaagcgggcguguuacggugucuacuagaaggucccagcaaacaaucauuccaaacaucggaucacggcccuggguccgcggccuaagcaguagaauaucuauuuauuggaccaucgugaagccuggugacgugcucgucauuaacuccaaugggaaccugaucgccccaaggggauacuuuaaaaugcggacuggcaagagcucgaucaugcgcucugacgcuccgauugauacauguauauccgagugcaucacccccaauggcucaauuccuaacgacaaaccauuccagaauguuaacaagaucacguacggggccugucccaaauaugugaagcagaauacccuuaagcuggcgacaggaaugcgaaacguaccugaaaaacagacuagagguuuguuuggcgcaauagccggguucauugagaauggaugggaaggcaugaucgaugguugguacggguuuaggcaccaaaacagugagggcaccggacaggcugccgaccucaagagcacacaggcagcuaucgaucaaauuaauggcaaacugaaccgggugaucgagaagacuaaugaaaaauuccaccagauugagaaggaguucuccgaagucgaagggcguauacaggacuuagagaaauauguggaggauaccaagaucgaccuguggucuuacaacgccgaacuccuuguugcgcuggagaaucagcauacaauugauuugaccgacagcgaaaugaacaagcuauuugagaaaacucgcagacaacugagggaaaacgccgaggauaugggaaaugguugcuucaagaucuaucacaaaugugacaacgcaugcaucgagucaauucggaauggcacguacaaccaugacguguaucgagaugaagcucucaauaaccgcuuucagauaaagggggucgagcugaaaaguggauacaaggacuggauccuuuggauuuccuucgccaucagcugcuuucuguugugugugguacuccugggcuucauuaugugggcuugccagagagguaauaucagguguaacauaugcaucuga

SEQ ID NO: 130476 - RNA, 1701 nt, Artificial Sequence; identical to SEQ ID NO: 130364
  derived and/or modified CDS sequence (opt3) from hemagglutinin__InfluenzaA__ACI25768

SEQ ID NO: 130477 - RNA, 1701 nt, Artificial Sequence
  derived and/or modified CDS sequence (opt3) from hemagglutinin__InfluenzaA__ACI25779
augaagaccaucauugcccugagcuacauauucugccucgcucuuggccaggaccugcccgggaacgauaauuccacagcaacuuuguguuuaggacaccaugccgugccuaacgguacgcuggucaaaaccaucacagacgaucaaauugagguuacuaaugcgaccgaacuugugcagucuucaaguacaggcaagaucugcaacaauccacacaggauucucgacgggaucgauuguacccugauagacgcucuacugggagauccgcauugcgacguauuucagaacgagacuugggauuuguucguggaaagaagcaaagccuuuuccaauuguuaucccuacgacgucccugauuaugcaucucuccggucgcugguggccucaagcggcacacuggaguucaucaccgaagguuuuacguggacugggguuacccagaacggaggcaguaaugcuugcaagcgcggcccaggguccggauucuuuucucgacucaacugguuaacaaaaagcgguuccacuuaccccgugcugaaugucaccaugccuaacaaugacaacuucgauaaguuguauauuuggggcgugcaccauccaucaacaaaucaagagcagaccaguuuguacguacaggcaagcgggcguguuacggugucuacuagaaggucccagcaaacaaucauucccaacaucuggucacggccuuggguccgcggacugagcaguagaauaucuauuuauuggaccaucgugaagccaggcgacgugcuagucauuaacuccaaugguaaccucaucgccccgaggggguacuuuaaaaugcggacuggaaagagcucgaucaugcgcucugacgcucccauugauacauguauauccgagugcaucaccccuaauggcucaauuccaaacgacaaacccuuccagaauguuaacaagaucacguacggcgccuguccuaaauaugugaagcagaauacccugaaacuugcgacagggaugcgaaacguaccagaaaagcagacuagaggacuguuuggugcaauagccggcuucauugagaaugggugggaaggaaugaucgauggcugguacgguuuuaggcaccaaaacagugaggggaccggccaggcugccgaccuuaagagcacacaggcagcuaucgaucaaauuaauggaaaacucaaccgggugaucgagaagacuaaugaaaaauuccaccagauugagaaggaguucuccgaagucgaaggccguauacaggaccuggagaaauauguggaggauaccaagaucgacuuauggucuuacaacgccgaacugcucguugcgcuugagaaucagcauacaauugaucugaccgacagcgaaaugaacaaguuguuugagaaaacucgcagacaacuaagggaaaacgccgaggauauggggaauggaugcuucaagaucuaucacaaaugugacaacgcaugcaucgagucaauucggaaugguacguacgaccaugauguguaucgagacgaagcucugaacaaucgcuuucagauaaagggcgucgagcucaaaaguggguacaaggauuggauccuguggauuuccuucgccaucagcugcuuucuucugugugugguauugcucggauucauuaugugggcuugccagagaggcaacaucagguguaauauaugcaucuga

SEQ ID NO: 130478 - RNA, 1701 nt, Artificial Sequence
  derived and/or modified CDS sequence (opt3) from hemagglutinin__InfluenzaA__ACI25790
augaagaccaucauugcccugagcuacauauucugccucgcucuuggccaggaccugcccgggaacgauaauuccacagcaacuuuguguuuaggacaccaugccgugccuaacgguacgcuggucaaaaccaucacagacgaucaaauugagguuacuaaugcgaccgaacuugugcagucuucaaguacaggcaagaucugcaacaauccacacaggauucucgacgggaucgauuguacccugauagacgcucuacugggagauccgcauugcgacguauuucagaacgagacuugggauuuguucguggaaagaagcaaagccuuuuccaauuguuaucccuacgacgucccugauuaugcaucucuccggucgcugguggccucaagcggcacacuggaguucaucaccgaagguuuuacguggacugggguuacccagaacggaggcaguaaugcuugcaagcgcggcccaggguccggauucuuuucucgacucaacugguuaacaaaaagcgguuccacuuaccccgugcugaaugucaccaugccuaacaaugacaacuucgauaaguuguauauuuggggcgugcaccauccaucaacaaaucaagagcagaccaguuuguacguacaggcaagcgggcguguuacggugucuacuagaaggucccagcaaacaaucauucccaacaucuggucacggccuuggguccgcggacugagcaguagaauaucuauuuauuggaccaucgugaagccaggcgacgugcuagucauuaacuccaaugguaaccucaucgccccgaggggguacuuuaaaaugcggacuggaaagagcucgaucaugcgcucugacgcucccauugauacauguauauccgagugcaucaccccuaauggcucaauuccaaacgacaaacccuuccagaauguuaacaagaucacguacggcgccuguccuaaauaugugaagcagaauacccugaaacuugcgacagggaugcgaaacguaccagaaaagcagacuagaggacuguuuggugcaauagccggcuucauugagaaugggugggaaggaaugaucgauggcugguacgguuuuaggcaccaaaacagugaggggaccggccaggcugccgaccuuaagagcacacaggcagcuaucgaucaaauuaauggaaaacucaaccgggugaucgagaagacuaaugaaaaauuccaccagauugagaaggaguucuccgaagucgaaggccguauacaggaccuggagaaauauguggaggauaccaagaucgacuuauggucuuacaacgccgaacugcucguugcgcuugagaaucagcauacaauugaucugaccgacagcgaaaugaacaaguuguuugagaaaacucgcagacaacuaagggaaaacgccgaggauauggggaauggaugcuucaagaucuaucacaaaugugacaacgcaugcaucgagucaauucggagugguacguacgaccaugauguguaucgagacgaagcucugaauaaccgcuuucagauaaagggcgucgagcucaaauccggguacaaggauuggauccuguggauuagcuucgccaucucuugcuuucuucugugugugguauugcucggauucauuaugugggcuugccagagaggcaauaucagguguaacauaugcaucuga

SEQ ID NO: 130479 - RNA, 1701 nt, Artificial Sequence
  derived and/or modified CDS sequence (opt3) from hemagglutinin__InfluenzaA__ACI25801
augaagaccaucauugcccugagcuacauauucugccucgcucuuggccaggaccugcccgggaacgauaauuccacagcaacuuuguguuuaggacaccaugccgugccuaacgguacgcuggucaaaaccaucacagacgaucaaauugagguuacuaaugcgaccgaacuugugcagucuucaaguacaggcaagaucugcaacaauccacacaggauucucgacgggaucaacuguacccugauagaugcucuacugggagacccgcauugcgauguauuucagaaugagacuugggacuuguucguggaaagaagcaaagccuuuuccaacuguuaucccuacgaugucccugacuaugcaucucuccggucgcugguggccucaagcggcacacuggaguucaucaccgaagauuuuacguggacugguguuacccagaaugggggaaguaacgcuugcaagcgcggcccaggcuccggguucuuuucucgacucaauugguuaacaaaaagcggauccacuuaccccgugcuggacgucaccaugccuaacaaugauaacuucgacaaguuguauauuuggggugugcaccauccaucaacaaaucaagagcagaccaguuuguacguacaggcaagcggccguguuacggugucuacuagaaggucccagcaaacaaucauucccaacaucgggucacggccuuggguccgcggacugagcaguagaauaucuauuuauuggaccaucgugaagccaggcgacgugcuagucauuaacuccaaugguaaccucaucgccccgaggggguacuuuaaaaugcggacuggaaagagcucgaucaugcgcucugaugcucccauugacacauguauauccgagugcaucaccccuaauggcucaauuccaaacgauaaacccuuccagaauguuaacaagaucacguacggcgccuguccuaaauaugugaagcagaauacccugaaacuugcgacagggaugcgaaacguaccagaaaagcagacuagaggacuguuuggugcaauagccggcuucauugagaaugggugggaaggaaugaucgacggcugguacgguuuuaggcaccaaaacagugaggggaccggccaggcugccgaucuuaagagcacacaggcagcuaucgaccaaauuaauggaaaacucaaccgggugaucgagaagacuaaugaaaaauuccaccagauugagaaggaguucuccgaagucgaaggccguauacaggaucuggagaaauauguggaggacaccaagaucgauuuauggucuuacaacgccgaacugcucguugcgcuugagaaucagcauacaauugaccugaccgauagcgaaaugaacaaguuguuugagaaaacucgcagacaacuaagggaaaacgccgaggacauggggaauggaugcuucaagaucuaucacaaaugugacaacgcaugcaucgagucaauucggaaugguacguacgaucaugacguguaucgagaugaagcucugaacaaucgcuuucagauaaagggcgucgagcucaaaaguggguacaaggacuggauccuguggauuuccuucgccaucagcugcuuucuucugugugugguauugcucggauucauuaugugggcuugccagagaggcaacaucagguguaauauaugcaucuga

SEQ ID NO: 130480 - RNA, 1689 nt, Artificial Sequence; identical to SEQ ID NO: 130398
  derived and/or modified CDS sequence (opt3) from hemagglutinin__InfluenzaA__ACI26274

SEQ ID NO: 130481 - RNA, 1698 nt, Artificial Sequence
  derived and/or modified CDS sequence (opt3) from hemagglutinin__InfluenzaA__ACI26307
augaagaccaucauugcccugagcuacauacucugccuuguguucacacagaaacugcccggcaacgacaauuccacugcuacguuguguuuagggcaccaugcagucccuaacggaaccaucguuaagacaauuacuaaugaucaaaucgaggugaccaacgccacagaacugguacagucuucaaguaccggugagauuugcgacagcccacaccagauccuagauggcgaaaauuguacucucauagacgcgcugcuuggggauccgcagugcgacggauuucaaaacaaaaagugggaucuguucguggagagauccaaggcuuauucuaauuguuaccccuaugacgucccugauuacgccucguugaggucacucguggcaagcaguggcacacuggaauuuaacaaugaguccuucaacuggaccgguguuacgcagaaugggacuucuagcgccugcauccggcgcuccaacaauucauuuuucagucgacugaacuggcucacccauuuaaaguuuaaguauccagcucugaaugugacaaugcccaacaacgagaaauucgacaaacuuuacauuuggggaguccaccauccugugacugauaaugaccagaucuuuuuguaugcacagagcggccguauuaccguaucuacaaaaagaucccaacagaccguuaucccaaacauaggcucaaggccccgggugcgcaauagcccuaguagaauuucuaucuacuggacgauugucaagccaggggauauccugcuaaucaacuccacuggaaaucucauugccccgagggguuacuucaaaauacggagcggcaagucgucuaucaugcgcuccgacgcucccauugggaaguguaacucagaaugcaucacaccuaauggaaguauaccaaacgacaaacccuuucagaaugugaaccgaauuaccuauggcgccuguccuagauacgugaagcagaauacucugaaacuugcgacagguaugaggaacgucccagagaagcaaacccgggggaucuucggagcaaucgccggcuuuauugaaaauggcugggaggggaugguugauggaugguaugguuuccgucaccagaacagcgagggcaucgggcaggcugccgaccugaaauccacgcaagcagcuauugaucagauaaauggaaaguugaaccgccucaucggcaaaaccaacgaaaaguuccaccagauugagaaggaauuuucugagguggaagguagaauccaggaccuggagaaauacguagaggauacaaagaucgacuuauggagcuauaaugccgaacugcucguggcgcuugagaaccaacauacuauugaucugaccgacucagaaaugaauaaauuguucgagaagacuaaaaagcagcuaagggaaaacgccgaggauauggggaauggcugcuuuaagauauaccacaaaugugacaacgcaugcaucggaaguauucggaauggcacauaugaucaugacgucuaccgagacgaggcucugaacaaucgcuuccagaucaaggggguggaacucaaauccggauacaaggauuggauucuguggaucagcuuugccauaucuugcuuccuucuguguguugcuuugcucgguuuuaucaugugggccugccagaaaggcaacauuagauguaauaucugcauuuga

SEQ ID NO: 130482 - RNA, 1701 nt, Artificial Sequence
  derived and/or modified CDS sequence (opt3) from hemagglutinin__InfluenzaA__ACI26362
augaagaccaucauugcccugagcuacauacucugccuuguguucgcucagaaacugcccggcaacgacaauuccacagcaacuuuguguuuagggcaccaugccgucccuaacggaacgaucguuaagaccauuacaaaugaucaaaucgaggugacuaacgcgaccgaacugguacagucuucaaguacaggugagauuugcgacagcccacaccagauccuagauggcgaaaauuguacccucauagacgcucugcuuggggauccgcagugcgacggauuucaaaacaaaaagugggaucuguucguggagagauccaaagccuauucuaauuguuaccccuaugacgucccugauuacgcaucguugaggucacucguggccagcaguggcacucuggaauuuaacaaugaguccuucaacuggacagguguuacccagaaugggacgucuagcgcuugcauccggcgcuccaacaauucauuuuucagucgacugaacuggcucacucauuuaaaguuuaaguauccagcacugaaugugaccaugcccaacaacgagcaguucgacaaacuuuacauuuggggaguccaccauccuggcacagauaaugaccagaucuuuuuguaugcccaagcuagcggccguauuacugugucuaccaagagaucccagcagacaguaaucccaaacauagggucaaggccccggguucgcaauauuccuagcagaaucaguauuuacuggaccaucgugaaaccaggagauauccugcuaauuaacucuacggguaaucucauagccccgaggggcuacuucaagauccgguccgggaaaagcucgauuaugcgcucugacgcgcccaucggaaaguguaacuccgaaugcauaacuccuaauggcucaauuccaaacgacaagcccuuucagaaugucaaccgaaucacauauggugcauguccuagauacgugaaacaaaauacccugaagcuggccacugggaugaggaacgugccagagaaacagacacggggaaucuucggcgcuauugccggcuuuaucgaaaaugggugggagggaauggucgaugguugguauggcuuccgucaccagaacagugaggggcgcggacaagcagcugaccuuaagagcacccaggccgcgauugaucagauaaauggcaaauugaacagacucaucgguaagacgaacgaaaaauuccaccagauugagaaggaauuuuccgagguugaagggaggauccaagaccuggagaaguacguggaggauaccaaaaucgacuuauggucuuauaaugccgaacugcucguagcacuugagaaccagcauacaauugaucugacugacagcgaaaugaauaaguuguucgagaaaaccaagaaacagcuacgggaaaacgcugaggauaugggcaauggaugcuuuaagauauaccacaagugugacaacgccugcaucggcucaauucgaaaugggacauaugaucaugacguguaccgcgacgaggcucugaacaauagauuccagaucaaaggagucgaacucaagagugguuacaaagauuggauucuguggaucuccuuugccauaagcugcuuccuucuguguguggcauugcucggcuuuaucaugugggccugccaaaaggggaacauuagguguaauaucugcauuuga

SEQ ID NO: 130483 - RNA, 1701 nt, Artificial Sequence
  derived and/or modified CDS sequence (opt3) from hemagglutinin__InfluenzaA__ACI26373
augaagaccaucauugcccugagcuacauacucugccuuguguucgcucagaaacugcccggcaacgacaauuccacagcaacuuuguguuuagggcaccaugccgucccuaacggaacgaucguuaagaccauuacaaaugaucaaaucgaggugacuaacgcgaccgaacugguacagucuucaaguacaggugagauuugcgacagcccacaccagauccuagauggcgaaaauuguacccucauagacgcucugcuuggggauccgcagugcgacggauuucaaaacaaaaagugggaucuguucguggagagauccaaagccuauucuaauuguuaccccuaugacgucccugauuacgcaucguugaggucacucguggccagcaguggcacucuggaauuuaacaaugaguccuucaacugggcugguguuacacagaaugggaccucuagcgcaugcauccggaaguccaacaauucauuuuucagucgccugaacuggcucacgcauuuaaaguuuaaauauccagcccugaaugugacuaugcccaacaacgagcaguucgacaaacuuuacauuuggggaguccaccauccuggcaccgauaaugaccagaucuuuuuguaugcucaagccagcggccgaauuacagugucuacuaagcguucccagcagaccguaaucccaaacauagggucaagacccaggguucggaauauuccuagccgcaucaguauuuacuggacaaucgugaagccaggagauauccugcuaauuaacucuaccgguaaucucauagcgccgagaggcuacuucaaaaucagguccggaaagagcucgauuaugcggucugacgcacccaucgggaaguguaacuccgaaugcauaacgccuaauggcucaauuccaaacgacaaacccuuucagaaugucaaccgcaucacuuauggugccuguccucgauacgugaagcaaaauacacugaaacuugcuaccgggaugagaaacgugccagagaagcagacuaggggaaucuucggcgccauugcaggcuuuaucgaaaaugggugggagggaauggucgaugguugguauggcuuccggcaccagaacagugaggggcguggacaagcugccgaccugaaaagcacacaggcggccauugaucagauaaauggcaaguugaaccgccucaucgguaaaaccaacgaaaaguuccaccagauugagaaggaauuuuccgagguugaagggagaauccaagaccuggagaaauacguggaggauacgaagaucgacuuauggucuuauaaugcagaacugcucguagcucuugagaaccagcauaccauugaucugacagacagcgaaaugaauaaauuguucgagaagacuaaaaagcagcuaagggaaaacgccgaggauaugggcaauggaugcuuuaagauauaccacaaaugugacaacgcuugcaucggcucaauucggaaugggaccuaugaucaugacguguaccgagacgaggcccugaacaaucgcuuccagaucaagggagucgaacucaaaagugguuacaaggauuggauucuguggaucuccuuugcaauaagcugcuuccuucuguguguggccuugcucggcuuuaucaugugggcuugccaaaaagggaacauuagauguaauaucugcauuuga

SEQ ID NO: 130484 - RNA, 1701 nt, Artificial Sequence; identical to SEQ ID NO: 130349
  derived and/or modified CDS sequence (opt3) from hemagglutinin__InfluenzaA__ACI26395

SEQ ID NO: 130485 - RNA, 1701 nt, Artificial Sequence
  derived and/or modified CDS sequence (opt3) from hemagglutinin__InfluenzaA__ACI26406
augaagaccaucauugcccugagcuacauacucugccuuguguucgcucagaaacugcccggcaacgacaauuccacagcaacuuuguguuuagggcaccaugccgucccuaacggaacgaucguuaagaccauuacaaaugaucaaaucgaggugacuaacgcgaccgaacugguacagucuucaaguacaggugagauuugcgacagcccacaccagauccuagauggcgaaaauuguacccucauagacgcucugcuuggggauccgcagugcgacggauuucaaaacaaaaagugggaucuguucguggagagauccaaagccuauucuaauuguuaccccuaugacgucccugauuacgcaucguugaggucacucguggccagcaguggcacucuggaauuuaacaaugaguccuucaacuggacagguguuacccagaaugggacgucuagcgcuugcauccggcgcuccaacaauucauuuuucagucgacugaacuggcucacucauuuaaaguuuaagcacccagcacugaaugugaccaugcccaacaacgagaaauucgacaaacuuuauauuuggggaguccaucacccuggcacagauaaugaccagaucuuuuuguacgcccaggcuagcggccguauuacugugucuaccaagagaucccaacagacaguaaucccaaacauagggucaaggccccggguucgcaauauuccuagcagaaucaguauuuauuggaccaucgugaagccaggagauauccugcuaauuaacucuacggguaaucucauagccccgaggggcuacuucaaaauccgguccggaaagagcucgauuaugcgcucugacgcgcccaucgggaaguguaacuccgaaugcauaacuccuaauggcucaauuccaaacgacaaacccuuucagaaugucaaccgaaucacauacggugcauguccuagauaugugaagcagaauacccugaaacuugccacugggaugaggaacgugccagagaagcaaacacggggaaucuucggcgcuauugccggcuuuaucgaaaaugggugggagggaauggucgaugguugguacggcuuccgucaccagaacagugaggggauuggacaggcagcugaccugaaaagcacccaagccgcgauagaucagaucaauggcaaguugaaccgccucauugguaaaacgaacgaaaaguuccaucagaucgagaaggaauuuuccgagguugaagggagaauccaggaccuggagaaauauguggaggauaccaagauugacuuauggucuuacaaugccgaacugcucguagcacuugagaaccaacacacaauagaucugacugacagcgaaaugaauaaauuguucgagaagaccaaaaagcagcuaagggaaaacgcugaggauaugggcaauggaugcuuuaagaucuaucauaaaugugacaacgccugcauuggcucaauccggaaugggacauacgaucacgacguguaucgagacgaggcucugaacaaucgcuuccagauuaagggagucgaacucaaaagugguuacaaggauuggauccuguggauauccuuugccaucagcugcuuccuucuguguguggcauugcucggcuuuauuaugugggccugccagaaagggaacaucagauguaauauuugcaucuga

SEQ ID NO: 130486 - RNA, 1701 nt, Artificial Sequence; identical to SEQ ID NO: 129976
  derived and/or modified CDS sequence (opt3) from hemagglutinin__InfluenzaA__ACI26417

SEQ ID NO: 130487 - RNA, 1701 nt, Artificial Sequence
  derived and/or modified CDS sequence (opt3) from hemagglutinin__InfluenzaA__ACI26428
augaagaccaucauugcccugagcuacauacucugccuuguguucgcucagaaacugcccggcaacgacaauuccacagcaacuuuguguuuagggcaccaugccgucccuaacggaacgaucguuaagaccauuacaaaugaucaaaucgaggugacuaacgcgaccgaacugguacagauuucuucaacagguggcaucugcgacaguccacaccagauacuagauggggagaauuguacccucaucgacgcucugcuuggagauccgcagugcgacggcuuucaaaacaaaaagugggaucuguucguggaaagaagcaaagccuauuccaauuguuaccccuaugacgucccugauuacgcaucuuugaggucgcucguggccucaagcgguacucuggaguuuaacaaugaaaguuucaacuggacagggguuacccagaauggaacguccucuagcugcaagcggcgcuccaacaauucauuuuucagucgacugaacuggcucacucauuuaaaguuuaaauauccagcucugaaugugaccaugcccaacaacgagaaguucgacaaacuuuacauuuggggcguccaccauccugugacagauaaugaccagauccguuuguaugcacaggccagcggcagaauuacuguaucuaccaagaggucccaacagacaguuaucccaaacauaggguaccggccccgcgugagagauauuccuucaaggaucagcauuuacuggaccaucgucaaaccaggagacauccugcuaauuaauaguacggguaaccucauagcuccgcggggcuauuuuaagauccgcucugggaaguccagcauuaugcgaucggacgcccccaucggaaaauguaauucugagugcauaacuccuaacggcuccauuccaaaugauaagcccuuccagaacgugaauagaaucacauacggugcguguccuagguaugugaaacagaacacccugaaacuugcaacugggaugcggaaugucccagaaaagcaaacacguggaaucuuuggcgccauugcuggcuucaucgagaacgggugggaaggaaugguugacgguugguacggcuuucgccaccaaaauucagaggggauuggacaggccgcagaucugaagaguacccaggcugccauaaaccagaucaauggcaaauugaacagacucauugguaagacgaacgagaaguuccaccagaucgaaaaagaguucagcgaaguggaggggaggauccaggaccuggaaaaguauguagaggauaccaaaauugacuuaugguccuacaaugcggagcugcucguggcccuugaaaaccaacauacaauagaucugacugacucugagaugaauaaguuguuugaacggaccaaaaagcagcuacgagagaacgcagaagauaugggcaauggaugcuucaagaucuaucacaaaugugacaacgcuugcauuggcagcauccgcaaugggacauacgaucaugacgucuacagagacgaggcccugaacaauagguuucagauuaagggaguggagcucaaaucagguuauaaggauuggauccuguggauaaguuucgcuaucuccugcuuucuucuguguguuguguugcucggcuucauuaugugggccugccagaaagggaacauccgguguaauauuugcaucuga

SEQ ID NO: 130488 - RNA, 1698 nt, Artificial Sequence
  derived and/or modified CDS sequence (opt3) from hemagglutinin__InfluenzaA__ACI26439
augaaggugaaacugcucguccuucugugcaccuucacagccacuuacgcugacacgaucuguauuggcuaucacgcaaacaauagcaccgauacaguugacacuguguuggagaagaacguaaccgugacacauuccgucaauuuacuggaagauucucacaacgggaaacuaugccuccugaagggaauagcgccccuucagcuggguaauuguucaguggccggcuggaucuuggggaacccugagugcgaacuccugauuaguaaagagagcugguccuacaucguugaaaagccaaauccggagaacggaaccuguuaucccggccauuuugcugacuacgaggaacugagagagcaacucucuucggugagcucauucgaaagguuugagauuuucccuaaggagaguuccuggccaaaucacacugucacaggugugucugccagcugcucccauaacgggaaaucaaguuuuuauaagaauuuacuguggcuuaccggcaaaaacggauuguaccccaaucugagcaagucuuaugcaaacaauaaagaaaaggagguucuaguacucuggggcgugcaccacccuccaaacaucgggaaccagcgggcccuguaccauacggaaaaugcuuacgucuccguggugucaagccacuauagucgcaaguucacucccgagauagcaaaacgaccuaagguccgugaucaggaaggaagaaucaacuacuauuggacccuucuggagccaggugacacaauuaucuuugaggccaauggcaacuugauugcuccgagguacgccuucgcgcucucucggggguuuggauccggcaucauaaauagcaacgcacccauggaugaaugugacgccaaaugccagacuccucaaggugcuauuaauucgucucugccauuccagaacguucaucccgugaccaucggggaguguccuaaguauguacgcuccgccaaauuaagaauggugacaggacugaggaauauuccaucaauccagagucggggccucuuuggcgcaaucgcuggguucauugaaggagguuggaccggcauggucgaugggugguacggauaucaccaccagaacgagcaaggcagcgguuacgccgcggaccagaaguccacgcagaaugccauaaacgggaucacuaauaaagugaacucuguuauugaaaagaugaauacacaguuuaccgcagugggcaaggaguucaacaaacuugagcgccgaauggaaaaccugaauaagaaagucgaugacggauucaucgauguguggacuuacaacgcugaguugcuaguacugcucgaaaaugagagaacacuggacuuucaugacagcaacguuaagaaucuuuaugaaaaagugaagucacaacugaagaacaaugccaaagagauaggcaacgggugcuucgaguuuuaccacaaguguaaugaugaaugcauggagagugucaaaaacggaaccuaugacuaccccaaguauuccgaagagagcaaauugucuagggagaagauugauggugugaagcucgaaucaaugggcgucuaccagauccuggcuaucuauaguacgguggccagcuccuuaguucugcuagugucucucggggcaauuucguucuggaugugcagcaauggaucccugcagugucggaucugcauuuga

SEQ ID NO: 130489 - RNA, 1698 nt, Artificial Sequence; identical to SEQ ID NO: 130488
  derived and/or modified CDS sequence (opt3) from hemagglutinin__InfluenzaA__ACI26450

SEQ ID NO: 130490 - RNA, 1701 nt, Artificial Sequence
  derived and/or modified CDS sequence (opt3) from hemagglutinin__InfluenzaA__ACI26461
augaagaccaucauugcccugagcuacauacucugccuuguguucacacagaaacugcccggcaacgacaauuccacugcuacguuguguuuagggcaccaugcagucccuaacggaaccaucguuaagacaauuacuaaugaucaaaucgaggugaccaacgccacagaacugguacagucuucaaguaccggugagauuugcgacagcccacaccagauccuagauggcgaaaauuguacucucauagacgcgcugcuuggggauccgcagugcgacggauuucaaaacaaaaagugggaucuguucguggagagauccaaggcuuauucuaauuguuaccccuaugacgucccugauuacgccucguugaggucacucguggcaagcaguggcacacuggaauuuaacaaugaguccuucaacuggaccgguguuacgcagaaugggacuucuagcgccugcauccggcgcuccaacaauucauuuuucagucgacugaacuggcucacccauuuaaaguuuaaguauccagcucugaaugugacaaugcccaacaacgagaaauucgacaaacuuuacauuuggggaguccaccauccuggcacugauaaugaccagaucuuuccauaugcacaggccagcggccguauuaccgugucuacaaaaagaucccaacagaccguaauccccaacauagggucaaggccucggguucgcaauauuccaagcagaaucaguauuuacuggacgaucgugaagccgggagauaucuugcugauuaacucuacugguaaucuaauagcucccaggggcuacuucaaaauccgguccgggaaaagcucgauuaugcgcucugacgccccuaucggaaaguguaacuccgaaugcauaacaccaaauggcucaauucccaacgacaaaccuuuucagaaugucaaccgaaucaccuauggugcguguccaagauacgugaagcagaauacucucaaacuggcaacagggaugaggaacgugcccgagaagcaaacccggggaaucuucggcgccauugcuggcuuuaucgaaaaugggugggagggaauggucgaugguugguauggcuuccgucaccagaacagugaggggauuggacaggccgcagaccuuaaaagcacgcaagcugccauagaucagaucaauggcaagcugaaccgcuugauugguaaaaccaacgaaaaguuccaccagaucgagaaggaauuuuccgagguugaagggagaauccaggaccucgagaaauacguggaggauacaaagauugaccuguggucuuauaaugcggaauuacugguagcccucgagaaccaacauacuauagaucuuaccgacagcgaaaugaauaaacuguucgagaagacaaagaagcaguugagggaaaacgcagaggauaugggcaauggaugcuuuaagaucuaccacaaaugugacaacgcuugcauuggcucaauccggaaugggacuuaugaucauaacguguaccgagacgaggcccuaaauaaccgcuuccagauuaagggagucgaacugaaaagugguuacaaggacuggauccucuggauauccuuugcuaucagcugcuuccugcuuuguguggcccuguugggcuuuauuaugugggcaugccagaaagggaauaucagauguaacauuugcaucuga

SEQ ID NO: 130491 - RNA, 1698 nt, Artificial Sequence
  derived and/or modified CDS sequence (opt3) from hemagglutinin__InfluenzaA__ACI26472
augaagaccaucauugcccugagcuacauacucugccuuguguucacacagaaacugcccggcaacgacaauuccacugcuacguuguguuuagggcaccaugcagucccuaacggaaccaucguuaagacaauuacuaaugaucaaaucgaggugaccaacgccacagaacugguacagucuucaaguaccggugagauuugcgacagcccacaccagauccuagauggcgaaaauuguacucucauagacgcgcugcuuggggauccgcagugcgacggauuucaaaacaaaaagugggaucuguucguggagagauccaaggcuuauucuaauuguuaccccuaugacgucccugauuacgccucguugaggucacucguggcaagcaguggcacacuggaauuuaacaaugaguccuucaacuggaccgguguuacgcagaaugggacuucuagcgccugcauccggcgcuccaacaauucauuuuucagucgacugaacuggcucacccauuuaaaguuuaaguauccagcucugaaugugacaaugcccaacaacgagaaauucgacaaacuuuacauuuggggaguccaccauccugugacugauaaugaccagaucuuuuuguaugcacagagcggccguauuaccguaucuacaaaaagaucccaacagaccguuaucccaaacauaggcuacaggccccgggugcgcaauauuccuucaagaaucagcauuuacuggacgaucgucaagccaggggauauccugcuaauuaacaguacuggaaaucucauagccccgagggguuauuucaaaauccggucuggcaaguccagcauuaugcgcucggacgcucccaucgggaaguguaacucugaaugcauaacaccuaauggauccauuccaaacgacaaacccuuucagaaugugaaccgaaucaccuacggcgccuguccuagauaugugaagcagaauacucugaaacuugcgacagguaugaggaacgucccagagaagcaaacccgggggaucuucggagcaauugccggcuuuaucgaaaauggcugggaggggaugguugauggaugguacgguuuccgucaccagaacucagagggcauugggcaggcugccgaccugaaaaguacgcaagcagcuauagaucagaucaauggaaaguugaaccgccucauuggcaaaaccaacgaaaaguuccaccagaucgagaaggaauuuagcgagguggaagguagaauccaggaccuggagaaauauguagaggauacaaagauugacuuaugguccuacaaugccgaacugcucguggcgcuugagaaccaacauacuauagaucugaccgacucugaaaugaauaaauuguucgagaagacuaaaaagcagcuaagggaaaacgccgaggauauggggaauggcugcuuuaagaucuaucacaaaugugacaacgcaugcauuggaagcauccggaauggcacauacgaucaugacgucuaccgagacgaggcucugaacaaucgcuuccagauuaaggggguggaacucaaaucaggauauaaggauuggauccuguggauaaguuuugccaucuccugcuuccuucuguguguugcuuugcucgguuuuauuaugugggccugccagaaaggcaacaucagauguaauauuugcaucuga

SEQ ID NO: 130492 - RNA, 1701 nt, Artificial Sequence; identical to SEQ ID NO: 130483
  derived and/or modified CDS sequence (opt3) from hemagglutinin__InfluenzaA__ACI26483

SEQ ID NO: 130493 - RNA, 1701 nt, Artificial Sequence
  derived and/or modified CDS sequence (opt3) from hemagglutinin__InfluenzaA__ACI26505
augaagaccaucauugcccugagcuacauacucugccuuguguucgcucagaaacugcccggcaacgacaauuccacagcaacuuuguguuuagggcaccaugccgucccuaacggaacgaucguuaagaccauuacaaaugaucaaaucgaggugacuaacgcgaccgaacugguacagucuucaaguacaggugagauuugcgacagcccacaccagauccuagauggcgaaaauuguacccucauagacgcucugcuuggggauccgcagugcgacggauuucaaaacaaaaagugggaucuguucguggagagauccaaagccuauucuaauuguuaccccuaugacgucccugauuacgcaucguugaggucacucguggccagcaguggcacucuggaauuuaacaaugaguccuucaacugggcugguguuacacagaaugggaccucuagcgcaugcauccggaaguccaacaauucauuuuucagucgccugaacuggcucacgcauuuaaaguuuaaauauccagcccugaaugugacuaugcccaacaacgagcaguucgacaaacuuuacauuuggggaguccaccauccuggcaccgauaaugaccagaucuuuuuguaugcucaagccagcggccgaauuacagugucuacuaagcguucccagcagaccguaaucccaaacauagggucaagacccaggguucggaauauuccuagccgcaucaguauuuacuggacaaucgugaagccaggagauauccugcuaauuaacucuaccgguaaucucauagcgccgagaggcuacuucaaaaucagguccggaaagagcucgauuaugcggucugacgcacccaucgggaaguguaacuccgaaugcauaacgccuaauggcucaauuccaaacgacaaacccuuucagaaugucaaccgcaucacuuauggugccuguccucgauacgugaagcaaaauacacugaaacuugcuaccgggaugagaaacgugccagagaagcagacuaggggaaucuucggcgccauugcaggcuuuaucgaaaaugggugggagggaauggucgaugguugguauggcuuccggcaccagaacagugaggggcguggacaagcugccgaccugaaaagcacacaggcggccauugaucagauaaauggcaaguugaaccgccucaucgguaaaaccaacgaaaaguuccaccagauugagaaggaauuuuccgagguugaagggagaauccaagaccuggagaaauacguggaggauacgaagaucgacuuauggucuuauaaugcagaacugcucguagcucuugagaaccagcauaccauugaucugacagacagcgaaaugaauaaauuguucgagaagacuaaaaagcagcuaagggaaaacgccgaggauaugggcaauggaugcuuuaagauauaccacaaaugugacaacgcuugcauccggucaauucgaaauggcaccuaugaucaugacguguaccgcgacgaggcccugaacaauagauuccagaucaagggggucgaacucaaaaguggauacaaggauuggauucuguggaucuccuuugcaauaagcugcuuccuucuguguguggccuugcucgguuuuaucaugugggcuugccaaaaaggcaacauuagguguaauaucugcauuuga

SEQ ID NO: 130494 - RNA, 1701 nt, Artificial Sequence; identical to SEQ ID NO: 130482
  derived and/or modified CDS sequence (opt3) from hemagglutinin__InfluenzaA__ACI26516

SEQ ID NO: 130495 - RNA, 1701 nt, Artificial Sequence; identical to SEQ ID NO: 130483
  derived and/or modified CDS sequence (opt3) from hemagglutinin__InfluenzaA__ACI26527

SEQ ID NO: 130496 - RNA, 1701 nt, Artificial Sequence
  derived and/or modified CDS sequence (opt3) from hemagglutinin__InfluenzaA__ACI26538
augaagaccaucauugcccugagcuacauacucugccuuguguucgcucagaaacugcccggcaacgacaauuccacagcaacuuuguguuuagggcaccaugccgucccuaacggaacgaucguuaagaccauuacaaaugaucaaaucgaggugacuaacgcgaccgaacugguacagucuucaaguacaggugagauuugcgacagcccacaccagauccuagauggcgaaaauuguacccucauagacgcucugcuuggggauccgcagugcgacggauuucaaaacaaaaagugggaucuguucguggagagauccaaagccuauucuaauuguuaccccuaugacgucccugauuacgcaucguugaggucacucguggccagcaguggcacucuggaauuuaacaaugaguccuucaacuggacagguguuacccagaaugggacgucuagcgcuugcauccggcgcuccaacaauucauuuuucagucgacugaacuggcucacucauuuaaaguuuaaguauccagcacugaaugugaccaugcccaacaacgagcaguucgacaaacuuuacauuuggggaguccaccauccuggcacagauaaugaccagaucuuuuuguaugcccaagcuagcggccguauuacugugucuaccaagagaucccagcagacaguaaucccaaacauagggucaaggccccggguucgcaauauuccuagcagaaucaguauuuacuggaccaucgugaaaccaggagauauccugcuaauuaacucuacggguaaucucauagccccgaggggcuacuucaagauccgguccgggaaaagcucgauuaugcgcucugacgcgcccaucggaaaguguaacuccgaaugcauaacuccuaauggcucaauuccaaacgacaagcccuuucagaaugucaaccgaaucacauauggugcauguccuagauacgugaaacaaaauacccugaagcuggccacugggaugaggaacgugccagauaaacagacacggggaaucuucggcgcuauugccggcuuuaucgagaaugggugggaaggaauggucgacgguugguauggcuuccgucaccagaacagugaggggcgcggacaagcagcugaucuuaagagcacccaggccgcgauugaccagauaaauggcaaauugaacagacucaucgguaagacgaacgagaaauuccaccagauugaaaaggaguuuuccgaaguugaggggaggauccaagaucuggaaaaguacguggaggacaccaaaaucgauuuauggucuuauaaugccgagcugcucguagcacuugaaaaccagcauacaauugaccugacugauagcgagaugaauaaguuguucgagaaaaccaagaaacagcuacgggaaaacgcugaagacaugggcaauggaugcuuuaagauauaccacaagugugauaacgccugcaucggcucaauucgaaaugggacauaugaccaugacguguaccgcgaugaggcucugaacaauagauuccagaucaaaggagucgagcucaagagugguuacaaagacuggauucuguggaucuccuuugccauaagcugcuuccuucuguguguggcauugcucggcuuuaucaugugggccugccaaaaggggaacauuagguguaauaucugcauuuga

SEQ ID NO: 130497 - RNA, 1701 nt, Artificial Sequence
  derived and/or modified CDS sequence (opt3) from hemagglutinin__InfluenzaA__ACI26549
augaagaccaucauugcccugagcuacauauucugccucguguuugcucagaaacuucccggcaacgacaauuccacagcaacucuguguuuggggcaccaugccgucccuaacggaacguuaguuaagaccaucacaaaugaucaaauugaggugacuaacgcgaccgaacugguacagucuucaaguacagguagaaucugcgacagcccacacaggauucuagauggcaaaaauuguacccucaucgacgcucugcuuggggauccgcauugcgacggauuccagaacgagaagugggaucuguuuguggaacgguccaaagccuauucuaauuguuaccccuaugacgucccugauuacgcaucguugcgcucacucguggccagcaguggcacucuggaguucauaaacgaagacuuuaauuggacagguguuacccaguccgggggaucuuauagcugcaagcgaggcuccgugaacucauucuuuagucgucugaauuggcuccacgagagcgaguacaaguauccagcuuuaaacgucacgaugcccaauaacggcaaauucgauaagcuguacaucuggggagugcaucacccuucuacugacagagaacaaaccaaacuuuacguaagggcauccgggcggguuacagugucaacuaagcgcagccagcagaccgucauuccaaauaucgguaguagacccugggugaggggcuugucuucccggauuagcaucuauuggacaauagugaaaccuggggauauucugcuaaucaacucgaccggaaaccucauugccccacgcggcuacuuuaagauccgaacggguaagucuuccaucaugagaucagacgcuccgauugggacuuguaguagcgagugcauaacacccaauggauccaucccuaacgacaaaccauuccagaaugucaacaagauuaccuauggcgccugucccagguacguuaaacaaaauacucugaagcuggcgacaggcaugcggaacgugccugaaaaacagacccgugggaucuuuggagcaauagccgguuucauugagaauggcugggaggggaugguagauggaugguauggcuuucgccaccagaacucugaagguacggggcaggcugccgaccuuaagagcacccaagcagcuaucgaucagaucaauggcaaauugaacagacucauugagaagacaaaugaaaaguuccaucagaucgagaaagaguucucagaaguggagggaaggauucaagaccuggaagaguacgucgaagauacuaagauagacuuauggaguuauaacgccgagcugcucguggcgcuugaaaaucagcacaccaucgaucugacagacuccgagaugaacaaauuguuugagaagacucggaaacagcuacgagaaaaugccgaggauaugggcaacgggugcuucaagauuuaccauaagugugacaacgcaugcaucggaagcauccgcaaugguaccuacgaucacgacguuuauagagacgaagcucugaacaauagguuucagauuaaaggcguggagcucaagucuggguacaaagauuggauacuguggaucucauucgccauuaguugcuuucuucugugugucguguugcucggauucaucaugugggcuugccaaaagggcaacauucgguguaauaucugcauauga

SEQ ID NO: 130498 - RNA, 1701 nt, Artificial Sequence
  derived and/or modified CDS sequence (opt3) from hemagglutinin__InfluenzaA__ACI26560
augaagaccaucauugcccugagcuacauauucugccucguguuugcucagaaacuucccggcaacgacaauuccacagcaacucuguguuuggggcaccaugccgucccuaacggaacguuaguuaagaccaucacaaaugaucaaauugaggugacuaacgcgaccgaacugguacagucuucaaguacagguagaaucugcgacagcccacacaggauucuagauggcaaaaauuguacccucaucgacgcucugcuuggggauccgcauugcgacggauuccagaacaaggagugggaucuguuuguggaacgguccaaagccuauucuaauuguuaccccuaugacgucccugauuacgcaucguugcgcucacucguggccagcaguggcacucuggaguucauaaacgaagacuuuaauuggacagguguugcucaguccgggggaucuuaugcaugcaagcgaggcagcgugaacuccuucuuuucacgucugaauuggcuccacgagagugaguacaaguauccagccuuaaacgucaccaugcccaauaacggcaaauucgauaagcuguacaucuggggagugcaucacccuauuacggacagagaacaaacuaaucuuuacguaagggcuagcgggcggguuaccgugucuacaaaacgcucccagcagacugucaucccaaacauugguucaagacccugggugaggggcuugagcagucggaucucuauauauuggaccauugugaagccuggggauauccugcuaauuaacuccacaggaaaucucaucgccccacgcggcuacuuuaaaauccgaaccgguaagagcucgauuaugagaucugacgcgccgauagggacguguuccucagagugcaucacucccaacggaaguauuccuaaugacaagccauuccagaacgucaauaggaucacauauggcgcauguccccgguacguuaaacaaaacacccugaaacuugccacuggcaugcguaaugugccugaaaagcagacacgcgggauauuuggagcuauugccgguuucaucgagaacggcugggaggggaugguagauggaugguauggcuuuagacaccagaauagcgaagguaccgggcaggcagcugaccugaaguccacgcaagccgcgaucgaucagauuaacggcaaauugaauaggcucaucgagaagaccaacgaaaaauuccaucagauugagaaggaguucucugaaguggagggacggauacaagaccuggaaaaguacgucgaggauacaaaaaucgacuuauggagcuauaaugccgaacugcucguggcacuugagaaccagcacacuauugaucugaccgacucagaaaugaauaaguuguuugagaaaacacgaaagcagcuacgcgagaacgcugaagauaugggcaacgggugcuucaaaaucuaccauaagugugacaaugccugcaucggaaguauuagaaacgguacuuacgaucacgacguuuauagggacgaggcucugaauaaccgguuucagauaaagggcguggaacucaaauccggguacaaggauuggauccuguggauuagcuucgccaucucuugcuuucuucugugugucguguugcucggauucauuaugugggcaugccaaaaaggcaauauccgcuguaacauaugcaucuga

SEQ ID NO: 130499 - RNA, 1701 nt, Artificial Sequence
  derived and/or modified CDS sequence (opt3) from hemagglutinin__InfluenzaA__ACI26571
augaagaccaucauugcccugagcuacauauucugccucguguuugcucagaaacuucccggcaacgacaauuccacagcaacucuguguuuggggcaccaugccgucccuaacggaacguuaguuaagaccaucacaaaugaucaaauugaggugacuaacgcgaccgaacugguacagucuucaaguacagguagaaucugcgacagcccacacaggauucuagauggcaaaaauuguacccucaucgacgcucugcuuggggauccgcauugcgacggauuccagaacaaggagugggaucuguuuguggaacgguccaaagccuauucuaauuguuaccccuaugacgucccugauuacgcaucguugcgcucacucguggccagcaguggcacucuggaguucauaaacgaagacuuuaauuggacagguguugcucaguccgggggaucuuaugcaugcaagcgaggcagcgugaacuccuucuuuucacgucugaauuggcuccacgagagugaguacaaguauccagccuuaaacgucaccaugcccaauaacggcaaauucgauaagcuguacaucuggggagugcaucacccuagcacggacagagaacaaacuaaacuuuacguaagggcuucugggcggguuaccguguccacaaagcgcucacagcagacugucauuccaaauaucgguagcagacccugggugaggggcuugaguucucggauuuccaucuauuggaccauagugaaaccuggggauauucugcuaaucaacagcacaggaaaccucauugccccacgcggcuacuuuaagauccgaaccgguaagucgucuaucaugagauccgacgcgccgauugggacguguucaagugagugcauaacucccaauggaagcaucccuaacgacaaaccauuccagaaugucaacaggauuacauauggcgcauguccccgguacguuaagcaaaauacccugaaacuugccacuggcaugcguaacgugccugaaaagcagacacgcgggaucuuuggagcuauagccgguuucauugagaauggcugggaggggaugguagauggaugguauggcuuuagacaccagaacuccgaagguaccgggcaggcagcugaccugaaaucuacgcaagccgcgaucgaucagaucaauggcaaguugaacaggcucauugagaaaaccaaugaaaaguuccaucagaucgagaaggaguucagcgaaguggagggacggauucaagaccuggaaaaauacgucgaggauacaaagauagacuuauggucauauaacgccgaacugcucguggcacuugagaaucagcacacuaucgaucugaccgacagugaaaugaacaaauuguuugagaagacacgaaaacagcuacgcgagaaugcugaagauaugggcaacgggugcuucaagauuuaccauaagugugacaacgccugcaucggauccaucagaaaugguacuuacaaccacgauguuuauagggacgaggcucugaauaaccgguuucagauuaaaggcguggaacucaagagcggguacaaagacuggauacuguggaucucuuucgccauuucaugcuuucuucugugugucguguugcucggauucaucaugugggcaugccaaaagggcaauauucgcuguaacaucugcauauga

SEQ ID NO: 130500 - RNA, 1701 nt, Artificial Sequence
  derived and/or modified CDS sequence (opt3) from hemagglutinin__InfluenzaA__ACI26593
augaagaccaucauugcccugagcuacauacucugccuuguguucgcucagaaacugcccggcaacgacaauuccacagcaacuuuguguuuagggcaccaugccgucccuaacggaacgcugguuaagaccaucacaaaugaucaaauugaggugacuaacgcgaccgaacuuguacagucuucaaguacagguagaaucugcgacagcccacacaggauucucgauggcaaaaauuguacccugaucgacgcucuacugggggauccgcauugcgacggauuucagaacaaggagugggauuuguucguggaacgguccaaagccuauucuaauuguuaccccuaugacgucccugauuacgcaucgcuccgcucacugguggccagcaguggcacucuggaguuuacaaacgaagacuucaauuggaccgguguugcucaguccggggagucuuaugcaugcaagcgaggaagcgugaaguccuuuuucucacgucucaacugguuacacaaaagugauuacaaguauccagcccugaaugucacgaugcccaacaauggcaaauuugacaaacuuuacauauggggcgugcaucacccuagcacugauagagagcaaaccucuuuguacguaagggcuuccgggcggguuacagugucaacuaaacgcagccagcagaccgucaucccaaacauuggaaguagacccugggugaggggucugucuucccggaucagcauuuauuggacaaucgugaagccuggcgacauacuacucauuaauucgaccgggaaccugaucgccccacgcggauacuucaagauucgaacgggcaaaucuuccaucaugagaucagacgcgccgaucgguacuuguaguagcgaaugcauuacacccaacggguccauaccuaaugauaagccauuucagaacgucaauaggaucaccuauggagcauguccccgguacguuaaacaaaacacucuuaagcuggccacaggcaugcguaaugugccugagaaacagacccgcggcauuuucggggcuaucgccggauuuauagaaaacgguugggagggcaugguagacgggugguauggauucagacaccagaauagcgagggcacgggucaggcagcugauuugaagucuacccaagccgcgauugaccagaucaacgggaaacucaauaggcugaucgaaaagacaaacgagaaguuucaucagauugaaaaagaguucucagaaguggagggccggauccaagauuuagagaaguacgucgaagacacuaaaauugaucuguggaguuauaaugccgagcuccuuguggcacuggaaaaccagcacaccauagacuugacagauuccgagaugaauaagcuauucgaaaagacucgaaagcagcugcgcgagaacgcugaggacaugggaaauggcugcuuuaagaucuaccauaaaugugauaacgccugcauugggagcaucagaaacggaaccuacgaccacgacguuuauagggaugaagcucucaauaaccgguuccagaucaaggguguggagcugaaaucuggcuacaaggacuggauucuuuggauaucauuugccaucaguugcuuccuguugugugucgugcuccugggguuuauuaugugggcaugccaaaaaggaaauauccgcuguaacauuugcaucuga

SEQ ID NO: 130501 - RNA, 1698 nt, Artificial Sequence
  derived and/or modified CDS sequence (opt3) from hemagglutinin__InfluenzaA__ACI32715
augaaggugaaacugcucguccuucugugcaccuucacagccacuuacgcugacacgaucuguauuggcuaucacgcaaacaauagcaccgauacaguugacacuguguuggagaagaacguaaccgugacacauuccgucaauuuacuggaagauucucacaacgggaaacuaugccuccugaagggaauagcgccccuucagcuggguaauuguucaguggccggcuggaucuuggggaacccugagugcgaacuccugauuaguaaagagagcugguccuacaucguugaaaccccaaauccggagaacggaacuuguuaucccggcuacuuugcugacuaugaggaacugagagagcaacucucuucggugagcucauucgaaagguuugagauuuucccuaaggagaguuccuggccaaaucauacagucaccggugugucugccagcugcucccacaacgggaagucaaguuuuuaccggaauuuacuguggcuuacgggcaaaaacggauuguaucccaaucugagcaagucuuacgcaaacaauaaagaaaaggagguucuaguacucuggggcgugcaucacccuccaaacaucggggaucagcgcgcccuguaccacacugaaaacgcuuaugucuccguggugucaagccauuacagucgacguuucacccccgagauagcaaaaagaccuaaggucagggaccaggaaggacggaucaauuauuacuggacacuucuggagccaggugauacuauuaucuuugaggccaacggcaauuugauugcuccgcgcuucgccuuugcgcucucuagaggguucggauccggcaucauaaccagcaacgcacccauggacgaaugugaugccaagugccagacaccucaaggugcuauuaauucgucucugccauuucagaacguucaccccgugaccaucggggaguguccuaaauauguaagguccgccaaguuacggauggcaacgggacugcgcaauauuccaucaauccagagucgaggccucuucggcgcuaucgccggguuuauugaaggagguuggacuggcaugguggacgggugguacggauaucaucaccagaacgagcaaggcagcgguuacgcggccgaucagaaauccacacagaaugcaauaaacgggaucaccaauaaggucaacacugugauugaaaagaugaauacacaguucaccgcuguuggcaaagaguucucuaaacuugagagaaggauggaaaaccugaauaagaagguggacgauggauuuuuggacaucuggacguacaacgccgagcuacugguccuccuggaaaacgagcggacccuugacuuccacgauagcaaugugaaaaaccuguaugaaaagguaaaaucacaauugaagaauaacgcuaaagagauaggcaaugggugcuuugaguucuaccauaaguguaacgacgaaugcauggagaguguuaagaauggaacauaugauuaccccaaauauuccgaagagagcaagcucaaccgugagaaaauugacggugugaagcuggaaucuaugggcgucuaccagaucuuagccaucuauucaacuguggcaaguagccugguccuacucgugucccugggggccauuucuuuuuggaugugcucgaauggaagccuucagugucgcaucugcauuuga

SEQ ID NO: 130502 - RNA, 1698 nt, Artificial Sequence
  derived and/or modified CDS sequence (opt3) from hemagglutinin__InfluenzaA__ACI32716
augaaggugaaacugcucguccuucugugcaccuucacagccacuuacgcugacacgaucuguauuggcuaucacgcaaacaauagcaccgauacaguugacacuguguuggagaagaacguaaccgugacacauuccgucaauuuacuggaagauucucacaacgggaaacuaugccuccugaagggaauagcgccccuucagcuggguaauuguucaguggccggcuggaucuuggggaacccugagugcgaacuccugauuaguaaagagagcugguccuacaucguugaaaccccaaauccggagaacggaacuuguuaucccggcuacuuugcugacuaugaggaacugagagagcaacucucuucggugagcucauucgaaagguuugagauuuucccuaaggagaguuccuggccaaaucauacagucaccggugugucugccagcugcucccacaacgggaagucaaguuuuuaccggaauuuacuguggcuuacgggcaaaaacggauuguaucccaaucugagcaagucuuacgcaaacaauaaagaaaaggagguucuaguacucuggggcgugcaucacccuccaaacaucggggaucagcgcgcccuguaccacacugaaaacgcuuaugucuccguggugucaagccauuacagucgacguuucacccccgagauagcaaaaagaccuaaggucagggaccaggaaggacggaucaauuauuacuggacacuucuggagccaggugauacuauuaucuuugaggccaacggcaauuugauugcuccgcgcuucgccuuugcgcucucuagaggguucggauccggcaucauaaccagcaacgcacccauggacgaaugugaugccaagugccagacaccucaaggugcuauuaauucgucucugccauuucagaacguucaccccgugaccaucggggaguguccuaaauauguaagguccgccaaguuacggauggcaacgggacugcgcaauauuccaucaauccagagucgaggccucuucggcgcuaucgccggguuuauugaaggagguuggacuggcaugguggacgggugguacggauaucaucaccagaacgagcaaggcagcgguuacgcggccgaucagaaauccacacagaaugcaauaaacgggaucaccaauaaggucaacucugugauugaaaagaugaauacucaguucacagcuguuggcaaagaguucagcaaacuugagagaaggauggaaaaccugaauaagaagguggacgauggauuuuuggacaucuggaccuacaacgccgagcuacugguccuccuggaaaacgagcggacgcuugacuuccacgauucaaaugugaaaaaccuguaugaaaagguaaaaagucaauugaagaauaacgcuaaagagauaggcaaugggugcuuugaguucuaccauaaguguaacgacgaaugcauggaguccguuaagaauggaaccuaugauuaccccaaauauagcgaagagucuaagcucaaccgugagaaaauugacggugugaagcuggaaucaaugggcgucuaccagaucuuagccaucuauaguacaguggcaagcucccugguccuacucgugucucugggggccauuucguuuuggaugugcagcaauggaucccuucaguguacuaucugcauuuga

SEQ ID NO: 130503 - RNA, 1698 nt, Artificial Sequence
  derived and/or modified CDS sequence (opt3) from hemagglutinin__InfluenzaA__ACI32717
augaaggugaaacugcucguccuucugugcaccuucacagccacuuacgcugacacgaucuguauuggcuaucacgcaaacaauagcaccgauacaguugacacuguguuggagaagaacguaaccgugacacauuccgucaauuuacuggaagauucucacaacgggaaacuaugccuccugaagggaauagcgccccuucagcuggguaauuguucaguggccggcuggaucuuggggaacccugagugcgaacuccugauuaguaaagagagcugguccuacaucguugaaaccccaaauccggagaacggaacuuguuaucccggcuacuuugcugacuaugaggaacugagagagcaacucucuucggugucaucguucgaaagguuugagauuuucccuaaggagaguuccuggccaaaucauacagucaccggugugucugccagcugcucccacaacgggaagucaaguuuuuaccggaauuuacuguggcuuacgggcaaaaacggauuguaucccaaucugagcaagucuuacgcaaacaauaaagaaaaggagguucuaguacucuggggcgugcaucacccuccaaacaucggggaucagcgcgcccuguaccacacugaaaacgcuuaugucuccguggugucaagccauuacagucgacguuucacccccgagauagcaaaaagaccuaaggucagggaccaggaaggacggaucaauuauuacuggacacuucuggagccaggugauacuauuaucuuugaggccaacggcaauuugauugcuccgcgcuucgccuuugcgcucucuagaggguucggauccggcaucauaaccagcaacgcacccauggacgaaugugaugccaagugccagacaccucaaggugcuaugaauagcucucugccauuucagaacguucaccccgugaccauuggggaguguccuaaauauguaagguccgccaaguuacggauggcaacgggacugcgcaauaucccaucaauucagagucgaggccucuucggcgcuaucgccggguuuaucgaaggagguuggacuggcaugguggacgggugguacggauaucaucaccagaacgagcaaggcagcgguuacgcggccgaucagaaauccacacagaaugcaauuaacgggauaaccaauaaggucaacucugugaucgaaaagaugaauacucaguucacagcuguuggcaaagaguucagcaaacuugagagaaggauggaaaaccugaauaagaagguggacgauggauuuuuggacauuuggaccuacaacgccgagcuacugguccuccuggaaaacgagcggacgcuugacuuccacgauucaaaugugaaaaaccuguaugaaaagguaaaaagucaauugaagaauaacgcuaaagagaucggcaaugggugcuuugaguucuaccauaaguguaacgacgaaugcauggaguccguuaagaauggaaccuaugauuaccccaaauauagcgaagagucuaagcucaaccgugagaaaauagacggugugaagcuggaaucaaugggcgucuaccagauuuuagccaucuauaguacaguggcaagcucccugguccuacucgugucucugggggccaucaauuuuuggaugugcucgaacggaagccuucaguguaaaauuugcaucuga

SEQ ID NO: 130504 - RNA, 1698 nt, Artificial Sequence
  derived and/or modified CDS sequence (opt3) from hemagglutinin__InfluenzaA__ACI32718
augaaggugaaacugcucguccuucugugcaccuucacagccacuuacgcugacacgaucuguauuggcuaucacgcaaacaauagcaccgauacaguugacacuguguuggagaagaacguaaccgugacacauuccgucaauuuacuggaagauucucacaacgggaaacuaugccuccugaagggaauagcgccccuucagcuggguaauuguucaguggccggcuggaucuuggggaacccugagugcgaacuccugauuaguaaagagagcugguccuacaucguugaaaccccaaauccggagaacggaacuuguuaucccggcuacuuugcugacuaugaggaacugagagagcaacucucuucggugagcucauucgaaagguuugagauuuucccuaaggagaguuccuggccaaaucauacagccaccggugucucugcaagcugcucccacaacgggaagucaaguuuuuaccggaauuuacuguggcuuacgggcaaaaacggauuguaucccaaucugagcaagucuuacgccaacaauaaagaaaaggaggugcuaguacucuggggcguucaucacccuccaaacaucggggaucagcgcgcucuguaccacacugaaaacgcauauguguccgucgugucaagccauuacagucgacguuucacccccgagauagccaaaagaccuaaggugagggaccaggaaggacggaucaauuauuacuggacacuucuggagccaggugauacuauuaucuuugaggcuaacggcaauuugauugccccgcgcuucgcguuugcacucucuagaggguucggauccggcaucauaaccagcaacgcccccauggacgaaugugaugcuaagugccagacaccucaaggugccauuaauucgucucugccauuucagaacguccaccccguuaccaucggggaguguccuaaauaugugagguccgcaaaguuacggauggcuacgggacugcgcaauauuccaucaauccagagucgaggccucuucggcgccaucgcgggguuuauugaaggagguuggacuggcaugguagacgggugguacggauaucaucaccagaacgagcaaggcagcgguuacgccgcagaucagaaauccacacagaaugcuauaaacgggaucaccaauaaggugaacucugucauugaaaagaugaauacucaguucacagccgugggcaaagaguucagcaaacuugagagaaggauggaaaaccugaauaagaagguugacgauggauuuuuggacaucuggaccuacaacgcugagcuacuggugcuccuggaaaacgagcggacgcuugacuuccacgauucaaaugucaaaaaccuguaugaaaaggugaaaagucaauugaagaauaacgccaaagagguaggcaaugggugcuuugaguucuaccauaaguguaacgacgaaugcauggaguccguuaagaauggaaccuaugauuaccccaaauauagcgaagagucuaagcucaaccgugagaaaauagacggugugaagcuggaaucaaugggcgucuaccagauuuuagcaaucuauaguacaguggccagcucccugguccuacucgugucucugggggcuaucucguuuuggaugugcagcaauggaucccuucaguguacuauuugcaucuga

SEQ ID NO: 130505 - RNA, 1698 nt, Artificial Sequence; identical to SEQ ID NO: 130502
  derived and/or modified CDS sequence (opt3) from hemagglutinin__InfluenzaA__ACI32719

SEQ ID NO: 130506 - RNA, 1698 nt, Artificial Sequence; identical to SEQ ID NO: 130502
  derived and/or modified CDS sequence (opt3) from hemagglutinin__InfluenzaA__ACI32720

SEQ ID NO: 130507 - RNA, 1698 nt, Artificial Sequence
  derived and/or modified CDS sequence (opt3) from hemagglutinin__InfluenzaA__ACI32721
augaaggugaaacugcucguccuucugugcaccuucacagccacuuacgcugacacgaucuguauuggcuaucacgcaaacaauagcaccgauacaguugacacuguguuggagaagaacguaaccgugacacauuccgucaauuuacuggaagauucucacaacgggaaacuaugccuccugaagggaauagcgccccuucagcuggguaauuguucaguggccggcuggaucuuggggaacccugagugcgaacuccugauuaguaaagagagcugguccuacaucguugaaaccccaaauccggagaacggaacuuguuaucccggcuacuuugcugacuaugaggaacugagagagcaacucucuucggugagcucauucgaaagguuugagauuuucccuaaggagaguuccuggccaaaucauacagucaccggugugucugccagcugcucccacaacgggaagucaaguuuuuaccggaauuuacuguggcuuacgggcaaaaacggauuguaucccaaucugagcaagucuuacgcaaacaauaaagaaaaggagguucuaguacucuggggcgugcaucacccuccaaacaucggggaucagcgcgcccuguaccacacugaaaacgcuuaugucuccguggugucaagccauuacagucgacguuucacccccgagauagcaaaaagaccuaaggucagggaccaggaaggacggaucucuuauuacuggacacuucuggagccaggugauacuauuaucuuugaggccaauggcaacuugauugcuccgcgcuucgccuuugcgcucuccagaggguucggaagcggcaucauaaccucgaaugcacccauggacgaaugugaugccaagugccagacaccucaaggugcuauuaacucuucccugccauuucagaauguucaccccgugaccaucggggaguguccuaaauauguaaggucagccaaguuacggauggcaacgggacugcgcaacauuccaaguauccagagccgaggccucuucggcgcuaucgccggguuuauugaaggagguuggacuggcaugguggacgggugguacggauaucaucaccagaaugagcaaggcuccgguuacgcggccgaucagaaaucuacacagaacgcaauaaaugggaucaccaacaaggucaauagcgugauugaaaagaugaacacucaguucacagcuguuggcaaagaguucucaaaacuugagagaaggauggaaaaucugaacaagaagguggacgauggauuuuuggacaucuggaccuacaaugccgagcuacugguccuccuggaaaacgagcggacgcuugacuuccacgauaguaacgugaaaaaucuguaugaaaagguaaaaucccaauugaagaacaaugcuaaagagauaggcaacgggugcuuugaguucuaccauaaguguaaugacgaaugcauggagagcguuaagaacggaaccuaugauuaccccaaauauucugaagagucaaagcucaaucgugagaaaauugacggugugaagcuggaaaguaugggcgucuaccagaucuuagccaucuauagcacaguggcauccucucugguccuacucgugucgcugggggccauuagcuuuuggaugugcuccaacggaucacuucagugucgcaucugcauuuga

SEQ ID NO: 130508 - RNA, 1698 nt, Artificial Sequence; identical to SEQ ID NO: 130502
  derived and/or modified CDS sequence (opt3) from hemagglutinin__InfluenzaA__ACI32722

SEQ ID NO: 130509 - RNA, 1698 nt, Artificial Sequence
  derived and/or modified CDS sequence (opt3) from hemagglutinin__InfluenzaA__ACI32723
augaaggugaaacugcucguccuucugugcaccuucacagccacuuacgcugacacgaucuguauuggcuaucacgcaaacaauagcaccgauacaguugacacuguguuggagaagaacguaaccgugacacauuccgucaauuuacuggaagauucucacaacgggaaacuaugccuccugaagggaauagcgccccuucagcuggguaauuguucaguggccggcuggaucuuggggaacccugagugcgaacuccugauuaguaaagagagcugguccuacaucguugaaaccccaaauccggagaacggaacuuguuaucccggcuacuuugcugacuaugaggaacugagagagcaacucucuucggugagcucauucgaaagguuugagauuuucccuaaggagaguuccuggccaaaucauacagucaccggugugucugccagcugcucccacaacgggaagucaaguuuuuaccggaauuuacuguggcuuacgggcaaaaacggauuguaucccaaucugagcaagucuuacgcaaacaauaaagaaaaggagguucuaguacucuggggcgugcaucacccuccaaacaucggggaucagcgcgcccuguaccacacugaaaacgcuuaugucuccguggugucaagccauuacagucgacguuucacccccgagauagcaaaaagaccuaaggucagggaccaggaaggacggaucaauuauuacuggacacuucuggagccaggugauacuauuaucuuugaggccaacggcaauuugauugcuccgcgcuucgccuuugcgcucucuagaggguucggauccggcaucauaaccagcaacgcacccauggacgaaugugaugccaagugccagacaccucaaggugcuauuaauucgucucugccauuucagaacguucaccccgugaccaucggggaguguccuaaauauguaagguccgccaaguuacggauggcaacgggacugcgcaauauuccaucaauccagagucgaggccucuucggcgcuaucgccggguuuauugaaggagguuggacuggcaugguggacgggugguacggauaucaucaccagaacgagcaaggcagcgguuacgcggccgaucagaaauccacacagaaugcaauaaacgggaucaccaauaaggucaacucugugauugaaaagaugaauacucaguucacagcuguuggcaaagaguucagcaaacuugagagaaggauggaaaaccugaauaagaagguggacgauggauuuuuggacaucuggaccuacaacgccgagcuacugguccuccuggaaaacgagcggacgcuugacuuccacgauucaaaugugaaaaaccuguaugaaaagguaaaaagucaauugaagaauaacgcuaaagagauaggcaaugggugcuuugaguucuaccauaaguguaacgacgaaugcauggaguccguuaagaauggaaccuaugauuaccccaaauauagcgaagagucuaagcucaaccgugagaaaauugacggugugaagcuggaaucaaugggcgucuaccagaucuuagccaucuauaguacaguggcaagcucccugguccuacucgugucucugggggccauuucguuuuggaugugcagcaauggaucccuucagugucgcaucugcuucuga

SEQ ID NO: 130510 - RNA, 1698 nt, Artificial Sequence
  derived and/or modified CDS sequence (opt3) from hemagglutinin__InfluenzaA__ACI32724
augaaggugaaacugcucguccuucugugcaccuucacagccacuuacgcugacacgaucuguauuggcuaucacgcaaacaauagcaccgauacaguugacacuguguuggagaagaacguaaccgugacacauuccgucaauuuacuggaagauucucacaacgggaaacuaugccuccugaagggaauagcgccccuucagcuggguaauuguucaguggccggcuggaucuuggggaacccugagugcgaacuccugauuaguaaagagagcugguccuacaucguugaaaccccaaauccggagaacggaacuuguuaucccggcuacuuugcugacuaugaggaacugagagagcaacucucuucggugagcucauucgaaagguuugagauuuucccuaaggagaguuccuggccaaaucauacagucaccggugugucugccagcugcucccacaacgggaagucaaguuuuuaccggaauuuacuguggcuuacgggaaagaacggcuuguaucccaaucugagcaagucuuacgcaaacaauaaagaaaaggagguucuaguacucuggggcgugcaucacccuccaaacaucggggaucagcgcgcccuguaccacacugaaaacgcuuaugucuccguggugucaagccauuacagucgacguuucacccccgagauagcaaaaagaccuaaggucagggaccaggaaggacggaucaauuauuacuggacacuucugaagccaggugauacuauuaucuuugaggccaacggcaauuugauugcuccgcgcuucgccuuugcgcucucuagaggguucggauccggcaucauaaccagcaacgcacccauggacgagugugaugccaaaugccagacaccucaaggugcuauuaauucgucucugccauuucagaacguucaccccgugaccaucggggaauguccuaaguauguaagguccgccaaauuacggauggcaacgggacugcgcaauauuccaucaauccagagucgaggccucuucggcgcuaucgccggguuuauugagggagguuggacuggcaugguggacgggugguacggauaucaucaccagaacgaacaaggcagcgguuacgcggccgaucagaaguccacacagaaugcaauaaacgggaucaccaauaaagucaacucugugauugagaagaugaauacucaguucacagcuguuggcaaagaguucagcaaacuugaaagaaggauggagaaccugaauaagaaaguggacgauggauuuuuggacaucuggaccuacaacgccgaacuacugguccuccuggagaacgaacggacgcuugacuuccacgauucaaaugugaagaaccuguaugagaaaguaaagagucaauugaaaaauaacgcuaaggaaauaggcaaugggugcuuugaguucuaccauaaguguaacgacgagugcauggaauccguuaaaaauggaaccuaugauuaccccaaguauagcgaggaaucuaaacucaaccgugagaagauugacggugugaaacuggagucaaugggcgucuaccagaucuuagccaucuauaguacaguggcaagcucccugguccuacucgugucucugggggccauuucguuuuggaugugcagcaauggaucccuucaguguaagaucugcauuuga

SEQ ID NO: 130511 - RNA, 1698 nt, Artificial Sequence; identical to SEQ ID NO: 129433
  derived and/or modified CDS sequence (opt3) from hemagglutinin__InfluenzaA__ACI32725

SEQ ID NO: 130512 - RNA, 1698 nt, Artificial Sequence
  derived and/or modified CDS sequence (opt3) from hemagglutinin__InfluenzaA__ACI32726
augaaggugaaacugcucguccuucugugcaccuucacagccacuuacgcugacacgaucuguauuggcuaucacgcaaacaauagcaccgauacaguugacacuguguuggagaagaacguaaccgugacacauuccgucaauuuacuggaagauucucacaacgggaaacuaugccuccugaagggaauagcgccccuucagcuggguaauuguucaguggccggcuggaucuuggggaacccugagugcgaacuccugauuaguaaagagagcugguccuacaucguugaaaccccaaauccggagaacggaacuuguuaucccggcuacuuugcugacuaugaggaacugagagagcaacucucuucggugagcucauucgaaagguuugagauuuucccuaaggagaguuccuggccaaaucauacagucaccggugugucugccagcugcucccacaacgggaagucaaguuuuuaccggaauuuacuguggcuuacgggcaaaaacggauuguaucccaaucugagcaagucuuacgcaaacaauaaagaaaaggagguucuaguacucuggggcgugcaucacccuccaaacaucggggaucagcgcgcccuguaccacacugaaaacgcuuaugucuccguggugucaagccauuacagucgacguuucacccccgagauagcaaaaagaccuaaggucagggaccaggaaggacggaucaauuauuacuggacacuucuggagccaggugauacuauuaucuuugaggccaacggcaauuugauugcuccgcgcuucgccuuugcgcucucuagaggguucggauccggcaucauaaccagcaacgcacccauggacgaaugugaugccaagugccagacaccucaaggugcuauuaauucgucucugccauuucagaacguucaccccgugaccaucggggaguguccuaaauauguaagguccgccaaguuacggauggcaacgggacugcgcaauauuccaucaauccagagucgaggccucuucggcgcuaucgccggguuuauugaaggagguuggacuggcaugguggacgggugguacggauaucaucaccagaacgagcaaggcagcgguuacgcggccgaucagaaauccacacagaaugcaauaaacgggaucaccaauaaggucaacucugugauugaaaagaugaauacucaguucacagcuguuggcaaagaguucagcaaacuugagaagagaauggaaaaccugaauaagaaaguggacgauggauuuuuggacaucuggaccuacaacgccgagcuacugguccuccuggaaaacgagaggacgcuugacuuccacgauucaaaugugaagaaccuguaugaaaaaguaaagagucaauugaaaaauaacgcuaaggagauaggcaaugggugcuuugaguucuaccauaaguguaacgacgaaugcauggaguccguuaaaaauggaaccuaugauuaccccaaguauagcgaagagucuaaacucaaccgggagaagauugacggugugaaacuggaaucaaugggcaucuaccagaucuuagccauuuauaguacagucacuagcucccuggugcuacucgucucucugggggcaaucucguuuuggaugugcagcaauggaucccuucagugucguauuugcauauga

SEQ ID NO: 130513 - RNA, 1698 nt, Artificial Sequence
  derived and/or modified CDS sequence (opt3) from hemagglutinin__InfluenzaA__ACI32727
augaaggugaaacugcucguccuucugugcaccuucacagccacuuacgcugacacgaucuguauuggcuaucacgcaaacaauagcaccgauacaguugacacuguguuggagaagaacguaaccgugacacauuccgucaauuuacuggaagauucucacaacgggaaacuaugccuccugaagggaauagcgccccuucagcuggguaauuguucaguggccggcuggaucuuggggaacccugagugcgaacuccugauuaguaaagagagcugguccuacaucguugaaaccccaaauccggagaacggaacuuguuaucccggcuacuuugcugacuaugaggaacugagagagcaacucucuucgauuagcucauucgaaagguuugagaucuucccuaaggagaguuccuggccaaaucauacagugaccggugucucugccagcugcucccacaacgggaagucaaguuuuuaccggaauuuacuguggcuuacgggcaaaaacggauuguaucccaaucugagcaagucuuacgcaaacaauaaagaaaaggaggugcuaguacucuggggcguucaucacccuccaaacauaggggaucagcgcgcccuguaccacacugaaaacgcuuauguguccgucgugucaagccauuacagucgacguuucacccccgagaucgcaaaaagaccuaaggugagggaccaggaaggacggauuaauuauuacuggacacuucuggagccaggugauacuaucauuuuugaggccaacggcaauuugaucgcuccgcgcuucgccuuugcgcucucuagaggguucggauccggcauaauuaccagcaacgcacccauggacgaaugugaugccaagugccagacaccucaaggugcuaucaauucgucucugccauuucagaacguccaccccguuaccauuggggaguguccuaaauaugugagguccgccaaguuacggauggcaacgggacugcgcaauaucccaucaauccagagucgaggccucuucggcgcuauugccggguuuauagaaggagguuggacuggcaugguagacgggugguacggauaucaucaccagaacgagcaaggcagcgguuacgcggccgaucagaaauccacacagaaugcaaucaacgggauuaccaauaaggugaacucugucaucgaaaagaugaauacucaguucacagcugugggcaaagaguucagcaaacuugagagaaggauggaaaaccugaauaagaagguugacgauggauuuuuggacauauggaccuacaacgccgagcuacuggugcuccuggaaaacgagcggacgcuugacuuccacgauucaaaugucaaaaaccuguaugaaaaggugaaaagucaauugaagaauaacgcuaaagagauuggcaaugggugcuuugaguucuaccauaaguguaacgacgaaugcauggaguccguaaagaauggaaccuaugauuaccccaaauauagcgaagagucuaagcucaaccgugagaaaaucgacgguguuaagcuggaaucaaugggcguguaccagaucuuagccauuuauaguacagucgcaagcucccuggugcuacucgucacucugggggccaucucuuuuuggaugugcucgaauggaagccuucaguguaccauuugcauauga

SEQ ID NO: 130514 - RNA, 1698 nt, Artificial Sequence
  derived and/or modified CDS sequence (opt3) from hemagglutinin__InfluenzaA__ACI32729
augaaggugaaacugcucguccuucugugcaccuucacagccacuuacgcugacacgaucuguauuggcuaucacgcaaacaauagcaccgauacaguugacacuguguuggagaagaacguaaccgugacacauuccgucaauuuacuggaagauucucacaacgggaaacuaugccuccugaagggaauagcgccccuucagcuggguaauuguucaguggccggcuggaucuuggggaacccugagugcgaacuccugauuccaaaagagaguuggagcuacaucguugaaaccccgaaucccgagaacggaacuuguuauccuggcuacuuugcugacuaugaggaacugagagagcaacucuccucugugucgucauucgaaagguuugagauuuucccaaaggagagcaguuggcccaaucauacagucaccgguguguccgccucuugcagccacaacgggaaguccucauuuuaccggaauuuacuguggcuuacgggcaaaaacggauuguauccuaaucugaguaagagcuacgcaaacaauaaagaaaaggagguucuaguacucuggggcgugcaucacccacccaacaucggggaucagcgcgcccuguaccacacugaaaacgcuuaugucucugugguguccucacauuacagccgacguuucaccccugagauagcaaaaagaccaaaggucagggaccaggaaggacggaucaauuauuacuggacacuucuggagccgggugauacuauuaucuuugaggccaacggcaauuugauugcuccccgcuucgccuuugcgcucaguagaggguucggaucuggcaucauaaccuccaacgcaccuauggacgaaugugaugccaagugccagacaccacaaggugcuauuaauagcucgcugcccuuucagaacguucacccugugaccaucggggaguguccaaaauauguaaggucugccaaguuacggauggugacgggacugcgcaauauucccuccauccagucacgaggccucuucggcgcaaucgcuggguuuauugaaggagguuggacuggcauggucgacgggugguacggauaucaucaccagaacgagcaaggcagugguuacgccgcggaucagaaaagcacacagaaugccauaaacggggugaccaauaagguuaacuccgugaucgaaaagaugaauacucaguucacagcagucggcaaagaguucaacaaacuugagagaaggauggaaaaucugaacaagaagguggacgauggauuuuuggacauuuggaccuacaacgcugagcuacugguacuccuggaaaaugagcggacgcuugacuuccacgauucuaacguuaaaaaucuguaugaaaaggugaaaagccaauugaagaacaaugccaaagagaucggcaacgggugcuuugaguucuaccauaaguguaaugacgaaugcauggagucagucaagaacggaaccuaugauuacccgaaauauagugaagaguccaagcucaaucgugagaaaauagacggugugaagcuggaaagcaugggcgucuaccagauuuuagcuaucuauucuacaguggccucaagucugguucuacucgugagccugggggcaaucuccuuuuggaugugcucuaacggaucgcuucagugucgcauuugcaucuga

SEQ ID NO: 130515 - RNA, 1698 nt, Artificial Sequence; identical to SEQ ID NO: 130514
  derived and/or modified CDS sequence (opt3) from hemagglutinin__InfluenzaA__ACI32730

SEQ ID NO: 130516 - RNA, 1698 nt, Artificial Sequence
  derived and/or modified CDS sequence (opt3) from hemagglutinin__InfluenzaA__ACI32731
augaaggugaaacugcucguccuucugugcaccuucacagccacuuacgcugacacgaucuguauuggcuaucacgcaaacaauagcaccgauacaguugacacuguguuggagaagaacguaaccgugacacauuccgucaauuuacuggaagauucucacaacgggaaacuaugccuccugaagggaauagcgccccuucagcuggguaauuguucaguggccggcuggaucuuggggaacccugagugcgaacuccugauuaguaaagagagcugguccuacaucguugaaaagccaaauccggagaacggaaccuguuaucccggccauuuugcugacuacgaggaacugagagagcaacucucuucggugagcucauucgaaagguuugagauuuucccuaaggagaguuccuggccaaaucacacugucacaggugugucugccagcugcucccauaacgggaaaucaaguuuuuauaagaauuuacuguggcuuaccggaaagaacggcuuguaccccaaucugagcaagucuuaugcaaacaauaaagaaaaggagguucuaguacucuggggcgugcaccacccuccaaacaucggggaucagaaggcccuguaccauacggaaaacgcuuacgucuccguggugucaagccacuauagucggaaauucaaucccgagauagcaaagcgcccuaaaguccgagaccaggaaggacguaucaacuacuauuggacucuucuggagccaggugauaccauuaucuuugaggccaauggcaacuugauugcuccgagauacgccuucgcgcucucuaggggguuuggauccggcaucauaaauagcaacgcacccauggacgaaugugaugccaagugccagacaccucaaggugcuauuaauucgucucugccauuccagaacguucaucccgugacuaucggggaguguccuaaauauguacgguccgccaaguuacgcauggugaccggacugagaaauauuccaucaauccagaguaggggccucuuuggcgcaaucgcuggguucauugaaggagguuggacaggcauggucgacgggugguacggauaucaccaccagaacgagcaaggcagcgguuacgccgcggaucagaaauccacccagaaugccauaaacgggaucacgaauaaggugaacucuguuauugaaaagaugaauacucaguuuacagcagugggcaaagaguucaacaaacuugagcggcgcauggaaaaccugaauaaaaaggucgacgauggauucaucgacauauggaccuacaacgcugaguugcuagugcugcucgaaaaugagcgaacucuggacuuucaugauagcaacguuaaaaaucuuuaugaaaagguaaagucacaacugaaaaacaaugccaaggagauuggcaacgggugcuucgaguuuuaccacaaauguaaugacgaaugcauggagagugugaagaacggaacauaugauuaccccaaauauuccgaagagagcaaguugaauagagagaagaucgacggugucaaacucgaaucuaugggcguguaccagauccuggcuauuuauucaaccgucgccaguagcuuagugcugcuaguuucccucggggcaaucucuuucuggaugugcucgaacggaagccugcaguguaagauuugcauauga

SEQ ID NO: 130517 - RNA, 1698 nt, Artificial Sequence
  derived and/or modified CDS sequence (opt3) from hemagglutinin__InfluenzaA__ACI32732
augaaggugaaacugcucguccuucugugcaccuucacagccacuuacgcugacacgaucuguauuggcuaucacgcaaacaauagcaccgauacaguugacacuguguuggagaagaacguaaccgugacacauuccgucaauuuacuggaagauucucacaacgggaaacuaugccuccugaagggaauagcgccccuucagcuggguaauuguucaguggccggcuggaucuuggggaacccugagugcgaacuccugauuaguaaagagagcugguccuacaucguugaaaccccaaauccggagaacggaacuuguuaucccggcuacuuugcugacuaugaggaacugagagagcaacucucuucggugagcucauucgaaagguuugagauuuucccuaaggagaguuccuggccaaaucauacagucaccggugugucugccagcugcucccacaacgggaagucaaguuuuuaccggaauuuacuguggcuuacgggcaaaaacggauuguaucccaaucugagcaagucuuacgcaaacaauaaagaaaaggagguucuaguacucuggggcgugcaucacccuccaaacaucggggaucagcgcgcccuguaccacacugaaaacgcuuaugucuccguggugucaagccauuacagucgacguuucacccccgagauagcaaaaagaccuaaggucagggaccaggaaggacggaucaauuauuacuggacacuucuggagccaggugauacuauuaucuuugaggccaacggcaauuugauugcuccgcgcuucgccuuugcgcucucuagaggguucggauccggcaucauaaccagcaacgcacccauggacgaaugugaugccaagugccagacaccucaaggugcuauuaauucgucucugccauuucagaacguucaccccgugaccaucggggaguguccuaaauauguaagguccgccaaguuacggauggugacgggacugcgcaauauuccaucaauccagagucgaggccucuucggcgcaaucgcuggguuuauugaaggagguuggacuggcauggucgacgggugguacggauaucaucaccagaacgagcaaggcagcgguuacgccgcggaucagaaauccacacagaaugccauaaacgggaucaccaauaaggugaacucuguuauugaaaagaugaauacucaguucacagcagugggcaaagaguucaacaaacuugagagaaggauggaaaaucugaacaagaaggucgacgauggauuuuuggacaucuggaccuacaacgcugagcuacuggugcuccuggaaaaugagcggacgcuugacuuccacgauagcaacguuaaaaaucuguaugaaaagguaaaaucacaauugaagaacaaugccaaagagauaggcaacgggugcuuugaguucuaccauaaguguaaugacgaaugcauggagagugugaagaacggaaccuaugauuaccccaaauauuccgaagagagcaagcucaaucgugagaaaauugacggugucaagcuggaaucuaugggcguguaccagaucuuagcuaucuauucaacagucgccaguagccuggugcuacucguuucccugggggcaauuucuuuuuggaugugcucgaacggaagccuucaguguacuaucugcauuuga

SEQ ID NO: 130518 - RNA, 1698 nt, Artificial Sequence
  derived and/or modified CDS sequence (opt3) from hemagglutinin__InfluenzaA__ACI32733
augaaggugaaacugcucguccuucugugcaccuucacagccacuuacgcugacacgaucuguauuggcuaucacgcaaacaauagcaccgauacaguugacacuguguuggagaagaacguaaccgugacacauuccgucaauuuacuggaagauucucacaacgggaaacuaugccuccugaagggaauagcgccccuucagcuggguaauuguucaguggccggcuggaucuuggggaacccugagugcgaacuccugauuaguaaagagagcugguccuacaucguugaaaagccaaauccggagaacggaaccuguuaucccggccauuuugcugacuacgaggaacugagagagcaacucucuucggugagcucauucgaaagguuugagauuuucccuaaggagaguuccuggccaaaucacacugucacaggugugucugccagcugcucccauaacgggaaaucaaguuuuuauaagaauuuacuguggcuuaccggaaagaacggcuuguaccccaaucugagcaagucuuaugcaaacaauaaagaaaaggagguucuaguacucuggggcgugcaccacccuccaaacaucggggaucagaaggcccuguaccauacggaaaacgcuuacgucuccguggugucaagccacuauagucggaaauucaauucugagauagcaaagcgccccaaaguccgagaccaggaaggacguaucaacuacuauuggacucuucuggagccuggugauaccauuaucuuugaggccaauggcaacuugauugcuccaagauacgccuucgcgcucuccaggggguuuggaagcggcaucauaaauucgaacgcaccgauggacgaaugugaugccaagugccagacaccccaaggugcuauuaauucuucccugccuuuccagaacguucauccagugacuaucggggagugucccaaauauguacggucagccaaguuacgcauggugaccggacugagaaauauuccuaguauccagagcaggggccucuuuggcgcaaucgcuggguucauugaaggagguuggacaggcauggucgacgggugguacggauaucaccaccagaacgagcaaggcuccgguuacgccgcggaucagaaaucuacccagaaugccauaaacgggaucacgaauaaggugaacagcguuauugaaaagaugaauacucaguuuacagcagugggcaaagaguucaacaaacuugagcggcgcauggaaaaccugaauaaaaaggucgacgauggauucaucgacauauggaccuacaacgcugaguugcuagugcugcucgaaaaugagcgaacucuggacuuucaugauucaaacguuaaaaaucuuuaugaaaagguaaagagucaacugaaaaacaaugccaaggagauuggcaacgggugcuucgaguuuuaccacaaauguaaugacgaaugcauggaguccgugaagaacggaacauaugauuacccaaaauauagcgaagagucuaaguugaauagagagaagaucgacggugucaaacucgaaucaaugggcguguaccagauccuggcuauuuauaguaccgucgccagcuccuuagugcugcuaguuucucucggggcaaucucguucuggaugugcagcaacggaucccugcaguguacgauuugcauauga

SEQ ID NO: 130519 - RNA, 1698 nt, Artificial Sequence
  derived and/or modified CDS sequence (opt3) from hemagglutinin__InfluenzaA__ACI32734
augaaggugaaacugcucguccuucugugcaccuucacagccacuuacgcugacacgaucuguauuggcuaucacgcaaacaauagcaccgauacaguugacacuguguuggagaagaacguaaccgugacacauuccgucaauuuacuggaagauucucacaacgggaaacuaugccuccugaagggaauagcgccccuucagcuggguaauuguucaguggccggcuggaucuuggggaacccugagugcgaacuccugauuaguaaagagagcugguccuacaucguugaaaccccaaauccggagaacggaacuuguuaucccggcuacuuugcugacuaugaggaacugagagagcaacucucuucggugagcucauucgaaagguuugagauuuucccuaaggagaguuccuggccaaaucauacagucaccggugugucugccagcugcucccacaacgggaagucaaguuuuuaccggaauuuacuguggcuuacgggaaagaacggcuuguaucccaaucugagcaagucuuacgcaaacaauaaaaagaaagaaguucuaguacucuggggcgugcaucacccuccaaacaucggggaucagaaggcccuguaccacacugagaacgcuuaugucuccguggugucaagccauuacagucgccgauucacccccgaaauagcaaagcguccuaaagucagagaccaggagggaaggaucaauuauuacuggacacuucuggaaccaggugauacuauuaucuuugaggccaacggcaauuugauugcuccgcgguucgccuuugcgcucucucgcggguucggauccggcaucauaaccagcaacgcacccauggacgagugugaugccaagugccagacaccucaaggugcuauuaauucgucucugccauuucagaacguucaccccgugaccaucggggaauguccuaaauauguaagauccgccaaguuaaggauggugacgggacugcggaauauuccaucaauccagagucgcggccucuucggcgcaaucgcuggguuuauugagggagguuggacuggcauggucgacgggugguacggauaucaucaccagaacgaacaaggcagcgguuacgccgcggaucagaaauccacacagaaugccauaaacgggaucaccaauaaggugaacucuguuauugagaaaaugaauacucaguucacagcagugggcaaggaguucaacaaacuugaacgaagaauggagaaucugaacaaaaaggucgacgauggauuuuuggacaucuggaccuacaacgcugaacuacuggugcuccuggagaaugaaaggacgcuugacuuccacgauagcaacguuaaaaaucuguaugagaagguaaaaucacaauugaagaacaaugccaaggaaauaggcaacgggugcuuugaguucuaccauaaauguaaugacgagugcauggaaagugugaagaacggaaccuaugauuaccccaaauauuccgaggaaagcaagcucaaucgggagaaaauugacggugucaagcuggagucuaugggcguguaccagaucuuagcuaucuauucaacagucgccaguagccuggugcuacucguuucccugggggcaauuucuuuuuggaugugcucgaacggaagccuucaguguacuaucugcauuuga

SEQ ID NO: 130520 - RNA, 1698 nt, Artificial Sequence
  derived and/or modified CDS sequence (opt3) from hemagglutinin__InfluenzaA__ACI32736
augaaggugaaacugcucguccuucugugcaccuucacagccacuuacgcugacacgaucuguauuggcuaucacgcaaacaauagcaccgauacaguugacacuguguuggagaagaacguaaccgugacacauuccgucaauuuacuggaagauucucacaacgggaaacuaugccuccugaagggaauagcgccccuucagcuggguaauuguucaguggccggcuggaucuuggggaacccugagugcgaacuccugauuaguagagagagcugguccuacaucguugaaaaaccaaauccggagaacggaaccuguuaucccggccauuuugcugacuacgaggaacugagggagcaacucucuucggugagcucauucgaacgguuugagauuuucccuaaggagaguuccuggccaaaucacacugccacaggugucucugcaagcugcucccauaacgggaagucaaguuuuuauaaaaauuuacuguggcuuaccggaaagaacggcuuguaccccaaucugagcaaaucuuaugccaacaauaaggaaaaagaggugcuaguacucuggggcguucaccacccuccaaacaucggggaucagcgcgcucuguaccauacggaaaacgcauacguguccgucgugucaagccacuauagucgaaaguucacucccgagauagccaagcguccuaaagugagagaccaggaaggaaggaucaauuacuauuggacccuucuggagccaggugauacaauuaucuuugaggcuaacggcaauuugauugccccgcgguacgcguucgcacucucucgcggguuuggauccggcaucauaaacagcaaugcccccauggacgaaugugaugcuaagugccagacuccucaaggugccauuaacucgucucugccauuccagaauguccaucccguuaccaucggggaguguccuaaauaugugagauccgcaaaguuaaggaugguaacaggacugcggaacauuccaucaauccagagucgcggccucuuuggcgcuaucgccggguucauugaaggagguuggaccggcaugguggacgggugguacggauaucaccaccagaaugagcaaggcagcgguuacgcggccgaucagaaauccacgcagaacgcaauaaaugggaucacuaacaaggucaauucugugauugaaaagaugaacacacaguuuaccgcuguuggcaaggaguucaauaaacuugagcgaagaauggaaaaccugaacaaaaagguggacgauggauucaucgacauauggacuuacaaugccgaguugcuaguccugcucgaaaacgagaggacacuggacuuucaugauagcaaugugcggaaccuuuaugaaaaaguaaagucacaacugaaaaauaacgcuaaggagauuggcaaugggugcuucgaguuuuaccacaaguguaacgacgaaugcauggagaguguuaaaaauggaaccuaugauuaccccaaguauuccgaagagagcaaauugaaccgugagaagaucgacggugugaaacucgaaucuaugggcgucuaccagauccuggccauuuauucaacgguggcaaguagcuuaguccugcuagugucccucggggccaucucuuucuggaugugcucgaauggaagccugcagugucgcauuugcauauga

SEQ ID NO: 130521 - RNA, 1698 nt, Artificial Sequence
  derived and/or modified CDS sequence (opt3) from hemagglutinin__InfluenzaA__ACI32737
augaaggugaaacugcucguccuucugugcaccuucacagccacuuacgcugacacgaucuguauuggcuaucacgcaaacaauagcaccgauacaguugacacuguguuggagaagaacguaaccgugacacauuccgucaauuuacuggaaaacucucacaaugggaaacuaugccuccugaagggaauagcgccccuucagcuggguaacuguucaguggccggcuggaucuuggggaauccugagugcgaacuccugauuccaaaagagaguuggagcuacaucguugaaauuccgaaccccgagaauggaaccuguuauccuggcuacuuugcugauuaugaggaacugagagagcaacucuccucugugucgucauucgaaagguuugagaucuucccaaaggagagcaguuggcccaaccauacugucacagguguguccgccucuugcagccacaaugggaaguccucauuuuaccggaacuuacuguggcuuaccggcaaaaauggauuguauccuaaccugaguaagagcuacgcaaauaacaaagaaaaggaggugcuaguucucuggggcgugcaucacccacccaacauaggggaccagcgcgcccuguaccacacggaaaaugcuuaugucucugugguguccucacauuacagccgacguuucacuccugagaucgcaaaaagaccaaaggucagggaucaggaaggacggauuaacuauuacuggacccuucuggagccgggugacacaaucauuuuugaggccaauggcaacuugaucgcuccccgcuucgccuuugcgcucaguagagggcugggaucuggcauaauuacuuccaaugcaccuauggaugaaugugacgccaagugccagaccccacaaggugcuaucaacagcucguuacccuuccagaauguucacccugugacaauuggggaguguccaaaauauguaaggucugccaagcugcggauggugaccggacuccgcaacauccccuccauccagucacgaggccuuuuuggcgcaauugcuggguucauagaaggagguuggacgggcauggucgaugggugguacggauaucaucaccagaaugagcaaggcagugguuacgccgcggaccagaaaagcacucagaacgccaucaaugggauuacaaacaagguaaauuccguuaucgaaaagaugaacacccaguuuacugcagugggcaaagaguucaauaaacuggagagaaggauggaaaacuugaacaagaaggucgaugacggauuccuagauauauggacauacaaugcugagcugcucgugcugcuugaaaacgagcggacccuggacuuucacgacucuaauguuaaaaacuuguaugaaaagguaaaaagccaacuccguaauaacgccaaggagauuggcaaugggugcuucgaguuuuaccauaaauguaacgaugaaugcauggagucagugaagaauggaacguaugacuacccgaaguauagugaagaguccaaacugaaccgcgagaagaucgauggugucaaauuagaaagcaugggcguguaccagauccuggcuauuuauucuaccgucgccucaagucuagugcuccugguuagccuuggggcaaucuccuucuggaugugcucuaauggaucguugcaguguagaauuugcauauga

SEQ ID NO: 130522 - RNA, 1698 nt, Artificial Sequence
  derived and/or modified CDS sequence (opt3) from hemagglutinin__InfluenzaA__ACI32739
augaaggugaaacugcucauccuucugugcaccuucacagccacuuacgcugacacgauuuguauaggcuaucacgcaaacaauagcaccgauacagucgacacuguuuuggagaagaacgugaccguaacacauuccgugaauuuacuggaagauucucacaacgggaaacuaugccuccugaagggaaucgcgccccuucagcuggguaauuguucagucgccggcuggauuuuggggaacccugagugcgaacuccugaucaguaaagagagcugguccuacauuguggaaaccccaaauccggagaacggaacuuguuaucccggcuacuuugcugacuaugaggaacugagagagcaacucucuucgguuucaucuuucgaaagguuugagaucuucccuaaggagaguuccuggccaaaucauacagugaccggugucucugccagcugcucccacaacgggaagucaaguuuuuaccggaauuuacuguggcuuacgggcaaaaacggauuguaucccaaucugagcaagucuuacgcaaacaauaaagaaaaggaggugcuaauacucuggggcguacaucacccuccaaacaucgggaaccagcgcacucuguaccacaccgaaaaugccuauguuuccguggucucaagccauuacagucgacguuucacacccgagauuacuaaaagaccuaaggugagggaucaggaaggacggaucaacuauuacuggacccuucuggagccaggugacacaauuaucuuugaggcuaauggcaacuugauagcaccgugguaugccuucgcucucucucgcggguuuggauccggcauuaucaccagcaaugcccccauggaugaaugugacgcgaagugccagacgccucaaggugcaauuaacucgucucugccauuccagaaugugcaccccgucacuaucggggaguguccuaaauacguuagauccgccaaguuaaggauggugacaggacugcggaacaucccaucaauucagagucgcggccucuuuggcgcuauagccggguucaucgaaggagguuggaccggcaugguagaugggugguauggauaccaucaccagaaugagcaaggcagcgguuacgcagcugaccagaaauccacucagaacgccauuaaugggaucacaaacaaggugaauagcgucauagaaaagaugaacacccaguuuacggcggugggcaaagaguucaauaaacuugagcgaagaauggaaaaccugaacaagaagguugaugacggauucuuggauauuuggaccuauaaugccgagcuacuggugcuccuggaaaacgagaggacacuugacuuucacgacagcaaugucaaaaaccuguacgaaaaggugaaaucacaauugaagaauaacgcaaaagagaucggcaaugggugcuucgaguuuuaucauaaguguaacaaugaaugcauggagaguguaaagaacggaacuuacgauuaucccaaauacuccgaagagagcaagcucaaucgggagaaaaucgacgguguuaagcuggaaucuaugggcguguaucagauuuuagcuaucuacucaaccgucgccaguagccuggugcuacucgucucccugggggcuauuucuuucuggaugugcucgaacggaagccuucaguguaaaauaugcaucuga

SEQ ID NO: 130523 - RNA, 1698 nt, Artificial Sequence
  derived and/or modified CDS sequence (opt3) from hemagglutinin__InfluenzaA__ACI32740
augaaggugaaacugcucauccuucugugcaccuucacagccacuuacgcugacacgauuuguauaggcuaucacgcaaacaauagcaccgauacagucgacacuguuuuggagaagaacgugaccguaacacauuccgugaauuuacuggaagauucucacaacgggaaacuaugccuccugaagggaaucgcgccccuucagcuggguaauuguucagucgccggcuggauuuuggggaacccugagugcgaacuccugaucaguaaagagagcugguccuacauuguggaaaccccaaauccggagaacggagcuuguuaucccggcuacuuugccgacuaugaggaacugagagagcaacucucuucgguuucaucuuucgaaagguuugagaucuucccuaaggagaguuccuggccaaagcauacugugacaggugucucugcaagcugcucccacaaugggaaaucaaguuuuuaccggaacuuacuguggcuuaccggaaagaauggcuuguaucccaaccugagcaaaucuuacgccaauaacaaggaaaaagaggugcuaauacucuggggcguacaucacccuccaaauaucggggaucagcgcacgcuguaccacacugaaaacgcuuauguuuccguggucucaagccauuacagucgacguuucacccccgagauuacaaagagaccuaaggugagggaccaggaaggacggaucaacuauuacuggacucuucuggagccaggugauaccauuaucuuugaggcaaauggcaacuugauagccccgugguaugcuuucgcccucucucgcggguuuggauccggcauuaucacaagcaaugcgcccauggacgaaugugaugcaaaaugccagaccccucaaggugccauuaacucgucucugccauuccagaaugugcaccccgucacgaucggggaguguccuaaguacguuagauccgcuaaauuaaggauggugacuggacugcggaacaucccaucaauucagagucgcggccucuuuggcgccauagcaggguucaucgaaggagguuggacaggcaugguagacgggugguauggauaccaucaccagaaugagcaaggcagcgguuacgcugccgaucagaaguccacccagaacgcgauuaaugggaucacuaacaaagugaauagcgucauagaaaagaugaacacacaguuuaccgccgugggcaaagaguucaauaaacuugagcgaagaauggaaaaccugaauaagaaaguugacgauggauucuuggacauuuggacguauaacgcagagcuacuggugcuccuggaaaacgagaggacccuugacuuucacgauagcaaugucaagaaccuguacgaaaaagugaagucacaauugaaaaauaacgcuaaggagaucggcaaugggugcuucgaguuuuaucauaaguguaacaaugaaugcauggagaguguaaagaacggaacauacgacuaucccaaguacuccgaagagagcaaacucaaucgggagaagaucgaugguguuaaacuggacucuaugggcguguaucagauuuuagccaucuacucaacugucgcuaguagccuggugcuacucgucucccugggggccauuucuuucuggaugugcccgaacggaucgcuucaguguaccauaugcaucuga

SEQ ID NO: 130524 - RNA, 1698 nt, Artificial Sequence
  derived and/or modified CDS sequence (opt3) from hemagglutinin__InfluenzaA__ACI32741
augaaggugaaacugcucauccuucugugcaccuucacagccacuuacgcugacacgauuuguauaggcuaucacgcaaacaauagcaccgauacagucgacacuguuuuggagaagaacgugaccguaacacauuccgugaauuuacuggaagauucucacaacgggaaacuaugccuccugaagggaaucgcgccccuucagcuggguaauuguucagucgccggcuggauuuuggggaacccugagugcgaacuccugaucaguaaagagagcugguccuacauuguggaaaccccaaauccggagaacggagcuuguuaucccggcuacuuugccgacuaugaggaacugagagagcaacucucuucgguuucaucuuucgaaagguuugagaucuucccuaaggagaguuccuggccaaagcauacugugacaggugucucugcaagcugcucccacaaugggaaaucaaguuuuuaccggaacuuacuguggcuuaccggaaagaauggcuuguaucccaaccugagcaaaucuuacgccaauaacaaggaaaaagaggugcuaauacucuggggcguacaucacccuccaaauaucggggaucagcgcacgcuguaccacacugaaaacgcuuauguuuccguggucucaagccauuacagucgacguuucacccccgagauuacaaagagaccuaaggugagggaccaggaaggacggaucaacuauuacuggacucuucuggagccaggugauaccauuaucuuugaggcaaauggcaacuugauagccccgugguaugcuuucgcccucucucgcggguuuggauccggcauuaucacaagcaaugcgcccauggacgaaugugaugcaaaaugccagaccccucaaggugccauuaacucgucucugccauuccagaaugugcaccccgucacgaucggggaguguccuaaguacguuagauccgcuaaauuaaggauggugacuggacugcggaacaucccaucaauucagagucgcggccucuuuggcgccauagcaggguucaucgaaggagguuggacaggcaugguagacgggugguauggauaccaucaccagaaugagcaaggcagcgguuacgcugccgaucagaaguccacccagaacgcgauuaaugggaucacuaacaaagugaauagcgucauagaaaagaugaacacacaguuuaccgccgugggcaaagaguucaauaaacuugagcgaagaauggaaaaccugaauaagaaaguugacgauggauucuuggacauuuggacguauaacgcagagcuacuggugcuccuggaaaacgagaggacccuugacuuucacgauagcaaugucaagaaccuguacgaaaaagugaagucacaauugaaaaauaacgcuaaggagaucggcaaugggugcuucgaguuuuaucauaaguguaacaaugaaugcauggagaguguaaagaacggaacauacgacuaucccaaguacuccgaagagagcaaacucaaucgggagaagaucgaugguguuaaacuggacucuaugggcguguaucagauuuuagccaucuacucaacugucgcuaguagccuggugcuacucgucucccugggggccauuucuuucuggaugugcccgaacggaucgcuucaguguaagauaugcaucuga

SEQ ID NO: 130525 - RNA, 1698 nt, Artificial Sequence
  derived and/or modified CDS sequence (opt3) from hemagglutinin__InfluenzaA__ACI32742
augaaggugaaacugcucauccuucugugcaccuucacagccacuuacgcugacacgauuuguauaggcuaucacgcaaacaauagcaccgauacagucgacacuguuuuggagaagaacgugaccguaacacauuccgugaauuuacuggaagauucucacaacgggaaacuaugccuccugaagggaaucgcgccccuucagcuggguaauuguucagucgccggcuggauuuuggggaacccugagugcgaacuccugaucaguaaagagagcugguccuacauuguggaaaccccaaauccggagaacggaacuuguuaucccggcuacuuugcugacuaugaggaacugagagagcaacucucuucgguuagcucauucgaaagguuugagaucuucccuaaggagaguuccuggccaaaucauacagugaccggugucucugccagcugcucccacaacgggaagucaaguuuuuaccggaauuuacuguggcuuacgggcaaaaacggauuguaucccaaucugagcaagucuuacgcaaacaauaaagaaaaggaggugcuaauacucuggggcguacaucacccuccaaacaucggggaucagcgcacucuguaccacaccgaaaacgccuauguuuccguggucucaagccauuacagucgacguuucacacccgagauuacuaaaagaccuaaggugagggaccaggaaggacggaucaauuauuacuggacccuucuggagccaggugauacaauuaucuuugaggcuaacggcaauuugauagcaccgugguaugccuucgcucucucucgcggguuuggauccggcauuaucaccagcaacgcccccauggacgaaugugaugcgaagugccagacgccucaaggugcaauuaauucgucucugccauuccagaacgugcaccccgucacuaucggggaguguccuaaauacguuagauccgccaaguuaaggauggugacaggacugcggaauaucccaucaauucagagucgcggccucuuuggcgcuauagccggguucaucgaaggagguuggaccggcaugguagacgggugguauggauaccaucaccagaacgagcaaggcagcgguuacgcagcugaucagaaauccacucagaaugccauuaacgggaucacaaauaaggugaacucugucauagaaaagaugaauacccaguuuacggcggugggcaaagaguucaacaaacuugagcgaagaauggaaaaucugaacaagaagguugacgauggauucuuggacauuuggaccuauaacgccgagcuacuggugcuccuggaaaaugagaggacacuugacuuucacgauagcaacgucaaaaaucuguacgaaaaggugaaaucacaauugaagaacaaugcaaaagagaucggcaacgggugcuucgaguuuuaucauaaguguaauaacgaaugcauggagaguguaaagaauggaacuuacgacuaucccaaauacuccgaagagagcaagcucaaccgggagaaaaucgaugguguuaagcuggacucuaugggcguguaucagauuuuagcuaucuacucaaccgucgccaguagccuggugcuacucgucucccugggggcuauuucuuucuggaugugcucgaauggaagccuucaguguaaaauaugcaucuga

SEQ ID NO: 130526 - RNA, 1698 nt, Artificial Sequence
  derived and/or modified CDS sequence (opt3) from hemagglutinin__InfluenzaA__ACI32743
augaaggugaaacugcucauccuucugugcaccuucacagccacuuacgcugacacgauuuguauaggcuaucacgcaaacaauagcaccgauacagucgacacuguuuuggagaagaacgugaccguaacacauuccgugaauuuacuggaagauucucacaacgggaaacuaugccuccugaagggaaucgcgccccuucagcuggguaauuguucagucgccggcuggauuuuggggaacccugagugcgaacuccugaucaguaaagagagcugguccuacauuguggaaaccccaaauccggagaacggagcuuguuaucccggcuacuuugccgacuaugaggaacugagagagcaacucucuucgguuucaucuuucgaaagguuugagaucuucccuaagaagaguuccuggccaaaucauacugugacaggugucucugcaagcugcucccacaacgggaaaucaaguuuuuaccggaauuuacuguggcuuaccggaaagaacggcuuguaucccaaucugagcaaaucuuacgccaacaauaaggagaaagaagugcuaauacucuggggcguacaucacccuccaaacaucgggaaccagcgcacgcuguaccacacugagaaugcuuauguuuccguggucucaagccauuacagucgacguuucacccccgaaauuacaaagagaccuaaggugagggaucaggagggacggaucaacuauuacuggacucuucuggaaccaggugacaccauuaucuuugaggcaaauggcaacuugauagccccgugguaugcuuucgcccucucucgcggguuuggauccggcauuaucacaagcaaugcgcccauggaugagugugacgcaaaaugccagaccccucaaggugccauuaacucgucucugccauuccagaaugugcaccccgucacgaucggggaauguccuaaguacguuagauccgcuaaauuaaggauggugacuggacugcggaacaucccaucaauucagagucgcggccucuuuggcgccauagcaggguucaucgagggagguuggacaggcaugguagaugggugguauggauaccaucaccagaaugaacaaggcagcgguuacgcugccgaccagaaguccacccagaacgcgauuaaugggaucacuaacaaagugaauagcgucauagagaagaugaacacacaguuuaccgccgugggcaaagaguucaauaaacuugaacgaagaauggagaaccugaacaagaaaguugaugacggauucuuggauauuuggacguauaaugcagaacuacuggugcuccuggagaacgaaaggacccuugacuuucacgacagcaaugucaagaaccuguacgagaaagugaagucacaauugaaaaauaacgcuaaggaaaucggcaaugggugcuucgaguuuuaucauaaguguaacaaugagugcauggaaaguguaaagaacggaacauacgauuaucccaaguacuccgaggaaagcaaacucaaucgggagaagaucgacgguguuaaacuggauucuaugggcguguaucagauuuuagccaucuacucaacugucgcuaguagccuggugcuacucgucucccugggggccauuucuuucuggaugugcucgaacggaagccuucagugucguauaugcaucuga

SEQ ID NO: 130527 - RNA, 1701 nt, Artificial Sequence
  derived and/or modified CDS sequence (opt3) from hemagglutinin__InfluenzaA__ACJ09818
augaagaccaucauugcccugagcuacauacucugccuuguguucgcucagaaacugcccggcaacgacaauuccacagcaacuuuguguuuagggcaccaugccgucccuaacggaacgaucguuaagaccauuacaaaugaucaaguggagguaacuaacgcgaccgaacuggugcagucuucaaguacaggugagaucugcgacagcccacaccagauucuagauggcgaaaauuguacccucaucgacgcucugcuuggggauccgcagugcgacggauuucaaaacaaaaagugggaucuguucgucgagagauccaaagccuauucuaauuguuaccccuaugacgugccugauuacgcaucguugaggucacucguugccagcaguggcacucuggaauuuaacaaugaguccuucaacuggacaggugugacccagaaugggacgucuagcgcuugcauacggcgcuccaacaauucauuuuucagucgacugaacuggcucacucauuuaaaguuuaaguauccagcacugaaugucaccaugcccaacaacgagaaauucgacaaguuguacaucuggggagugcaccauccuggcacagauaaugaccagauuuuucuuuaugcccaggcuagcggccguaucacuguaucuaccaaaagaucccaacagacaguuauuccaaacaucgggucaaggccccgggugcgcaauauaccuagcagaauuaguaucuacuggaccauugucaagccaggagauauccugcuaaucaacucuacggguaaucucauugccccgaggggcuacuucaaaauacgguccggaaagagcucgaucaugcgcucugacgcgcccauugggaaguguaacuccgaaugcaucacuccuaauggcucaauaccaaacgacaaacccuuucagaaugugaaccgaauuacauauggugcauguccuagauacgugaagcagaauacccugaaacuugccacugggaugaggaacgucccagagaagcaaacacggggaaucuucggcgcuaucgccggcuuuauugaaaaugggugggagggaaugguugaugguugguauggcuuccgucaccagaacagugaggggaucggacaggcagcugaccugaaaagcacccaagccgcgauugaucagauaaauggcaaguugaaccgccucaucgguaaaacgaacgaaaaguuccaccagauugagaaggaauuuuccgagguggaagggagaauccaggaccuggagaaauacguagaggauaccaagaucgacuuauggucuuauaaugccgaacugcucguggcacuugagaaccaacauacaauugaucugacugacagcgaaaugaauaaauuguucgagaagaccaaaaagcagcuaagggaaaacgcugaggauaugggcaauggaugcuuuaagauauaccacaaaugugacaacgccugcaucggcucaauucggaaugggacauaugaucaugacgucuaccgagacgaggcucugaacaaucgcuuccagaucaagggaguggaacucaaaagugguuacaaggauuggauucuguggaucuccuuugccaugagcugcuuccuucuguguguugcauugcucggcuuuauaaugugggccugccagaaagggaacaucagauguaauauuugcaucuga

SEQ ID NO: 130528 - RNA, 1683 nt, Artificial Sequence
  derived and/or modified CDS sequence (opt3) from hemagglutinin__InfluenzaA__ACJ67533
auggagaccaucagccugauuacaauacuccuuguggucacugccuccaacgcugacaagaucugcauuggccaccagucuaccaauucaaccgaaacaguugauacucugaccgagacaaacgugcccguaacccaugcaaaagaauuguuacacacugagcauaaugggaugcugugugccacaagucuaggacacccucucauccuggacacgugcacgauugaaggucuuguguacggcaacccaagcugugaucuguugcucgaggggagagagugguccuauaucgucgaaaggucuucggcggugaauggaacuugcuacccgggcaacguugagaaucuggaggaacugcggacccucuucucaagcgcuaguuccuaucaacgcauacagaucuuucccgacacaacuuggaacgugaccuacacagguaccucucgagccuguagcggguccuucuaucguucaaugagaugguuaacgcagaagaguggauuuuacccuguccaggaugcacaauauacuaauaacaggggcaaaagcauucuguucguguggggcauccaucacccacccacauacgccgagcagaccaaucuuuacauucggaacgacacuacaaccucuguaacgaccgaagauuugaaucgcacauuuaagccuguuaucgggccaagaccccuggugaacggacuacaggguaggauagacuauuacugguccguccucaaaccuggccagacucugcgggugcgcucaaaugggaaccuuauugcuccaugguauggacacgugcugagcggcgguagucaugggcgaaucuugaagaccgaucucaagucuggauccugcgucguucaaugucagacagagaaaggcggccugaacagcacuuuaccguuccacaauauuucgaaguacgcauuugggaccugccccaaauaugugagaguaaacucucugaagcucgccgugggacuuaggaaugucccugcucgguccucacguggucuguucggcgccaucgcgggguuuaucgaaggaggcuggccagguuugguggcagggugguacggcuuccagcauaguaacgaccagggaguuggcauggccgcugaucgcgacagcacacaaaaagccauugauaagauaaccuccaaggugaauaacaucgucgacaaaaugaauaagcaguaugagauuaucgaccacgaauuuucugagguggagacuagacuaaacaugauaaauaacaaaauugaugaccagauccaagauguaugggcauacaaugcugaacugcucguucugcuugagaaccagaagacgcuggacgaacacgaugccaaugugaacaauuuguacaacaaagucaagagggcgcucgggagcaacgccauggaggacggaaaagguuguuucgaacuguaucauaagugcgaugaccaguguauggagacaauccggaauggcaccuacaaccgacgcaaguauagagaggaaucaagguuagagcggcagaaaauugaaggggugaagcuggagagugaacgcacuuacaaaauccuaaccauuuauuccacagucgcaagcucucucgugcuggcuaugggauuugccgcuuuccuuuucugggccaugucaaauggcaguugcagaugcaacauauguaucuga

SEQ ID NO: 130529 - RNA, 1704 nt, Artificial Sequence
  derived and/or modified CDS sequence (opt3) from hemagglutinin__InfluenzaA__ACJ68607
auggagaagaucgugcugcuccuugccauugucagccugguuaaauccgaccagauaugcaucggcuaccacgcuaacaauucuaccgaacaaguggauacaauuauggagaagaacguaacugugacgcaugcacaggacaucuuggaaaagacccacaaugggaaguuaugugaucuggacggagucaaaccccuaauucucggugauugcucaguggccggcuggcugcuugggaacccuaugugugacgaguucaucaauguuccagaauggaguuauauaguggagaaggcgaacccggcuaaugaucugugcuaccccggaaacuuuaaugacuaugaggaauugaagcaucuccugagcagaaucaaccacuucgagaaaauucagaucauuccuaaguccucuuggucggaucaugaagccucaagcggcgucaguuccgcauguccauaccaggguacacccucuuucuucaggaaugugguauggcugaucaaaaagaacaauacuuauccuaccauaaaacggagcuacaacaauacaaaccaagaggaccucuuaauucugugggggauccaccacuccaacgaugccgcugagcagaccaaacuuuaucagaauccaacuacauacauuucaguuggaaccaguacguugaaccagcgccuggugcccaagaucgcaacucgaagcaaagucaauggccaaucuggccguauggacuuuuucuggaccauccuaaagccuaacgaugccauuaauuuugaauccaacgggaauuucauagcuccagaguacgccuauaaaaucgugaagaaaggagacucagcgauuaugaaaagcgaaguggaguacgguaacugcaauacaaagugucagacuccgaucggcgcaauaaacaguucuaugcccuuucauaauauucacccucucaccaucggggaaugcccaaaguaugucaaguccaacaaacugguucuugccacaggacugagaaauagccccuugagggagcggcgcagaaagaggggccucuucggugcuaucgccggguuuauugagggaggcuggcagggcaugguggacgggugguacggauaucaucacucgaacgaacaggguucuggcuacgcagcugauaaagaguccacccaaaaggccaucgacgggguaacgaauaaagugaacucaauuauagauaagaugaacacucaguucgaagcggucggacgggaguuuaauaaccuggaacgccgaaucgagaauuuaaacaagaaaauggaggacggcuuccuggauguguggacauauaaugccgaacuccuuguucugauggagaacgaaagaaccuuggacuuccacgauaguaaugugaagaaccuauacgacaaagucaggcugcagcuccgggauaaugcaaaggagcuggguaacggguguuuugaauuuuaccauaaaugcgacaaugaguguauggagagcgugcguaacggcacuuaugauuacccucaauauuccgaagaggcucgccuuaagagagaagagauuucuggaguaaagcuggagagcaucggcacauaccagaucuugucaauuuauaguaccguugccuccagccucgcucuggccauaaugguggcaggguuaucucuguggaugugcucaaauggaagucuacagugcaggaucuguauuuga

SEQ ID NO: 130530 - RNA, 1704 nt, Artificial Sequence
  derived and/or modified CDS sequence (opt3) from hemagglutinin__InfluenzaA__ACJ68609
auggagaagaucgugcugcuccuugccauugucagccugguuaaauccgaccagauaugcaucggcuaccacgcuaacaauucuaccgaacaaguggauacaauuauggagaagaacguaacugugacgcaugcacaggacaucuuggaaaagacccacaaugggaaguuaugugaucuggacggagucaaaccccuaauucucagagauugcucaguggccgguuggcugcuuggcaacccuaugugugacgaguucaucaauguuccagaauggaguuauauaguggagaaggcgaacccggcuaaugaucugugcuaccccgggaacuuuaaugacuaugaggaauugaagcaucuccugagcaggaucaaccacuucgagaaaauucagaucauuccuaaguccucuuggucggaucaugaagccucaagcggagucaguuccgcauguccauaccagggcacacccagcuuuuuccggaaugugguauggcugaucaaaaagaacaauacuuauccuaccauaaaacgcagcuacaacaauacaaaccaagaggaccucuuaauucugugggguauccaccacuccaacgaugccgcugagcagaccaaacuuuaucagaauccaacuacauacauuucaguugggaccaguacguugaaccagcgacuggugcccaagaucgcaacucguagcaaagucaauggacaaucuggcagaauggacuuuuucuggaccauccuaaagccuaacgaugccauuaauuuugaauccaacggcaauuucauagcuccagaguacgccuauaaaaucgugaagaaaggggacucagcgauuaugaagucugaaguggaguacggaaacugcaauacaaaaugucagacuccgaucggugcaauaaacaguucuaugcccuuucauaauauucacccucucaccaucggcgaaugcccaaaguaugucaaguccaacaaacugguucuugccacagggcugaggaauagccccuugcgggagcgcagaaggaagcggggacucuucggcgcuaucgccgguuuuauugaagggggauggcagggcaugguggacggcugguacggguaucaucacucgaacgaacagggaucugguuacgcagcugauaaagaguccacccaaaaggccaucgacggcguaacgaauaaagugaacucaauuauagauaagaugaacacucaguucgaagcggucgggcgcgaguuuaauaaccuggaacgaagaaucgagaauuuaaacaagaaaauggaggacggauuccuggauguguggacauauaaugccgaacuccuuguucugauggagaacgaaaggaccuuggacuuccacgauaguaaugugaagaaccuauacgacaaaguccggcugcagcuccgugauaaugcaaaggagcugggcaacgguuguuuugaguucuaccauaaaugcgacaaugaguguauggagagcgugcgcaacgggacuuaugauuacccucaauauuccgaagaggcuagacuuaggcgggaagagauuucuggcguaaagcuggagagcaucggaacauaccagaucuugucaauuuauaguaccguugccuccagccucgcucuggccauaaugguggcaggcuuaucucuguggaugugcucaaaugggagucuacagugccgaaucuguauuuga

SEQ ID NO: 130531 - RNA, 1704 nt, Artificial Sequence
  derived and/or modified CDS sequence (opt3) from hemagglutinin__InfluenzaA__ACJ68610
auggagaagaucgugcuguuccucgccauugucagccuuguuaaguccgaccagauaugcaucggcuaccacgcuaacaauucuaccgaacaaguggauacaauuauggagaagaacguaacugugacgcaugcacaggacauccuggagaaaacccacaaugggaaguugugugauuuagacggagucaaaccccugauucuaagagauugcucaguggccgguuggcuccugggcaacccuaugugugacgaguuuaucaauguuccagaauggaguuauauaguggagaaggcgaacccggcuaaugaucuuugcuaccccgggaacuucaaugacuaugaggaacugaagcauuugcucagcaggaucaaccacuuugagaaaauucagaucauuccuaaguccucuuggucggaucaugaagccucaagcggagucaguuccgcauguccauaccagggcacacccucuuucuuucggaaugugguauggcugaucaaaaagaacaauacuuauccuaccauaaaacgcagcuacaacaauacaaaccaagaggaccugcucauuuuaugggguauccaccacuccaacgaugccgcugagcagaccaagcuguaucagaauccaacuacauacauuucaguugggaccaguacgcuuaaccagcgauuggugcccaagaucgcaacucguagcaaagucaauggacaaucuggcagaauggacuucuuuuggaccauccugaagccuaacgaugccauuaauuucgaauccaacggcaauuuuauagcuccagaguacgccuauaaaaucgugaagaaaggggacucagcgauuaucaagagcgaaguggaguacggaaacugcaauacaaaaugucagacuccgauaggugcaauuaacaguucuaugcccuuccauaauauccacccucuaaccaucggcgaaugcccaaaguaugucaaguccaacaaacucguucuggccacagggcuuaggaauagcccccugcgggagcgcagaaggaagcggggauuguuuggcgcuauugccgguuucaucgaagggggauggcagggcaugguggacggcugguacggguaucaucacucgaacgaacagggaucugguuacgcagcugauaaagaguccacccaaaaggccauugacggcguaacgaauaaagugaacucaauaaucgauaagaugaacacucaguuugaagcggucgggcgcgaguucaauaaccucgaacgaagaauugagaaucugaacaagaaaauggaggacggauucuuagauguguggacauauaaugccgaacugcucguucuuauggagaacgaaaggacccuggacuuucacgauaguaaugugaagaacuuguacgacaaaguccggcuacagcugcgugauaaugcaaaggagcucggcaacgguuguuucgaauuuuaccauaaaugcgacaaugaguguauggagagcgugcgcaacgggacuuaugauuacccucaauauuccgaagaggcuagacugaagagggaagagaucucuggcguaaaacuugagagcaucggaacauaccagauucugucaauauauaguaccguugccuccagcuuggcucucgccaucaugguggcaggccugucuuuauggaugugcucaaaugggagucugcagugccggauuuguaucuga

SEQ ID NO: 130532 - RNA, 1704 nt, Artificial Sequence
  derived and/or modified CDS sequence (opt3) from hemagglutinin__InfluenzaA__ACJ68611
auggagaagaucgugcugcuccuugccauugucagccugguuaaauccgaccagauaugcaucggcuaccacgcuaacaauucuaccgaacaaguggauacaauuauggagaagaacguaacugugacgcaugcacaggacaucuuggaaaagacccacaaugggaaauuaugugaucuggacggagucaaaccccuaauucucagagauugcucaguggccgguuggcugcuuggcaacccuaugugugacgaguucaucaauguuccagaauggaguuauauaguggagaaggcgaacccggcuaaugaucugugcuaccccgggaacuuuaaugacuaugaggaauugaagcaucuccugagcaggaucaaccacuucgagaaaauucagaucauuccuaaguccucuuggucggaucaugaagccucacugggagucagcagugcauguccauaccagggcaugcccuccuuuuuccggaaugugguauggcucaucaaaaagaacaauacauauccuacuauaaaacgcucuuacaacaauaccaaccaagaggacuuacugauucuuugggguauccaccacagcaacgaugccgcugagcagacaaaguuguaucagaauccaaccacuuacauuuccguugggacaucaacccugaaccagcgucuagugcccaagaucgcaacgcgaaguaaagucaauggacaaagcggcagaauggacuuuuucuggacuauccucaagccuaacgaugccauuaauuuugaaucuaacggcaauuucauagcuccagaguacgccuauaaaaucgugaagaaaggggacuccgcgauuaugaagucagaagugggauacgguaacugcaauaccaaaugucagacaccgaucggcgcaauaaacagcaguaugcccuuucauaauauucacccucugacuaucggggagugcccaaaguaugucaagucuaacaaacuuguucuggccaccggauugaggaauagcccccuccgggaacgcagaaggaagcggggccuguucggugcuaucgccggguuuauugagggaggcuggcagggcaugguggacgggugguacggauaucaucacuccaacgagcaggguucgggcuacgcagcugauaaagaaucuacacaaaaggccaucgacgggguaaccaauaaagugaacuccauuauagauaagaugaacacgcaguucgaggcggucggacgcgaauuuaauaacuuagagcgaagaaucgaaaaucugaacaagaaaauggaggacggcuuccucgauguguggacuuauaaugccgagcuucugguuuugauggaaaacgagaggacacuagacuuccacgauucaaaugugaagaaccuguacgacaaaguccggcuccagcugcgugauaaugcaaaggaacuugguaacggguguuuugaguucuaccauaaaugcgacgaugaauguauggagagugugcgcaauggcaccuaugacuacccucaauauagcgaggaagcuagacugaagagggaggaaauuuccggaguaaaguuggagucuaucggcacuuaccagauccucagcauuuauucaacaguugccaguucccuggcuuuagccauaaugguggcagggcugagccuauggaugugcucuaacggaucacuccagugccggaucuguauuuga

SEQ ID NO: 130533 - RNA, 1704 nt, Artificial Sequence
  derived and/or modified CDS sequence (opt3) from hemagglutinin__InfluenzaA__ACJ68612
auggagaagaucgugcugcuccuugccauugucagccugguuaaauccgaccagauaugcaucggcuaccacgcuaacaauucuaccgaacaaguggauacaauuauggagaagaacguaacugugacgcaugcacaggacaucuuggagaaaacccacaaugggaaguuaugugaucuggacggagucaaaccccuaauucucagagauugcucaguggccgguuggcugcuuggcaacccuaugugugacgaguucaucaauguuccagaauggaguuauauaguggagaaggcgaacccggcuaaugaucugugcuaccccgggaacuuuaaugacuaugaggaauugaagcaucuccugagcaggaucaaccacuucgagaaaauucagaucauuccuaaguccucuuggccagaucaugaagccucgucaggagucagcagugcaugucccuaccagggcacaccuuccuuuuuccggaaugugguauggcugaucaaaaagaacaauacuuauccaaccauaaaacgcucuuacaacaauacaaaccaagaggaccucuuaauucugugggguauccaccacagcaacaaugccgcugagcagaccaagcuauaucagaaccccacuacauacauuuccguugggaccucaacguugaaucugcgacuugugccuaagaucgcaacucguaguaaagucaacggacagagcggcagaauggauuucuucuggaccauccucaagccaaaugacgccauuaacuuugaaucuaauggcaacuucauagcuccggaguacgccuauaaaaucgugaagaaaggggauuccgcgauuaugaagucagaaguggaguacggaaauugcaacacaaaaugucaaacucccaucggugcaauaaauagcaguaugccuuuucauaacauucacccacugaccaucggcgaaugccccaaguaugucaagucuaauaaacuuguucuggccacaggguugaggaacuccccucuccgggagcgcagaaggaagcggggacuguucggcgcuaucgccgguuuuauugaagggggauggcagggcaugguggacggcugguacggguaucaucacagcaaugaacagggaucggguuacgcagcugacaaagagucuacccagaaggccaucgauggcguaacgaacaaagugaacuccauuauagacaagaugaauacucaauucgaagcggucgggcgcgaguuuaacaauuuagaacgaagaaucgagaaccugaauaagaaaauggaggauggauuccucgacguguggacauauaacgccgaacuucugguuuugauggagaaugaaaggacccuagauuuccacgacucaaacgugaagaaucuguacgauaaaguccggcuccagcugcgugacaacgcaaaggagcuuggcaaugguuguuuugaauuuuaccauaaaugcgauaacgaguguauggagagugugcgcaaugggacuuaugacuacccacaguauagcgaagaggcuagacugaagagggaagagauuuccggcguaaaguuggagucuaucggagccuaccaaauccucagcauuuauucaacaguugcuaguucccuggccuuagcaauaaugguggccggccugagccuauggaugugcucuaacgggucacuccagugccggaucuguauuuga

SEQ ID NO: 130534 - RNA, 1704 nt, Artificial Sequence
  derived and/or modified CDS sequence (opt3) from hemagglutinin__InfluenzaA__ACJ68613
auggagaagaucgugcuguuccucgccauugucagccacguuaaauccgaccagauaugcaucggcuaccaugcuaacaauucuaccgaacaaguggauacaauuauggagaagaacguaacugugacgcacgcacaggacauccuugagaaaacccauaaugggaagcugugugauuugggaggugucaaacccuuaauucugagagacugcucaguggccggcuggcuacucgggaacccuaugugugaugaauuuaucaauguuccagaauggaguuauauaguggagaaggcgaacccggcuaaugaccugugcuaccccggaaacuucaaugauuaugaggaacuuaagcaccuguugagcaggaucaaccauuuugagaaaauucagaucauuccuaaguccucuuggucggaccacgaagccucaagcggcgucaguuccguguguccauaccaggguacacccucuuucuuucggaauguaguuuggcucaucaaaaagaacaauacuuauccuaccauuaaaaagagcuacaacaauacaaaccaagaggaucugcugauacucugggggauccaccauuccaacgacgcagccgagcagaccaaguuauaucagaauccaacuacauacauuucagugggaaccaguacgcugaaccagcgccuuguccccaaaaucgcuacucgaagcaaggugaauggccaaucuggccguauggauuucuuuuggaccaucuugaaaccuaacgacgcaauuaauuucgaauccaacgggaauuuuauagccccagaguacgcuuauaagaucgugaaaaagggagauucagccauuaugaaaagcgaagucgaguacgguaacugcaauacaaagugucagacuccgaucggcgcgauaaacaguucuaugcccuuccacaauauucauccucugaccaucggggaaugcccaaaguauguuaaauccaacaagcuagugcucgcaacaggacugagaaauagcccccuuagggagcggcgcagaaaaaggggccuguuuggugccaucgcuggguucauugagggaggcuggcagggcaugguagacgggugguacggauaucaccacucgaacgaacaggguucuggcuacgccgcagacaaggaguccacccaaaaagcuaucgauggggugacgaauaaggucaacucaauuauagacaagaugaacacucaguuugaagccgugggacgggaguucaauaacuuggaacgccgaaucgagaaucucaacaaaaagauggaggauggcuuccuggacguuuggacauauaaugcggaauuacuggugcucauggagaacgaaagaacccuugauuuucaugacaguaaugucaaaaaccuguacgauaaggugagguugcagcuacgggacaaugccaaagagcuggguaacggguguuucgaauuuuaccacaagugcgauaaugaguguauggagagcguacguaacggcacuuaugacuacccucaauauuccgaagaggcacgccucaagagagaagagauuucuggaguuaaacuggagagcaucggcacauaccagauccuuucaauuuauaguaccguggcuuccagccuggccuuggcuauaauggucgccgggcucucucuguggaugugcucaaauggaaguuuacagugcaggaucuguauuuga

SEQ ID NO: 130535 - RNA, 1707 nt, Artificial Sequence
  derived and/or modified CDS sequence (opt3) from hemagglutinin__InfluenzaA__ACJ68614
auggagaagaucgugcugcuccuugccauugucagccugguuaaauccgaccagauaugcaucggcuaccacgcuaacaauucuaccgaacaaguggauacaauuauggagaagaacguaacugugacgcaugcacaggacaucuuggaaaagacccacaaugggaaauuaugugaucuggacggagucaaaccccuaauucucagagauugcucaguggccgguuggcugcuuggcaacccuaugugugacgaguuccugaauguuccagaauggaguuauaucguggagaagauaaacccggucaaugauuugugcuaccccgggaacuuuaaugacuaugaggaacucaagcaucugcugagcaggaucaaccacuucgagaaaauucagaucauuccuaaguccucuuggucggaucaugaagcgucaagcggagugaguuccgcuuguccauaccagggccggucuagcuuuuuccgcaauguaguuuggcucaucaaaaagaacaauacauaucccacuauaaaacgauccuacaacaauaccaaccaagaggacuuacuggugcuuugggguauucaccacccuaacgaugccgcagagcagacacguuuguaucagaauccaaccacuuacaucucagucgggacaaguacccugaaccagaggcuagugcccaagcucgccacgagaagcaaggugaauggacaaucuggccggauggaauuuuucuggacuauucugaaaccuaacgacgcuaucaauuuugaguccaacggcaauuucaucgcaccagaaaacgccuacaagauugucaaaaagggggauucaaccauaaugaaaagcgagcuugaauauggaaauugcaacacaaagugucagacuccgaucggugcuauuaauaguucuaugcccuuucauaacauccacccucugaccauaggcgagugcccaaaauacguuaaguccaaucgcuuggugcucgccacagggcugagaaacagcccccagggagagaggcggcgcaagaaacgaggcuuauucggugcgauugcaggguuuaucgaaggaggcuggcagggcaugguagacgggugguauggauaccaucacucgaaugagagagguucuggcuaugccgcugacaaggaauccacccaaaaagccaucgauggggugacgaacaaggucaacucaauuaucgacaaaaugaauacucaguucgaggcagugggaagggaauuuaacaaucuggagcggcguauugagaaccucaauaagaagauggaagauggcuuccuugacguuuggacauacaacgcugagcuguuggugcuaauggaaaaugagcgcacccuggauuuccacgacaguaacgucaaaaaucucuaugauaaggugagacugcagcuuagggacaacgccaaagaacuggguaauggguguuuugaguucuaccaucggugcgauaacgaguguauggaaagcguacgaaauggcacuuacgacuauccucaauacuccgaggaagcgcgcuugaagagagaggagauaucuggaguuaaacucgaaagcaucggcacauaucagauucugucaaucuacaguaccguggccuccagcuuagcacuggcuaucauggucgccgggcuaucucucuggaugugcucaaacggaagucugcagugcaggauuuguauauga

SEQ ID NO: 130536 - RNA, 1698 nt, Artificial Sequence
  derived and/or modified CDS sequence (opt3) from hemagglutinin__InfluenzaA__ACK99007
augaaggugaaacugcucguccuucugugcaccuucacagccacuuacgcugacacgaucuguauuggcuaucacgcaaacaauagcaccgauacaguugacacuguguuggagaagaacguaaccgugacacauuccgucaauuuacuggaaaacucucacaaugggaaacuaugccuccugaagggaauagcgccccuucagcuggguaacuguucaguggccggcuggaucuuggggaauccugagugcgaacuccugauuaguaaagagagcugguccuacaucguugaaaagccaaacccggagaauggaaccuguuaucccggccauuuugcugauuacgaggaacugagagagcaacucucuucggugagcucauucgaaagguuugagauuuucccuaaggagaguuccuggccaaaccacacugucacaggugugucugccagcugcucccauaauggggaaucaaguuuuuaucggaacuuacuguggcuuaccggcaaaaauggauuguaccccaaccugagcaagucuuaugcaaauaacaaagagaaggaaguucuaguacucuggggcgugcaccacccuccaaacaucggggaccagaaagcccuguaccauacggagaaugcuuacgucuccguggugucaagccacuauagucgcaaguucacucccgaaauagcaaagcgaccuaaaguccgugaucaggagggaagaaucaacuacuauuggacccuucuggagccaggugacacaauuaucuuugaagccaauggcaacuugauugcuccgagguacgccuucgcgcucucucggggguuuggauccggcaucauaaauagcaacgcacccauggauaagugugacgccaaaugccagacuccucaaggugcuauuaauucgucucugccauuccagaacguucaucccgugaccaucggggaguguccuaaguauguacgcuccgccaaauuaagaauggugacaggacugaggaauauuccaucaauccagagucggggccucuuuggcgcaaucgcuggguucauugaaggagguuggaccggcauggucgaugggugguacggauaucaccaccagaacgagcaaggcagcgguuacgccgcggaccagaaguccacgcagaaugccauaaacgggaucacuaauaaagugaacucuguuauugaaaagaugaauacacaguuuaccgcagugggcaaggaguucaacaaacuugagcgccgaauggaaaaccugaauaagaaagucgaugacggauucaucgauauauggacuuacaacgcugaguugcuagugcugcucgaaaaugagagaacacuggacuuucaugacagcaacguaaagaaucuuuaugaaaaaguuaagucacaacugaagaacaaugccaaagagauuggcaacgggugcuucgaguuuuaccacaaguguaaugaugaaugcauggagagugugaaaaacggaaccuaugacuaccccaaguauuccgaagagagcaaauugaauagggagaagaucgauggugucaagcucgaaucuaugggcguguaccagauccuggcuauuuauucaacggucgccaguagcuuagugcugcuaguuucccucggggcaaucucuuucuggaugugcucgaacggaagccugcagugucggauuugcauauga

SEQ ID NO: 130537 - RNA, 1698 nt, Artificial Sequence
  derived and/or modified CDS sequence (opt3) from hemagglutinin__InfluenzaA__ACK99008
augaaggugaaacugcucguccuucugugcaccuucacagccacuuacgcugacacgaucuguauuggcuaucacgcaaacaauagcaccgauacaguugacacuguguuggagaagaacguaaccgugacacauuccgucaauuuacuggaaaacucucacaaugggaaacuaugccuccugaagggaauagcgccccuucagcuggguaacuguucaguggccggcuggaucuuggggaauccugagugcgaacuccugauuaguaaagagagcugguccuacaucguugaaaagccaaacccggagaauggaaccuguuaucccggccauuuugcugauuacgaggaacugagagagcaacucucuucggugagcucauucgaaagguuugagauuuucccuaaggagaguuccuggccaaaccacacugucacaggugugucugccagcugcucccauaauggggaaucaaguuuuuaucggaacuuacuguggcuuaccggcaaaaauggauuguaccccaaccugagcaagucuuaugcaaauaacaaagagaaggaaguucuaguacucuggggcgugcaccacccuccaaacaucggggaccagaaagcccuguaccauacggagaaugcuuacgucuccguggugucaagccacuauagucgcaaguucacucccgaaauagcaaagcgaccuaaaguccgugaucaggagggaagaaucaacuacuauuggacccuucuggagccaggugacacaauuaucuuugaagccaauggcaacuugauugcuccgagguacgccuucgcgcucucucggggguuuggauccggcaucauaaauagcaacgcacccauggauaagugugacgccaaaugccagacuccucaaggugcuauuaauucgucucugccauuccagaacguucaucccgugaccaucggggaguguccuaaguauguacgcuccgccaaauuaagaauggugacaggacugaggaauauuccaucaauccagagucggggccucuuuggcgcaaucgcuggguucauugaaggagguuggaccggcauggucgaugggugguacggauaucaccaccagaacgagcaaggcagcgguuacgccgcggaccagaaguccacgcagaaugccauaaacgggaucacuaauaaagugaacucuguuauugaaaagaugaauacacaguuuaccgcagugggcaaggaguucaacaaacuugagcgccgaauggaaaaccugaauaagaaagucgaugacggauucaucgauauauggacuuacaacgcugaguugcuagugcugcucgaaaaugagagaacacuggacuuucaugacagcaacguaaagaaucuuuaugaaaaaguuaagucacaacugaagaacaaugccaaagagauuggcaacgggugcuucgaguuuuaccacaaguguaaugaugaaugcauggagagugugaaaaacggaaccuaugacuaccccaaguauuccgaagagagcaaauugaauagggagaagaucgauggugucaagcucgaaucuauggagguguaccagauccuggcuauuuauucaacggucgccaguagcuuagugcugcuaguuucccucggcgcaaucucuuucuggaugugcucgaacgggagccugcagugucggauuugcauauga

SEQ ID NO: 130538 - RNA, 1698 nt, Artificial Sequence
  derived and/or modified CDS sequence (opt3) from hemagglutinin__InfluenzaA__ACK99009
augaaggugaaacugcucguccuucugugcaccuucacagccacuuacgcugacacgaucuguauuggcuaucacgcaaacaauagcaccgauacaguugacacuguguuggagaagaacguaaccgugacacauuccgucaauuuacuggaaaacucucacaaugggaaacuaugccuccugaagggaauagcgccccuucagcuggguaacuguucaguggccggcuggaucuuggggaauccugagugcgaacuccugauuaguaaagagagcugguccuacaucguugaaaagccaaacccggagaauggaaccuguuaucccggccauuuugcugauuacgaggaacugagagagcaacucucuucggugagcucauucgaaagguuugagauuuucccuaaggagaguuccuggccaaaccacacugucacaggugugucugccagcugcucccauaauggggaaucaaguuuuuaucggaacuuacuguggcuuaccggcaaaaauggauuguaccccaaccugagcaagucuuaugcaaauaacaaagagaaggaaguucuaguacucuggggcgugcaccacccuccaaacaucggggaccagaaagcccuguaccauacggagaaugcuuacgucuccguggugucaagccacuauagucgcaaguucacucccgaaauagcaaagcgaccuaaaguccgugaucaggagggaagaaucaacuacuauuggacccuucuggagccaggugacacaauuacuuuugaagccaauggcaacuugaucgcuccgagguacgccuucgcgcucucucggggguuuggauccggcauuaucaauagcaacgcacccauggauaagugugacgccaaaugccagaccccucaaggugcuauaaauucgucucugccauuccagaacguucaucccgugacaauuggggaguguccuaaguauguacgcuccgccaaauuaagaauggugaccggacugaggaauaucccaucaauucagagucggggccucuuuggcgcaaucgcuggguucaucgaaggagguuggacgggcauggucgaugggugguacggauaucaccaccagaacgagcaaggcagcgguuacgccgcggaccagaaguccacucagaaugccauuaacgggauaacaaauaaagugaacucuguuaucgaaaagaugaauacccaguuuacugcagugggcaaggaguucaacaaacuugagcgccgaauggaaaaccugaauaagaaagucgaugacggauucauugauaucuggacauacaacgcugaguugcuagugcugcucgaaaaugagagaacccuggacuuucaugacagcaacguaaagaaucuuuaugaaaaaguuaagucacaacugaagaacaaugccaaagagauaggcaacgggugcuucgaguuuuaccacaaguguaaugaugaaugcauggagagugugaaaaacggaacguaugacuaccccaaguauuccgaagagagcaaauugaauagggagaagauugauggugucaagcucgaaucuaugggcguguaccagauccuggcuaucuauucaaccgucgccaguagcuuagugcugcuaguuucccucggggcaauuucuuucuggaugugcucgaacggaagccugcagugucggaucugcauuuga

SEQ ID NO: 130539 - RNA, 1698 nt, Artificial Sequence; identical to SEQ ID NO: 130536
  derived and/or modified CDS sequence (opt3) from hemagglutinin__InfluenzaA__ACK99011

SEQ ID NO: 130540 - RNA, 1698 nt, Artificial Sequence
  derived and/or modified CDS sequence (opt3) from hemagglutinin__InfluenzaA__ACK99012
augaaggugaaacugcucguccuucugugcaccuucacagccacuuacgcugacacgaucuguauuggcuaucacgcaaacaauagcaccgauacaguugacacuguguuggagaagaacguaaccgugacacauuccgucaauuuacuggaaaacucucacaaugggaaacuaugccuccugaagggaauagcgccccuucagcuggguaacuguucaguggccggcuggaucuuggggaauccugagugcgaacuccugauuaguaaagagagcugguccuacaucguugaaaagccaaacccggagaauggaaccuguuaucccggccauuuugcugauuacgaggaacugagagagcaacucucuucggugagcucauucgaaagguuugagauuuucccuaaggagaguuccuggccaaaccacacugucacaggugugucugccagcugcucccauaauggggaaucaaguuuuuaucggaacuuacuguggcuuaccggcaaaaauggauuguaccccaaccugagcaagucuuaugcaaauaacaaagagaaggaaguucuaguacucuggggcgugcaccacccuccaaacaucggggaccagaaagcccuguaccauacggagaaugcuuacgucuccguggugucaagccacuauagucgcaaguucacucccgaaauagcaaagcgaccuaaaguccgugaucaggagggaagaaucaacuacuauuggacccuucuggagccaggugacacaauuaucuuugaagccaauggcaacuugauugcuccgagguacgccuucgcgcucucucggggguuuggauccggcaucauaaauagcaacgcacccauggauaagugugacgccaaaugccagacuccucaaggugcuauuaauucgucucugccauuccagaacguucaucccgugaccaucggggaguguccuaaguauguacgcuccgccaaauuaagaauggugacaggacugaggaauauuccaucaauccagagucggggccucuuuggcgcaaucgcuggguucauugaaggagguuggaccggcauggucgaugggugguacggauaucaccaccagaacgagcaaggcagcgguuacgccgcggaccagaaguccacgcagaaugccauaaacgggaucacuaauaaagugaacucuguuauugaaaagaugaauacacaguuuaccgcagugggcaaggaguucaacaaacuugagcgccgaauggaaaaccugaauaagaaagucgaugacggauucaucgauauauggacuuacaacgcugaguugcuagugcugcucgaaaaugagagaacacuggacuuucaugacagcaacguaaagaaucuuuaugaaaaaguuaagucacaacugaagaacaaugccaaagagauuggcaacgggugcuucgaguuuuaccacaaguguaaugaugaaugcauggagagugugaaaaacggaaccuaugacuaccccaaguauuccgaagagagcaaauugaauagggagaagaucgauggugucaagcucgaaucuaugggcguguaccagauccuggcuauuuauucaacggucgccaguagcuuagugcugcuaaucucccucggggcaauuucuuucuggaugugcucgaacggaagccugcagugucggauaugcaucuga

SEQ ID NO: 130541 - RNA, 1698 nt, Artificial Sequence; identical to SEQ ID NO: 130536
  derived and/or modified CDS sequence (opt3) from hemagglutinin__InfluenzaA__ACK99013

SEQ ID NO: 130542 - RNA, 1698 nt, Artificial Sequence
  derived and/or modified CDS sequence (opt3) from hemagglutinin__InfluenzaA__ACK99014
augaaggugaaacugcucguccuucugugcaccuucacagccacuuacgcugacacgaucuguauuggcuaucacgcaaacaauagcaccgauacaguugacacuguguuggagaagaacguaaccgugacacauuccgucaauuuacuggaaaacucucacaaugggaaacuaugccuccugaagggaauagcgccccuucagcuggguaacuguucaguggccggcuggaucuuggggaauccugagugcgaacuccugauuaguaaagagagcugguccuacaucguugaaaagccaaacccggagaauggaaccuguuaucccggccauuuugcugauuacgaggaacugagagagcaacucucuucggugagcucauucgaaagguuugagauuuucccuaaggagaguuccuggccaaaccacacugucacaggugugucugccagcugcucccauaauggggaaucaaguuuuuaucggaacuuacuguggcuuaccggcaaaaauggauuguaccccaaccugagcaagucuuaugcaaauaacaaagagaaggaaguucuaguacucuggggcgugcaccacccuccaaacaucggggaccagaaagcccuguaccauacggagaaugcuuacgucuccguggugucaagccacuauagucgcaaguucacucccgaaauagcaaagcgaccuaaaguccgugaucaggagggaagaaucaacuacuauuggacccuucuggagccaggugacacaauuaucuuugaagccaauggcaacuugauugcuccgagguacgccuucacucucucucggggguuuggauccggcaucauaaauagcaacgcgcccauggauaagugugacgcaaaaugccagaccccucaaggugccauuaauucgucucugccauuccagaacguucaucccgugacaaucggggaguguccuaaguauguacgcuccgcuaaauuaagaauggugaccggacugaggaauauuccaucaauccagagucggggccucuuuggcgccaucgcaggguucauugaaggagguuggacgggcauggucgaugggugguacggauaucaccaccagaacgagcaaggcagcgguuacgcugccgaccagaaguccacucagaaugcgauaaacgggaucacaaauaaagugaacucuguuauugaaaagaugaauacccaguuuacugccgugggcaaggaguucaacaaacuugagcgccgaauggaaaaccugaauaagaaagucgaugacggauucaucgauauauggacauacaacgcagaguugcuagugcugcucgaaaaugagagaacccuggacuuucaugacagcaacguaaagaaucuuuaugaaaaaguuaagucacaacugaagaacaaugcuaaagagauuggcaacgggugcuucgaguuuuaccacaaguguaaugaugaaugcauggagagugugaaaaacggaacguaugacuaccccaaguauuccgaagagagcaaauugaauagggagaagaucgauggugucaagcucgaaucuaugggcguguaccagauccuggccauuuauucaaccgucgcuaguagcuuagugcugcuaguuucccucggggccaucucuuucuggaugugcucgaacggaagccugcagugucggauuugcauauga

SEQ ID NO: 130543 - RNA, 1698 nt, Artificial Sequence; identical to SEQ ID NO: 130536
  derived and/or modified CDS sequence (opt3) from hemagglutinin__InfluenzaA__ACK99016

SEQ ID NO: 130544 - RNA, 1698 nt, Artificial Sequence; identical to SEQ ID NO: 130536
  derived and/or modified CDS sequence (opt3) from hemagglutinin__InfluenzaA__ACK99018

SEQ ID NO: 130545 - RNA, 1698 nt, Artificial Sequence; identical to SEQ ID NO: 130536
  derived and/or modified CDS sequence (opt3) from hemagglutinin__InfluenzaA__ACK99023

SEQ ID NO: 130546 - RNA, 1698 nt, Artificial Sequence
  derived and/or modified CDS sequence (opt3) from hemagglutinin__InfluenzaA__ACK99026
augaaggugaaacugcucguccuucugugcaccuucacagccacuuacgcugacacgaucuguauuggcuaucacgcaaacaauagcaccgauacaguugacacuguguuggagaagaacguaaccgugacacauuccgucaauuuacuggaaaacucucacaaugggaaacuaugccuccugaagggaauagcgccccuucagcuggguaacuguucaguggccggcuggaucuuggggaauccugagugcgaacuccugauuaguaaagagagcugguccuacaucguugaaaagccaaacccggagaauggaaccuguuaucccggccauuuugcugauuacgaggaacugagagagcaacucucuucggugagcucauucgaaagguuugagauuuucccuaaggagaguuccuggccaaaccacacugucacaggugugucugccagcugcucccauaauggggaaucaaguuuuuaucggaacuuacuguggcuuaccggcaaaaauggauuguaccccaaccugagcaagucuuaugcaaauaacaaagagaaggaaguucuaguacucuggggcgugcaccacccuccaaacaucggggaccagaaagcccuguaccauacggagaaugcuuacgucuccguggugucaagccacuauagucgcaaguucacucccgaaauagcaaagcgaccuaaaguccgugaucaggagggaagaaucaacuacuauuggacccuucuggagccaggugacacaauuaucuuugaagccaauggcaacuugauugcuccgagguacgccuucgcgcucucucggggguuuggauccggcaucauaaauagcaacgcacccauggauaagugugacgccaaaugccagacuccucaaggugcuauuaauucgucucugccauuccagaacguucaucccaucaccauuggggaguguccuaaguaugugcgcuccgccaaauuaagaaugguaacaggacugaggaauaucccaucaauccagagucggggccucuuuggcgcaauugcuggguucauagaaggagguuggaccggcaugguggaugggugguacggauaucaccaccagaacgagcaaggcagcgguuacgccgcggaccagaaguccacgcagaaugccaucaacgggauuacuaauaaagucaacucugugaucgaaaagaugaauacacaguuuaccgcaguuggcaaggaguucaacaaacuugagcgccgaauggaaaaccugaauaagaaaguggaugacggauucauagauauuuggacuuacaacgcugaguugcuaguccugcucgaaaaugagagaacacuggacuuucaugacagcaacgugaagaaucuuuaugaaaaaguaaagucacaacugaagaacaaugccaaagagaucggcaacgggugcuucgaguuuuaccacaaguguaaugaugaaugcauggagaguguuaaaaacggaaccuaugacuaccccaaguauuccgaagagagcaaauugaauagggagaagaucgauggugugaagcucgaaucuaugggcgucuaccagauucuggcuaucuauucaacgguggccaguagcuuaguccugcuagugucccucggggcaauuucuuucuggaugugcucgaacggaagccugcagugucggauaugcaucuga

SEQ ID NO: 130547 - RNA, 1698 nt, Artificial Sequence; identical to SEQ ID NO: 130220
  derived and/or modified CDS sequence (opt3) from hemagglutinin__InfluenzaA__ACK99027

SEQ ID NO: 130548 - RNA, 1698 nt, Artificial Sequence
  derived and/or modified CDS sequence (opt3) from hemagglutinin__InfluenzaA__ACK99028
augaaggugaaacugcucguccuucugugcaccuucacagccacuuacgcugacacgaucuguauuggcuaucacgcaaacaauagcaccgauacaguugacacuguguuggagaagaacguaaccgugacacauuccgucaauuuacuggaaaacucucacaaugggaaacuaugccuccugaagggaauagcgccccuucagcuggguaacuguucaguggccggcuggaucuuggggaauccugagugcgaacuccugauuaguaaagagagcugguccuacaucguugaaaagccaaacccggagaauggaaccuguuaucccggccauuuugcugauuacgaggaacugagagagcaacucucuucggugagcucauucgaaagguuugagauuuucccuaaggagaguuccuggccaaaccacacugucacaggugugucugccagcugcucccauaauggggaaucaaguuuuuaucggaacuuacuguggcuuaccggaaagaauggcuuguaccccaaccugagcaagucuuaugcaaauaacaaagagaaggaaguucuaguacucuggggcgugcaccacccuccaaacaucggggaccagaaagcccuguaccauacggagaaugcuuacgucuccguggugucaagccacuauagucgcaaguucacucccgaaauagcaaagcgaccuaaaguccgugaucaggagggaagaaucaacuacuauuggacccuucuggagccaggugacacaauuaucuuugaagccaauggcaacuugauugcuccgagguacgccuucgcgcucucucggggguuuggauccggcaucauaaauagcaacgcacccauggauaagugugacgccaaaugccagacuccuaagggugcuauuaauucgucucugccauuccaaaacguucaucccgugaccaucggggaguguccuaaauauguacgcuccgccaaguuaagaauggugacaggacugaggaauauuccaucaauccagagucggggccucuuuggcgcaaucgcuggguucauugaaggagguuggaccggcauggucgaugggugguacggauaucaccaccagaacgagcagggcagcgguuacgccgcggaccaaaaauccacgcagaaugccauaaacgggaucacuaauaaggugaacucuguuauugaaaagaugaauacacaguuuaccgcagugggcaaagaguucaacaaacuugagcgccgaauggaaaaccugaauaaaaaggucgaugacggauucaucgauauauggacuuacaacgcugaguugcuagugcugcucgaaaaugagagaacacuggacuuucaugacagcaacguuaaaaaucuuuaugaaaagguaaagucacagcugaaaaacaaugccaaggagauuggcaacgggugcuucgaguuuuaccacaaauguaaugaugaaugcauggagagugugaagaacggaaccuaugacuaccccaaauauuccgaagagagcaaguugaauagggagaagaucgauggugucaaacucgaaucuaugggcguguaccaaauccuggcuauuuauucaacggucgccaguagcuuagugcugcuaguuucccucggggcaaucucuuucuggaugugcucgaacggaagccugcagugucggauuugcauauga

SEQ ID NO: 130549 - RNA, 1698 nt, Artificial Sequence
  derived and/or modified CDS sequence (opt3) from hemagglutinin__InfluenzaA__ACK99029
augaaggugaaacugcucguccuucugugcaccuucacagccacuuacgcugacacgaucuguauuggcuaucacgcaaacaauagcaccgauacaguugacacuguguuggagaagaacguaaccgugacacauuccgucaauuuacuggaaaacucucacaaugggaaacuaugccuccugaagggaauagcgccccuucagcuggguaacuguucaguggccggcuggaucuuggggaauccugagugcgaacuccugauuaguaaagagagcugguccuacaucguugaaaagccaaacccggagaauggaaccuguuaucccggccauuuugcugauuacgaggaacugagagagcaacucucuucggugagcucauucgaaagguuugagauuuucccuaaggagaguuccuggccaaaccacacugucacaggugugucugccagcugcucccauaauggggaaucaaguuuuuaucggaacuuacuguggcuuaccggcaaaaauggauuguaccccaaccugagcaagucuuaugcaaauaacaaagagaaggaaguucuaguacucuggggcgugcaccacccuccaaacaucggggaccagaaagcccuguaccauacggagaaugcuuacgucuccguggugucaagccacuauagucgcaaguucacucccgaaauaucuaagcgaccuaaaguccgugaucaggagggaagaaucaacuacuauuggacccuucuggagccaggugacacaauuaucuuugaagcaaauggcaacuugauugccccgagguacgcuuucgcccucucccggggguuuggaagcggcaucauaaauucgaacgcgcccauggauaagugugacgcaaaaugccagacuccucaaggugccauuaauucuucccugccauuccagaacguucaucccgugaccaucggggaguguccuaaguauguacgcucagcuaaauuaagaauggugacaggacugaggaauauuccaaguauccagagccggggccucuuuggcgccaucgcaggguucauugaaggagguuggaccggcauggucgaugggugguacggauaucaccaccagaacgagcaaggcuccgguuacgcugccgaccagaagucuacgcagaaugcgauaaacgggaucacuaauaaagugaacagcguuauugaaaagaugaauacacaguuuaccgccgugggcaaggaguucaacaaacuugagcgccgaauggaaaaccugaauaagaaagucgaugacggauucaucgauauauggacuuacaacgcagaguugcuagugcugcucgaaaaugagagaacacuggacuuucaugacucaaacguaaagaaucuuuaugaaaaaguuaagagucaacugaagaacaaugcuaaagagauuggcaacgggugcuucgaguuuuaccacaaguguaaugaugaaugcauggaguccgugaaaaacggaaccuaugacuaccccaaguauagcgaagagucuaaauugaauagggagaagaucgauggugucaagcucgaaucaaugggcguguaccagauccuggccauuuauaguacggucgcuagcuccuuagugcugcuaguuucucucggggccaucucguucuggaugugcagcaacggaucccugcagugucggauuugcauauga

SEQ ID NO: 130550 - RNA, 1698 nt, Artificial Sequence; identical to SEQ ID NO: 130536
  derived and/or modified CDS sequence (opt3) from hemagglutinin__InfluenzaA__ACK99030

SEQ ID NO: 130551 - RNA, 1698 nt, Artificial Sequence; identical to SEQ ID NO: 130536
  derived and/or modified CDS sequence (opt3) from hemagglutinin__InfluenzaA__ACK99031

SEQ ID NO: 130552 - RNA, 1698 nt, Artificial Sequence; identical to SEQ ID NO: 130536
  derived and/or modified CDS sequence (opt3) from hemagglutinin__InfluenzaA__ACK99032

SEQ ID NO: 130553 - RNA, 1698 nt, Artificial Sequence; identical to SEQ ID NO: 130536
  derived and/or modified CDS sequence (opt3) from hemagglutinin__InfluenzaA__ACK99033

SEQ ID NO: 130554 - RNA, 1698 nt, Artificial Sequence
  derived and/or modified CDS sequence (opt3) from hemagglutinin__InfluenzaA__ACK99034
augaaggugaaacugcucguccuucugugcaccuucacagccacuuacgcugacacgaucuguauuggcuaucacgcaaacaauagcaccgauacaguugacacuguguuggagaagaacguaaccgugacacauuccgucaauuuacuggaaaacucucacaaugggaaacuaugccuccugaagggaauagcgccccuucagcuggguaacuguucaguggccggcuggaucuuggggaauccugagugcgaacuccugauuaguaaagagagcugguccuacaucguugaaaagccaaacccggagaauggaaccuguuaucccggccauuuugcugauuacgaggaacugagagagcaacucucuucggugagcucauucgaaagguuugagauuuucccuaaggagaguuccuggccaaaccacacugucacaggugugucugccagcugcucccauaauggggaaucaaguuuuuaucggaacuuacuguggcuuaccggcaaaaauggauuguaccccaaccugagcaagucuuaugcaaauaacaaagagaaggaaguucuaguacucuggggcgugcaccacccuccaaacaucggggaccagaaagcccuguaccauacggagaaugcuuacgucuccguggugucaagccacuauagucgcaaguucacucccgaaauagcaaagcgaccuaaaguccgugaucaggagggaagaaucaacuacuauuggacccuucuggagccaggugacacaauuaucuuugaagccaauggcaacuugauugcuccgagguacgccuucgcgcucucucgggauuuuggguccggaaucauaaauagcaacgcacccauggacaagugugaugccaaaugccagacuccucaaggcgcuauuaauucgucucugccauuccagaacguucaucccgugaccaucggugaguguccuaaguauguacgcuccgccaaauuaagaauggugacagggcugaggaauauuccaucaauccagagucggggacucuuuggcgcaaucgcuggcuucauugaagggggauggaccgguauggucgacggcugguacggguaucaccaccagaacgagcaaggaagcggcuacgccgcggaucagaaguccacgcagaaugccauaaacgguaucacuaauaaagugaacucuguuauugaaaagaugaauacacaguuuaccgcaguggggaaggaguucaacaaacuugagcgccgaauggaaaaccugaauaagaaagucgacgauggcuucaucgacauauggacuuacaacgcugaguugcuagugcugcucgaaaaugagagaacacuggacuuucaugauagcaacguaaagaaucuuuaugaaaaaguuaagucacaacugaagaacaaugccaaagagauuggaaacggcugcuucgaguuuuaccacaaguguaaugacgaaugcauggagagugugaaaaacgggaccuaugauuaccccaaguauuccgaagagagcaaauugaauagggagaagaucgacggagucaagcucgaaucuauggguguguaccagauccuggcuauuuauucaacggucgccaguagcuuagugcugcuaguuucccucggcgcaaucucuuucuggaugugcucgaacgggagccugcagugucggauuugcauauga

SEQ ID NO: 130555 - RNA, 1698 nt, Artificial Sequence
  derived and/or modified CDS sequence (opt3) from hemagglutinin__InfluenzaA__ACK99035
augaaggugaaacugcucguccuucugugcaccuucacagccacuuacgcugacacgaucuguauuggcuaucacgcaaacaauagcaccgauacaguugacacuguguuggagaagaacguaaccgugacacauuccgucaauuuacuggaaaacucucacaaugggaaacuaugccuccugaagggaauagcgccccuucagcuggguaacuguucaguggccggcuggaucuuggggaauccugagugcgaacuccugauuaguaaagagagcugguccuacaucguugaaaagccaaacccggagaauggaaccuguuaucccggccauuuugcugauuacgaggaacugagagagcaacucucuucggugucagccuucgaaagguuugagauuuucccuaaggagagcaguuggccaaaccacacugucacagguguguccgcaucuugcagccauaauggggaauccucauuuuaucggaacuuacuguggcuuaccggcaaaaauggauuguaccccaaccugaguaagagcuaugccaauaacaaagagaaggaaguucuaguacucuggggcgugcaccacccuccaaacaucggggaccagaaagcucuguaccauacggagaaugcauacgucucugugguguccucacacuauagccgcaaguucacucccgaaauaaguaagcgaccuaaaguccgugaucaggagggaagaaucaacuacuauuggacccuucuggagccaggugacacaauuaucuuugaagccaauggcaacuugauugcuccgagguacgccuucgcgcucucucggggguuuggauccggcaucauaaauagcaacacucccauggauaagugugacgcaaaaugccagaccccucaaggugccauuaauucgucucugccauuccagaacguucaucccgugacaaucggggaguguccuaaguauguacgcuccgcuaaauuaagaauggugaccggacugaggaauauuccaucaauccagagucggggccucuuuggcgccaucgcaggguucauugaaggagguuggacgggcauggucgaugggugguacggauaucaccaccagaacgagcaaggcagcgguuacgcugccgaccagaaguccacucagaaugcgauaaacgggaucacaaauaaagugaacucuguuauugaaaagaugaauacccaguuuacugccgugggcaaggaguucaacaaacuugagcgccgaauggaaaaccugaauaagaaagucgaugacggauucaucgauauauggacauacaacgcagaguugcuagugcugcucgaaaaugagagaacccuggacuuucaugacagcaacguaaagaaucuuuaugaaaaaguuaagucacaacugaagaacaaugcuaaagagauuggcaacgggugcuucgaguuuuaccacaaguguaaugaugaaugcauggagagugugaaaaacggaacguaugacuaccccaaguauuccgaagagagcaaauugaauagggagaagaucgauggugucaagcucgaaucuaugggcguguaccagauccuggccauuuauucaaccgucgcuaguagcuuagugcugcuaguuucccucggggccaucucuuucuggaugugcucgaacggaagccugcagugucggauuugcauauga

SEQ ID NO: 130556 - RNA, 1701 nt, Artificial Sequence; identical to SEQ ID NO: 130386
  derived and/or modified CDS sequence (opt3) from hemagglutinin__InfluenzaA__ACK99421

SEQ ID NO: 130557 - RNA, 1689 nt, Artificial Sequence
  derived and/or modified CDS sequence (opt3) from hemagglutinin__InfluenzaA__ACK99432
auggccaucauuuaccugauacuccuuuucaccgcugugagaggcgaccagaucugcauuggguaucacgcaaacaauagcacagagaagaucgauacuauucuggaaaggaacgucacgguuacccaugccaaagacaucuuggagaagacacacaauggaaaauuauguaagcugaacgguauacccccucuagaacucggcgauugcuccaucgcgggguggcugcuuggaaauccagagugugaccggcuguugcgcgugccggaauggucuuacauuauggagaaagagaacccccgauauucacucugcuacccuggcaguuuuaaugauuaugaagaacugaagcaucugcucagcuccguaaagcacuucgaaaaagugaagaucuuaccaaaagaccguuggacucaacauaccacaaccggugggucuauggcuugugccgucucgggaaagcccucauuuuucagaaacaugguguggcugacuacaaaaggcccuaauuacccaguugcacagggcagcuauaacaauaccaguggggagcagaugcuuauuaucuggggagugcaccaccccaacgaugaggccgaacagagggcuuuguaccaaaaggucgguacguacguguccgcaucuacuagcacccuguauaagcgguccauaccugagauugccgcucgcccaaaaguaaauggccuagggucaagaauggaauuuaguuggacacuccuggacaugugggauacuaucaacuucgagagcaccggaaaucuuguugccccggaauacggcuuuaagauuucuaaaagggguuccucagggaucaugaagacagagggaacccuggagaacugcgaaacgaaaugucagacucccuugggcgcgaucaacacaacccucccuuuccauaaugugcacccacugacuauuggcgagugccccaaguaugucaaaagcgaaaaguuagugcuggcaacagggcuccggaacgugccucagauagagagucgcggacuuuuuggugccaucgcuggcuucauugaagggggauggcagggcauggucgacgguugguacggguaucaucacucuaaugaucaaggcuccggauacgccgcagacaaggagagcacccagaaggcuuuugauggcaucacgaacaaaguuaauucggugauagagaaaaugaacacccaguucgaagccguagggaaggaguuuucuaaucuggaaaaacgauuggagaaccuaaauaagaagauggaagacggauuccuggacguguggacauauaacgcggagcuccugguccuuauggagaaugaaagaacucuggauuuccacgacuccaacgugaaaaauuuguacgauaagguuaggaugcagcuccgggacaacgugaaagagcuggguaauggcuguuuugaguucuaccauaagugcgauaacgaguguauggacucagucaaaaacgggaccuaugauuacccaaaguaugaggaagagaguaaguuaaaucguaacgaaauuaaaggagugaagcugagcuccaugggcguauaccaaauccuagccaucuaugcaacaguugcugguucucucagccuggccauuaugauggcugggaucucauuuuggaugugcaguaauggcucccuucagugccgcauuuguauauga

SEQ ID NO: 130558 - RNA, 1701 nt, Artificial Sequence
  derived and/or modified CDS sequence (opt3) from hemagglutinin__InfluenzaA__ACK99443
augaaggccaaacugcucgugcuucugugcgcuuucaccgcaacagacgccgauacuaucuguauuggcuaccacgcgaacaauagcacggacaccgucgauacaguuuuggagaagaacgugacuguaacccauuccgugaauuuacuggaagacucucacaacgggaaacuaugcagacucaagggaauagcuccccugcagcuugguaauuguucaaucgccggcuggauucuggggaacccugagugcgaaaguuuguuuagcaaagaguccuggucuuauaucgcagaaacaccaaauucggagaacggaaccuguuacccgggcuauuucgccgauuacgaggaacucagggagcaacugucaagcgucaguuccuuugaacgguucgagauuuuucccaaggagucuagcuggccuaaucauacugugacaaaggguguuaccgcugcaugcucccacaacgggaaaucaaguuucuaucgcaaucugcucugguuaacggaaaagaacggacuguacccaaaucuuagcaaaucuuaugugaacaauaaggagaaagaagucuuggugcuguggggcguacaucaccccuccaacaucggcgaccagcgagccauauaccacacugagaacgcuuacguuucaguggucagcagucauuauucucguagauuuaccccugaaaucgccaagaggccaaaggugcgggggcaggagggacgcauuaauuacuauuggacacuacucgagcccggugauacuaucauuuucgaagcgaacggcaaucugaucgcaccuugguacgccuuugcucuuuccagaggguucggaagcggcauaauuaccucgaacgccucuauggacgagugugaugcaaaaugccagacaccacaaggugcuaucaauuccucacugccguuucagaacgugcaccccgucaccauuggggaauguccuaaguauguuaggaguacgaaauugcggauggugacuggacuccgcaauaucccaagcguacagucccgaggccuguucggcgccaucgcgggguuuauugagggagguuggacaggcaugauagacgggugguacggauaucaucaccagaacgaacaaggcucugguuacgccgcagaucagaaaagcacccagaaugcuaucaacgggauuacuaauaaagugaacucagucaucgagaagaugaauacacaguucaccgccgugggcaaagaguucaacaaguuagaaagaaggauggagaaucugaacaagaaaguugacgauggauuucucgacauauggacguacaacgcugaacuucugguguugcuagagaaugaacggacccuggacuuccacgauaguaacgucaagaaucucuaugagaaagugaagucccaacugaaaaacaaugccaaggagauuggcaacgggugcuuugaguucuaccauaaguguaauaacgaaugcauggaaagcguaaagaauggaacauaugacuaccccaaguauucugaggagucaaaacuuaaccgugaaaagaucgaugguguuaaacuggagaguaugggcguguaccagaucuuggcaauuuauagcacugucgccuccucucucgugcuguuagucucgcugggggcuaucagcuuuuggaugugcuccaauggaucacuacagugucgcauuugcauauga

SEQ ID NO: 130559 - RNA, 1701 nt, Artificial Sequence
  derived and/or modified CDS sequence (opt3) from hemagglutinin__InfluenzaA__ACK99465
augaaggccaaacugcucgugcuucugugcgcuuucaccgcaacauacgccgacacuaucuguauuggcuaucacgcgaacaauagcacggauaccgucgacacaguuuuggagaagaacgugacuguaacccauuccgugaauuuacuggaagauucucacaacgggaaacuaugcagacucaagggaacagcuccccugcagcuugguaauuguucagucgccggcuggauacuggggaacccugagugcgaaaguuuguuuagcaaagaguccuggucuuacaucgcagaaaagccaaauccggagaacggaaccuguuaucccggcuacuucgccgacuaugaggaacucagggagcaacugucgucagugagcaguuuugaacgguucgagauuuuuccuaaggaguccucuuggccaaaucauacuguuacaaaaggugugaccgcuagcugcucccacaacgggaagucaaguuucuacaaaaaucugcucugguuaacgaagaaaaacggacuguaucccaaucuuagcaagucuuacgucaacaauaaggaaaaagagguguugguacuguggggcguucaucacccuuccaacaucggcgaucagcgcgcaauuuaccacacugaaaacgccuaugugucagucgugagcagucauuacucucgacguuuuaccccagagaucgcuaagagacccaaagugagggaccaggaagggcggauaaauuauuacuggacacuacucgagccuggagauacuaucauuuucgaggccaacgguaaucugaucgcgccaugguaugcauuugcccuuucccgcggcuucgggagcggaauuaucaccucgaacgcuucuaugggcgaaugugacgccaagugccagacaccgcaaggugcaauaaauuccucacugcccuuucagaacguccacccuguuaccauuggggaguguccaaaauacgugagaaguacgaaguugaggaugguaacuggacuccggaauauccccagcauucagucccgcggccuguucggcgcuaucgccggguuuaucgaaggagguuggacaggcaugauugaugggugguauggauaccaucaccagaacgagcaaggcucugguuacgcggccgacaaaaagagcacccagaaugcaauagaugggaucacuaacaagguaaauucagucauugaaaagaugaacacacaguucaccgcugugggcaaggaguucaauaaauuagagcgaagaauggaaaaccugaauaagaaaguugacgauggauuucucgacaucuggacguauaacgccgagcuucugguguugcuagaaaacgagaggacccuggacuuccacgauaguaaugucaagaaccucuacgaaaaggugaaaaaucagcugaagaacaaugcuaaagagauaggcaacgggugcuuugaguucuaucauaaguguaauaacgaaugcauggaguccgugaaaaauggaacauacgacuauccuaaguacagcgaagagucuaaacuuaaacgggagaagauugaugguguuaaacuggaaucaaugggcguguaucaaaucuuggccaucuacaguacugucgcaagcucccucgugcuguuagucucucugggggccauuucguuuuggaugugcagcaacggaucccuacagugucguaucugcauuuga

SEQ ID NO: 130560 - RNA, 1701 nt, Artificial Sequence
  derived and/or modified CDS sequence (opt3) from hemagglutinin__InfluenzaA__ACK99476
augaagaccaucauugcccugagcuacauacucugcaugguguucgcucagaaacuucccggcaacgacaauuccacagcaacucuguguuuggggcaccaugccgucccuaacggaacguuaguuaagaccaucacaaaugaucaaauugaggugacuaacgcgaccgaacugguacagucuucaaguacagguagaaucugcgacagcccacacaggauucuagauggcaaaaauuguacccucaucgacgcucugcuuggggauccgcauugcgacgauuuucagaacaaggagugggaccuguucguggaacgguccaaagccuauucuaauuguuaccccuaugaugucccugacuacgcaucguugcgcucacucguggccagcaguggaacucuggaguuuaacaaugaauccuucaacuggacaggcguugcucagaaugguaccucuuaugcaugcaagcgacguagcgugaaguccuuuuucucaagacugaacuggcuccacaaauuagaguacaaguauccagcccugaaugucacgaugcccaacaaugauaaauuugacaagcuguacauauggggagugcaucacccuaggacugauagugaccaaaccagcuuguacguacaggcuucugggcggguuacaguguccacuaaacgcucacagcagaccgucaucccaaacauuggcagcagucccugggugagaggcgugucuuccaggaucagcauuuauuggacaaucgucaagccuggggacauacugcuaauuaacucgaccggaaaucucaucgccccacgggguuacuucaagauucgcucuggcaaauccucaaucaugcgaagugaugcgccgaucgggaacuguaauagcgagugcauuacgcccaacggauccauaccuaaugacaagccauuucaaaacguuaauagaaucacuuauggcgcaugucccagguacgugaaacagaacacacugaaacuugccaccgguaugcggaauguaccugaaaagcagacucgugggauuuucggagcuaucgccggcuuuauagagaacggcugggaagggaugguggauggaugguaugguuuccgccaccaaaauucugagggcacagggcaggcagcugaccuuaagagcacccaggccgcgauuaaccagaucaauggaaaauugaacagacucaucgagaagacgaaugaaaaguuucaucaaauugagaaagaguucucagaagucgaaggcaggauccaggaucuggagaaguacguggaggacaccaaaauugauuuauggaguuauaacgccgaacugcucguugcacuugagaaccagcacacaauagaccugacugauuccgaaaugaauaaguuguucgagcggacccgaaaacagcuacgcgaaaacgcugaggacauggguaaugggugcuuuaagaucuaccauaagugugauaacgccugcauuggcagcaucagaaauggaacauacgaccacgacguguauagggaugaggcucugaacaaucgguuccaaaucaaaggcgucgaacucaagucuggguacaaagacuggauucuguggauaucauuugccaucaguugcuuccuucugugugugguauugcucggauuuauuaugugggcaugccagaaggguaacauccgcuguaauauuugcaucuga

SEQ ID NO: 130561 - RNA, 1698 nt, Artificial Sequence; identical to SEQ ID NO: 129962
  derived and/or modified CDS sequence (opt3) from hemagglutinin__InfluenzaA__ACL12063

SEQ ID NO: 130562 - RNA, 1701 nt, Artificial Sequence
  derived and/or modified CDS sequence (opt3) from hemagglutinin__InfluenzaA__ACL12129
augaagaccaucauugcccugagcuacauacucugccuuguguucgcucagaaacugcccggcaacgacaauuccacagcaacuuuguguuuagggcaccaugccgucccuaacggaacgcugguuaagaccaucacaaaugaucaaauugaggugacuaacgcgaccgaacuuguacagucuucaaguacagguagaaucugcggcagcccacacaggauucucgacgggaaaaauuguacccugaucgaugcucuacugggagacccgcauugcgauggcuuucagaacaaggagugggacuuguucguggaacgguccaaagccuauucuaauuguuaccccuaugaugucccugacuacgcaucgcuccgcucacugguggccagcagugguacucuggaguuuauaaacgaagauuucaauuggacagggguugcucaggacggaggcuccuaugcaugcaagcgaggcucugugaacagcuuuuucucccgucucaauugguuacacaagcuggaguacaaauauccagcccuuaacgucaccaugcccaauaacgggaaguuugauaaauuguacaucuggggagugcaucacccuucaacggacagugaucaaacuagccuguacguaagagcuucugguaggguuaccguguccacaaagcggucacagcagacugucaccccaaauauuggcagccgccccugggugagagggcagaguucuaggaucuccauuuauuggacaaucgugaaaccuggagacauacuacucauugacagcaccggcaaccugaucgccccacgggguuacuucaagauucgcaacgggaagucgucuaucaugcgauccgaugcgccgaucggaaauuguucaagugagugcauuacgcccaacggcagcauaccuaaugacaaaccauuucaaaacgucaauagaaucacuuauggcgcaugucccagguacguuaagcagaacacacuuaaacuggccaccgggaugcggaaugugccugaaaagcagacucguggaauuuucggugcuaucgccggcuuuauagagaacgggugggaaggaaugguagauggcugguaugguuuccgccaccagaauagcgaggggacaggccaagcagcugacuugaaaucuacccaggccgcgauugaucagaucaacggaaagcucaauagacugaucgagaaaacgaacgaaaaguuucaacagauugagaaggaguucagcgaaguggaaggcaggauccaggacuuagagaaauacgucgaggauaccaagauugaccuguggucauauaaugccgaacuccuuguggcacuggagaaccagcauacaauagauuugacugacagugaaaugaauaaacuauucgagaagacccggaaacaacugcgagaaaacgcugaggauauggggaacggaugcuuuaagaucuaccacaagugugacaaugccugcauugguuccauccgcaacggcacauacgaccaugauguuuauagagacgaggcucucaauaacagguuccagaucaaagggguggaacugaaguccggauacaaagauuggauucuuuggauaucuuuugccaucucaugcuuccuguugugugucgugcuccugggcuuuauuaugugggcaugccagaaggguaauauccgguguaacauuugcaucuga

SEQ ID NO: 130563 - RNA, 1701 nt, Artificial Sequence; identical to SEQ ID NO: 130404
  derived and/or modified CDS sequence (opt3) from hemagglutinin__InfluenzaA__ACL12140

SEQ ID NO: 130564 - RNA, 1698 nt, Artificial Sequence; identical to SEQ ID NO: 130488
  derived and/or modified CDS sequence (opt3) from hemagglutinin__InfluenzaA__ACL12151

SEQ ID NO: 130565 - RNA, 1701 nt, Artificial Sequence; identical to SEQ ID NO: 130482
  derived and/or modified CDS sequence (opt3) from hemagglutinin__InfluenzaA__ACL12162

SEQ ID NO: 130566 - RNA, 1701 nt, Artificial Sequence
  derived and/or modified CDS sequence (opt3) from hemagglutinin__InfluenzaA__ACL12173
augaagaccaucauugcccugagcuacauacucugccuuguguucgcucagaaacugcccggcaacgacaauuccacagcaacuuuguguuuagggcaccaugccgucccuaacggaacgaucguuaagaccauuacaaaugaucaaaucgaggugacuaacgcgaccgaacugguacagucuucaaguacaggugagauuugcgacagcccacaccagauccuagauggcgaaaauuguacccucauagacgcucugcuuggggauccgcagugcgacggauuucaaaacaaaaagugggaucuguucguggagagauccaaagccuauucuaauuguuaccccuaugacgucccugauuacgcaucguugaggucacucguggccagcaguggcacucuggaauuuaacaaugaguccuucaacuggacagguguuacccagaaugggacgucuagcgcuugcauccggcgcuccaacaauucauuuuucagucgacugaacuggcucacucauuuaaaguuuaaguauccagcacugaaugugaccaugcccaacaacgagcaguucgacaaacuuuacauuuggggaguccaccauccuggcacagauaaugaccagaucuuuuuguaugcccaagcuagcggccguauuacugugucuaccaagagaucccagcagacaguaaucccaaacauagggucaaggccccggguucgcaauauuccuagcagaaucaguauuuacuggaccaucgugaaaccaggagauauccugcuaauuaacucuacggguaaucucauagccccgaggggcuacuucaagauccgguccgggaaaagcucgauuaugcgcucugacgcgcccaucggaaaguguaacuccgaaugcauaacuccuaauggcucaauuccaaacgacaagcccuuucagaaugucaaccgaaucacauauggugcauguccuagauacgugaaacaaaauacccugaagcuggccacugggaugaggaacgugccagagaaacagacacggggaaucuucggcgcuauugccggcuuuaucgaaaaugggugggagggaauggucgaugguugguauggcuuccgucaccagaacagugaggggcgcggacaagcagcugaccuuaagagcacccaggccgcgauuaaucagauaaacggcaaauugaacagacucaucgguaagacgaaugaaaaauuccaccagauugagaaggaauuuuccgagguugaagggaggauccaagaucuggagaaguacguggaggacaccaaaaucgauuuauggucuuauaacgccgaacugcucguagcacuugagaaucagcauacaauugaccugacugauagcgaaaugaacaaguuguucgagaaaaccaagaaacagcuacgggaaaaugcugaggacaugggcaacggaugcuuuaagauauaccacaagugugauaaugccugcaucggcucaauucgaaacgggacauaugaccaugauguguaccgcgacgaggcucugaauaacagauuccagaucaaaggagucgaacucaagagugguuacaaagacuggauucuguggaucuccuuugccauaagcugcuuccuucuguguguggcauugcucggcuuuaucaugugggccugccaaaaggggaauauuagguguaacaucugcauuuga

SEQ ID NO: 130567 - RNA, 1701 nt, Artificial Sequence
  derived and/or modified CDS sequence (opt3) from hemagglutinin__InfluenzaA__ACL12184
augaagaccaucauugcccugagcuacauacucugccuuguguucgcucagaaacugcccggcaacgacaauuccacagcaacuuuguguuuagggcaccaugccgucccuaacggaacgaucguuaagaccauuacaaaugaucaaaucgaggugacuaacgcgaccgaacugguacagucuucaaguacaggugagauuugcgacagcccacaccagauccuagauggcgaaaauuguacccucauagacgcucugcuuggggauccgcagugcgacggauuucaaaacaaaaagugggaucuguucguggagagauccaaagccuauucuaauuguuaccccuaugacgucccugauuacgcaucguugaggucacucguggccagcaguggcacucuggaauuuaacaaugaguccuucaacuggacagguguuacccagaaugggacgucuagcgcuugcauccggcgcuccaacaauucauuuuucagucgacugaacuggcucacucauuuaaaguuuaaguauccagcacugaaugugaccaugcccaacaacgagcaguucgacaaacuuuacauuuggggaguccaccauccuggcacagauaaugaccagaucuuuuuguaugcccaagcuagcggccguauuacugugucuaccaagagaucccagcagacaguaaucccaaacauagggucaaggccccggguucgcaauauuccuagcagaaucaguauuuacuggaccaucgugaaaccaggagauauccugcuaauuaacucuacggguaaucucauagccccgaggggcuacuucaagauccgguccgggaaaagcucgauuaugcgcucugacgcgcccaucggaaaguguaacuccgaaugcauaacuccuaauggcucaauuccaaacgacaagcccuuucagaaugucaaccgaaucacauauggugcauguccuagauacgugaaacaaaauacccugaagcuggccacugggaugaggaacgugccagagaaacagacacggggaaucuucggcgcuauugccggcuuuaucgaaaaugggugggagggaauggucgaugguugguauggcuuccgucaccagaacagugaggggcgcggacaagcagcugaccuuaagagcacccaggccgcgauugaucagauaaauggcaaauugaacagacucaucgguaagacgaacgaaaaauuccaccagauugagaaggaauuuuccgagguugaagggaggauccaagaccuggagaaguacguggaggauaccaaaaucgacuuauggucuuauaaugccgaacugcucguagcacuugagaaccagcauacaauugaucugacugacagcgaaaugaauaaguuguucgagaaaaccaagaaacagcuacgggaaaacgcugaggauaugggcaauggaugcuuuaagauauaccacaagugugacaacgccugcaucggcucaauucgaaaugggacauauaaccaugauguguaccgcgacgaggcucugaauaacagauuccagaucaaaggagucgaacucaagagugguuacaaagacuggauucuguggaucuccuuugccauaagcugcuuccuucuguguguggcauugcucggcuuuaucaugugggccugccaaaaggggaauauuagguguaacaucugcauuuga

SEQ ID NO: 130568 - RNA, 1701 nt, Artificial Sequence; identical to SEQ ID NO: 130482
  derived and/or modified CDS sequence (opt3) from hemagglutinin__InfluenzaA__ACL12195

SEQ ID NO: 130569 - RNA, 1701 nt, Artificial Sequence
  derived and/or modified CDS sequence (opt3) from hemagglutinin__InfluenzaA__ACL12217
augaagaccaucauugcccugagcuacauacucugccuuguguucgcucagaaacugcccggcaacgacaauuccacagcaacuuuguguuuagggcaccaugccgucccuaacggaacgaucguuaagaccauuacaaaugaucaaaucgaggugacuaacgcgaccgaacugguacagucuucaaguacaggugagauuugcgacagcccacaccagauccuagauggcgaaaauuguacccucauagacgcucugcuuggggauccgcagugcgacggauuucaaaacaaaaagugggaucuguucguggagagauccaaagccuauucuaauuguuaccccuaugacgucccugauuacgcaucguugaggucacucguggccagcaguggcacucuggaauuuaacaaugaguccuucaacuggacagguguuacccagaaugggacgucuagcgcuugcauccggcgcuccaacaauucauuuuucagucgacugaacuggcucacucauuuaaaguuuaaguauccagcacugaaugugaccaugcccaacaacgagcaguucgacaaacuuuacauuuggggaguccaccauccuggcacagauaaugaccagaucuuuuuguaugcccaagcuagcggccguauuacugugucuaccaagagaucccagcagacaguaaucccaaacauagggucaaggccccggguucgcaauauuccuagcagaaucaguauuuacuggaccaucgugaaaccaggagauguccugcuaaucaacucuacggguaaucucauugccccgaggggcuacuucaagauacgguccgggaaaagcucgaucaugcgcucugacgcgcccauuggaaaguguaacuccgaaugcaucacuccuaauggcucaauaccaaacgacaagcccuuucagaaugugaaccgaauuacauauggugcauguccuagauacgugaaacaaaauacccugaagcuggccacugggaugaggaacgucccagagaaacagacacggggaaucuucggcgcuaucgccggcuuuauugaaaaugggugggagggaaugguugaugguugguauggcuuccgucaccagaacagugaggggcgcggacaagcagcugaccuuaagagcacccaggccgcgaucgaucagauuaauggcaaauugaacagacucauagguaagacgaacgaaaaauuccaccagaucgagaaggaauuuuccgagguggaagggaggauucaagaccuggagaaguacguagaggauaccaaaaucgacuuauggucuuauaaugccgaacugcucguggcacuugagaaccagcauacaaucgaucugacugacagcgaaaugaauaaguuguucgagaaaaccaagaaacagcuacgggaaaacgcugaggauaugggcaauggaugcuuuaagauuuaccacaagugugacaacgccugcauaggcucaauccgaaaugggacauaugaucaugacgucuaccgcgacgaggcucugaacaauagauuccagauuaaaggaguggaacucaagagugguuacaaagauuggauccuguggauuuccuuugccaucagcugcuuccuucuguguguugcauugcucggcuuuauaaugugggccugccaaaaggggaacaucagguguaauauuugcaucuga

SEQ ID NO: 130570 - RNA, 1701 nt, Artificial Sequence; identical to SEQ ID NO: 130482
  derived and/or modified CDS sequence (opt3) from hemagglutinin__InfluenzaA__ACL12228

SEQ ID NO: 130571 - RNA, 1701 nt, Artificial Sequence; identical to SEQ ID NO: 130482
  derived and/or modified CDS sequence (opt3) from hemagglutinin__InfluenzaA__ACL12239

SEQ ID NO: 130572 - RNA, 1701 nt, Artificial Sequence
  derived and/or modified CDS sequence (opt3) from hemagglutinin__InfluenzaA__ACL12250
augaagaccaucauugcccugagcuacauacucugccuuguguucgcucagaaauuucccggcaacgacaauuccacagcaacucuguguuuggggcaccaugccgucccuaacggaacgaucguuaagaccauuacaaaugaucaaaucgaggugacuaacgcgaccgaauuaguacagucuucaaguacaggugagauuugcgacagcccacaccagauccuggauggcgaaaauuguacccuaauagacgcucuccugggggauccgcagugcgacggauuccaaaacaaaaauugggaucuuuuuguggagagauccaaggccuauucuaacuguuaccccuaugacgucccugauuacgugucgcugaggucauugguugcaagcaguggcacucucgaguucaauaacgaauccuuuaauuggacaggugugacccagaacgggacgucuagcgccugcauccggcgcuccaauaacucauucuuuagucgacugaauuggcugacucauagcaaauucaaguauccagcucucaacgucaccaugcccaacaaugagaacuuugacaaguuauacauuuggggagugcaccauccuggcacagauaaugaccagaucuuccuguaugcacaggccucuggccguauuacuguauccaccaaaagaucacaacagacaguuaucccaaacauagggagcaggccccgggugcgcaauauuccuaguagaaucucuauuuacuggaccaucgucaagccaggagauauccuuuugauuaacuccacggguaaucugauagcuccgaggggcuacuuuaaaauccggagcgggaagucgucuauuaugcgcuccgacgcccccaucggaaaauguaacucagaaugcauaacuccuaauggcaguauuccaaacgacaagcccuuccagaaugugaaccgaaucacauauggugcguguccuagauacgugaagcagaauacccuaaaacucgcaacugggaugaggaacgucccagagaagcaaacacggggaaucuuuggcgccauugcuggcuucaucgaaaaugggugggagggaaugguugaugguugguauggcuuccgucaccagaacagcgaggggauuggacaggccgcagaccugaaauccacccaagcugccauagaucagaucaacggcaaacuuaaucgccugauugguaagacgaacgaaaaguuucaccagaucgagaaagaguucucugaaguggaagggagaauccaggacuuggagaaguacguagaggauaccaagauugaccucuggagcuauaaugcggaacuguuaguggcccuggagaaccaacauacaauagaucucacugacucagaaaugaauaaacuuuuugagaagaccaaaaagcagcugagggaaaacgcagaggauaugggcaauggaugcuucaaaaucuaccacaagugugacaacgcuugcauuggcaguauccggaaugggacauaugaucaugacgucuaccgagacgaggccuugaacaaucgcuuucagauuaagggaguggaacuaaaauccgguuacaaggauuggauccuguggaucagcuucgcuauaucuugcuuucuccuguguauugcccuucugggcuucaucaugugggcaugccagaaagggaacauuagauguaauaucugcauauga

SEQ ID NO: 130573 - RNA, 1701 nt, Artificial Sequence
  derived and/or modified CDS sequence (opt3) from hemagglutinin__InfluenzaA__ACL12261
augaaggccaaacugcucgugcuucugugcgcuuucaccgcaacagacgccgauacuaucuguauuggcuaccacgcgaacaauagcacggacaccgucgauacaguuuuggagaagaacgugacuguaacccauuccgugaauuuacuggaagacucucacaacgggaaacuaugcagacucaagggaauagcuccccugcagcuugguaauuguucaaucgccggcuggauucuggggaacccugagugcgaaaguuuguuuagcaaaaaguccuggucuuauaucgcagagacaccaaauucggaaaacggaaccuguuacccgggcuauuucgccgauuacgaggagcucagggaacaacugucaagcgucaguuccuuugagcgguucgaaauuuuucccaaggagucuagcuggccuaaucauacugugacaaaagguguuaccgcugcaugcucccacaaggggcgcucaaguuucuaucgaaaccugcucugguuaacggagaaaaauggacuguacccaaaccuuagcaagucuuaugugaauaacaaagaaaaggaggucuuggugcuguggggcguacaucaccccuccaauaucggcgaccagcgugccauauaccacacugaaaacgcuuacguuucaguggucagcagucauuauaacagaagguuuaccccugagaucgccaagcggccaaaagugcgcgggcaggaaggaagaauuaauuacuauuggacacuacucgagcccggugauacuaucauuuucgaggcgaacggcaaucugaucgcaccuugguacgccuuugcucuuucuaggggguucggauccggcauaauuaccagcaacgccucgauggacgaaugugaugcaaagugccagacaccacaaggugcuaucaauucuucccugccguuucagaacgugcaccccgucaccauuggggaguguccuaaauauguucggucaacgaaguugcgcauggugacuggacuccgaaauaucccaaguauccagagcagaggccuguucggcgccauugcgggguuuauagaaggagguuggacaggcaugaucgacgggugguacggauaucaucaccagaacgagcaaggcuccgguuacgccgcagaucagaaaucuacccagaaugcuauuaacgggaucacuaauaagguaaacagcgugauagaaaagaugaauacacaguucaccgccgucggcaaagaguucaacaaguuagagaaaaggauggaaaaucugaacaagaaaguggacgauggauuucucgacauuuggacguacaacgcugagcuucugguuuugcuagaaaaugagcggacccuggacuuccacgauucaaacgugaagaaucucuaugaaaaagucaagaaccaacugaagaauaacgccaaagagaucggcaaugggugcuuugaguucuaccauaaguguaacaaugaaugcauggagagugugaaaaacggaacauaugacuaccccaaguauuccgaagagagcaaacuuaaucgugagaagaucgaugguguaaagcuggaaucuaugggcguuuaccagauuuuggcaaucuauucaacuguggccaguagccucguccuguuagugucccugggggcuauuucuuuuuggaugugcucgaacggaagccuacagugucgcauaugcaucuga

SEQ ID NO: 130574 - RNA, 1689 nt, Artificial Sequence
  derived and/or modified CDS sequence (opt3) from hemagglutinin__InfluenzaA__ACN32272
auggccaucauuuaccugauacuccuuuucaccgcugugagaggcgaccagaucugcauuggguaucacgcaaacaauagcacagagaagaucgauacuauucuggaaaggaacgucacgguuacccaugccaaagacaucuuggagaagacacacaauggaaaauuauguaagcugaacgguauacccccucuagaacucggcgauugcuccaucgcgggguggcugcuuggaaauccagagugugaccggcuguugcgcgugccggaauggucuuacauuauggagaaagagaacccccgauauucacucugcuacccuggcaguuuuaaugauuaugaagaacugaagcaucugcucagcuccguaaagcacuucgaaaaagugaagaucuuaccaaaagaccguuggacucaacauaccacaaccggugggucuauggcuugugccgucucgggaaagcccucauuuuucagaaacaugguguggcugacuacaaaaggcccuaauuacccaguugcacagggcagcuauaacaauaccaguggggagcagaugcuuauuaucuggggagugcaccaccccaacgaugaggccgaacagagggcuuuguaccaaaaugucgguacguacguguccgcaucuacuagcacccuguauaagcgguccauaccugagauugccgcucgcccaaagguaaacggccuagggucaagaauggaauuuaguuggacacuccuggacaugugggauacuaucaauuucgagagcaccggaaaccuuguugccccggaauacggcuuuaaaauuucuaagagggguuccucagggaucaugaaaacagagggaacccuggagaacugcgaaacgaagugucagacucccuugggcgcgaucaauacaacccucccuuuccauaacgugcacccacugacuauuggcgagugccccaaauaugucaagagcgaaaaauuagugcuggcaacagggcuccggaaugugccucagauagagagucgcggacuuuuuggugccaucgcuggcuucauugaagggggauggcagggcauggucgacgguugguacggguaucaucacucuaacgaucaaggcuccggauacgccgcagacaaggagagcacccagaaggcuuuugauggcaucacgaauaaaguuaacucggugauagagaagaugaauacccaguucgaagccguagggaaagaguuuucuaaccuggaaaagcgauuggagaaucuaaacaaaaagauggaagacggauuccuggacguguggacauauaaugcggagcuccugguccuuauggagaacgaaagaacucuggauuuccacgacuccaaugugaagaacuuguacgauaaaguuaggaugcagcuccgggacaaugugaaggagcuggguaacggcuguuuugaguucuaccauaaaugcgauaacgaguguauggacucagucaagaaugggaccuaugauuacccaaaauaugaggaagagaguaaguuaaaccguaaugaaauuaagggagugaaacugagcuccaugggcguauaccaaauccuagccaucuaugcaacaguugcugguucucucagccuggccauuaugauggcugggaucucauuuuggaugugcaguaacggcucccuucagugccgcauuuguauauga

SEQ ID NO: 130575 - RNA, 1701 nt, Artificial Sequence
  derived and/or modified CDS sequence (opt3) from hemagglutinin__InfluenzaA__ACN32283
augaagaccaucauugcccugagcuacauacucugccuuguguccgcucagaaauuccccggcaacgacaauucuacagcaacucuguguuuggggcaccaugccgucccuaacggaacgaucguuaagaccauuacaaaugaucaaaucgaggugacuaacgcgaccgaauuaguacagucaaguagcacaggugagauuugcgacuccccacaccagauccuggauggcgaaaauuguacccuaauagacgcucuccugggggauccgcagugcgacggauuucaaaacaaaaagugggaucuuuucguggagagaucuaaagccuauucgaauuguuaccccuaugacgucccugauuacgcaucacugaggagcuugguggccaguuccggcacucucgaauuuaacaaugagucuuucaacuggacagguguuacccagaaugggacgagcuccgcuugcauccggcgcucaaacaauagcuuuuucagccgacugaacuggcugacucaucucaaguuuaaguauccagcauuaaaugugaccaugcccaacaacgaggaguucgacaaacuguacauuuggggaguccaccauccuggcacagauaaugaccagaucuuucuuuaugcccaggcuucuggccguauuacuguguccaccaagagaucacaacagacaguaaucccaaacauagggagcaggccccggguucgcaauauuccuaguagaaucucuauuuacuggaccaucgugaaaccaggagauaucuugcugauuaacuccacggguaaucuaauagccccgaggggcuacuucaagauccggagcgggaaaucgucuauuaugcgcuccgacgcgcccaucggaaaguguaacucagaaugcauaacuccuaauggcaguauuccaaacgacaagcccuuucagaaugucaaccgaaucacauauggugcauguccuagauacgugaaacagaauacccucaagcuggccacugggaugaggaacgugccagaaaaacaaacacggggaaucuucggcgcuauugccggcuuuaucgagaaugggugggagggaauggucgaugguugguauggcuuccgucaccagaacagcgaagggauuggacaggcagcugaccuuaaguccacccaagccgcgauagaucagaucaauggcaaacugaaccgcuugauugguaagacgaacgagaaauuccaccagaucgaaaaggaguuuucugaaguugaggggagaauccaggaccucgagaaguacguggaagauaccaaaauugaccuguggagcuauaaugccgaguuacugguagcacucgaaaaccaacauacaauagaucuuacugacucagagaugaauaagcuguucgagaaaaccaagaaacaguugagggaaaacgcugaggauaugggcaauggaugcuuuaagaucuaccacaagugugacaacgccugcauuggcaguauccggaaugggacauaugaucaugacguguaccgagacgaagcucuaaacaaucgcuuccagauuaaaggagucgagcugaaguccgguuacaaagauuggauccucuggauaaguuuugccaucucuugcuuccugcuuuguguggcacuguugggcuuuauuaugugggccugccagaaggggaacaucagauguaauauuugcaucuga

SEQ ID NO: 130576 - RNA, 1701 nt, Artificial Sequence
  derived and/or modified CDS sequence (opt3) from hemagglutinin__InfluenzaA__ACN32474
augaagaccaucauugcccugagcuacauacucugccuuguguccgcucagaaacugcccggcaacgacaauucuacagcaacuuuguguuuagggcaccaugccgucccuaacggaacgaucguuaagaccauuacaaaugaucaaaucgaggugacuaacgcgaccgaacugguacagucaaguagcacaggugagauuugcgacuccccacaccaggugcuagauggcgaaaauuguacccucaucgacgcucugcuuggggauccgcagugcgacggauuccaaaacaaaaagugggaucuguuugucgagagaucuaaagccuauucgaauuguuaccccuaugacgugccugauuacacuucauugaggagccucguugcaaguuccggcacacuggaguucaacaaugaaucuuuuaacuggaccggugugacgcagaaugggacuagcuccgccugcauacggcgcucaaacaauaguuucuuuagccgacugaacuggcucacccauuuaaaguucaaguauccagcucugaauaugacaaugcccaacaacgaggaauuugacaaacuuuacaucuggggaguccaccauccuggcacugauaaugaccagauuuucuuguaugcacaggccucuggccguaucaccguguccacaaagagaucacaacagaccguaauuccaaacaucgggagcaggccccggguucgcaauauaccuaguagaauuucuaucuacuggacgauugugaaaccaggagauauccugcuaaucaacuccacugguaaucucauugcuccgaggggcuacuuuaagauacggagcgggaaaucgucuaucaugcgcuccgacgcccccauuggaaaguguaacucagagugcaucacaccuaauggcaguauaccaaacgacaagcccuuccagaaugucaaccgaauuaccuauggugcguguccuagauacgugaaacagaauacucugaaacuugcaacagggaugaggaacgugccagaaaaacaaacccggggaaucuuuggcgccaucgcuggcuucauugagaaugggugggagggaauggucgaugguugguauggcuuucgucaccagaacagcgaagggaucggacaggccgcagaccugaaguccacgcaagcugccauugaucagauaaauggcaaauugaaccgccucaucgguaagaccaacgagaaauuccaccagauugaaaaggaguucucugaaguugaggggagaauccaggaccuggagaaguacguggaagauacaaaaaucgacuuauggagcuauaaugcggagcugcucguagcccuugaaaaccaacauacuauugaucugaccgacucagagaugaauaaguuguuugaaaagacaaagaaacagcuaagggagaacgcagaggauaugggcaauggaugcuucaagauauaccacaagugugacaacgcuugcaucggcaguauucggaaugggacuuaugaucaugaaguguaccgagacgaggcccugaacaaucgcuuucagaucaaaggagucgaacucaaguccgguuacaaagacuggauucuguggaucagcuucgcuauaucuugcuuucuucuguguguggccuugcucggcuucaucaugugggcaugccagaaggggaacauuagauguaauaucugcauuuga

SEQ ID NO: 130577 - RNA, 1698 nt, Artificial Sequence; identical to SEQ ID NO: 130536
  derived and/or modified CDS sequence (opt3) from hemagglutinin__InfluenzaA__ACN32501

SEQ ID NO: 130578 - RNA, 1701 nt, Artificial Sequence
  derived and/or modified CDS sequence (opt3) from hemagglutinin__InfluenzaA__ACN32534
augaagaccaucauugcccugagcuacauacucugccuuguguucgcucagaaacugcccggcaacgacaauuccacagcaacuuuguguuuagggcaccaugccgucccuaacggaacgcugguuaagaccaucacaaaugaucaaauugaggugacuaacgcgaccgaauugguacagucuucaaguacagguagaaucugcgacagcccacaccagauucucgauggcgagaauuguacccugaucgacgcccuucugggggauccgcauugcgacggauuucagaacaaagaaugggauuuguucguggagagguccaaggcuuauucuaauuguuaccccuaugacgucccugauuacgugucgcuccggucacugguugcaagcaguggcacucuggaauuuaacaaugaguccuucaacuggacagguguggcccaaaaugggaccucuagcgcuugcaaacgccgauccgacaagucauuuuucagucgucucaacugguuacaccagcugaaguauaaauacccagcacuuaaugucacgaugcccaacaaugagaaguuugauaaauuguauauauggggagugcaucacccuggcacugacagcgaucagaucucucuguacgcccaggcuuccggcagaguaaccguuucaacaaagaggagccaacagacugugauuccaaacaucgggaguggacccuggguccggggugugucuucccgcauuagcaucuacuggaccauagugaaaccuggcgacauucuacucaucaacucgacagggaaucugauugccccaagaggauauuucaagaucaggucuggcaaguccucaaucaugcggagugacgcgccgauugguaaauguaacagcgaaugcauaacccccaauggguccaucccuaacggaaagccauuucagaaugucaaccgcauuacguacggcgcauguccccgauauguuaaacagaauacucuuaagcuggccacaggcaugagaaacgugccugagaaacaaaccagggggaucuucggagcuauagccgguuuuauugaaaauggcugggaggggaugauggauggaugguacggcuuccggcaccagaacucugaggguacugggcaggcagcugaccuaaagagcacacaagccgcgaucaaucagaucaacggcaaacucaaucgucugauugaaaagaccaacgagaaguuucaucagaucgaaaaagaguucucagaaguagagggacgcauucaggauuuagagaaguauguggaagacacgaaaauagaucuguggaguuacaaugccgagcuccuugucgcacuggaaaaccaacacaccaucgacuugacagauuccgagaugaacaagcuauucgaaagaacuaaaaagcagcugagggagaaugcugaggacaugggcaacgggugcuuuaagauuuaucauaaaugugauaaugccugcaucggaagcauccggaacgguaccuacgaccacgauguguaccgagacgaagcucucaauaaccgcuuccagauuaagggcguugagcugaaaucuggguauaaggacuggauacuuuggaucucauuugccauuaguugcuuccuguuguguaucgugcuccugggauuuauuaugugggcaugccagaaaggcaauaucagauguaacauaugcaucuga

SEQ ID NO: 130579 - RNA, 1701 nt, Artificial Sequence
  derived and/or modified CDS sequence (opt3) from hemagglutinin__InfluenzaA__ACN32545
augaagaccaucauugcccugagcuacauacucugccuuguguucgcucagaaacugcccggcaacgacaauuccacagcaacuuuguguuuagggcaccaugccgucccuaacggaacgaucguuaagaccauuacaaaugaucaaaucgaggugacuaacgcgaccgaacugguacagucuucaaguacaggugagauuugcgacagcccacaccagauccuagauggcgaaaauuguacccucauagacgcucugcuuggggauccgcauugcgacggauuucagaacaaaaagugggaucuguucguggagagauccaaagccuauucuaauuguuaccccuaugacgucccugauuacgcaucguugaggucacucaucgccagcaguggcacucuggaauuuaacaaugaguccuucaacuggacaggugugacccaaaaugggacgucuagcgcuugcauucggcgcuccaacaauucauuuuucagucgacugaacuggcucacucacuuaaaguuuaaguauccagcacugaauguuaccaugcccaacaacgagaaauucgacaaguuguacaucuggggagugcaucacccuggcacagauaaugaccagauuuuucuuuaugcccaggcuagcggccguaucacugucucuaccaaaagaucccagcaaacagugauaccaaacauugggucaaggccccggguacgcaauaucccuagcagaauuaguaucuacuggaccaucguuaagccaggagauauucugcuaauaaacucuacggguaaucucaucgccccgaggggcuacuucaaaauucgguccggaaagagcucgaucaugcgcucugacgcgcccauagggaaguguaacuccgaaugcauuacuccuaauggcucaaucccaaacgacaaacccuuucagaaugugaaccgaaucacauauggugcauguccuagauacgucaagcagaauacccugaaacuugccacugggaugaggaacgugccagagaagcagacacggggaauuuucggcgcuaucgccggcuuuauugaaaaugggugggagggaaugguggaugguugguauggcuuccgucaccaaaacagugaggggauaggacaggcagcugaccugaaaagcacccaggccgcgaucgaucaaauuaauggcaaguugaaccgccucaucgguaaaacgaacgaaaaguuccaucagaucgagaaggaauuuuccgaggucgaagggaggauucaggaccuggagaaauacguugaggauaccaagauagacuuauggucuuauaaugccgaacugcucguggcacuugagaaccagcacacaaucgaucugacugacagcgaaaugaauaaauuguucgagaagaccaaaaagcaacuaagagaaaacgcugaggauaugggcaauggaugcuuuaagauuuaccauaaaugugacaacgccugcaucggcucaauucggaaugggacauaugaucacgacguauaccgagacgaggcucugaacaaucgcuuccagaucaagggaguggaacucaaaagugguuacaaggauuggauacuguggaucuccuuugccauuagcugcuuccuucugugugucgcauugcucggcuuuaucaugugggccugccagaaagggaacauuagauguaauaucugcauauga

SEQ ID NO: 130580 - RNA, 1698 nt, Artificial Sequence
  derived and/or modified CDS sequence (opt3) from hemagglutinin__InfluenzaA__ACN32793
augaaggugaaacugcucguccuucugugcaccuucacagccacuuacgcugacacgaucuguauuggcuaucacgcaaacaauagcaccgauacaguugacacuguguuggagaagaacguaaccgugacacauuccgucaauuuacuggaagauucucacaacgggaaacuaugccuccugaagggaauagcgccccuucagcuggguaauuguucaguggccggcuggaucuuggggaacccugagugcgaacuccugauuaguaaagagagcugguccuacaucguugaaaccccaaauccggagaacggaacuuguuaucccggcuacuuugcugacuaugaggaacugagagagcaacucucuucggugagcucauucgaaagguuugagauuuucccuaaggagaguuccuggccaaaucauacagucaccggugugucugccagcugcucccacaacgggaagucaaguuuuuaccggaauuuacuguggcuuacgggaaagaacggcuuguaucccaaucugagcgaaucuuacgcaaacaauaaggagaaagaaguucuaguacucuggggcgugcaucacccuccaaacaucggggaucagcgcgcccuguaccacacugagaacgcuuaugucuccguggugucaagccauuacagucgacguuucacccccgaaauagcaaagagaccuaaagucagggaccaggagggacggaucaauuauuacuggacacuucuggagccaggugauacuauuaucuuugaagccaacggcaauuugauugcuccgcgcuucgccuuugcgcucucuagaggguucggauccggcaucauaaccagcaacgcacccauggacgagugugaugccaagugccagacaccucaaggugcuauuaauucgucucugccauuucagaacguucaccccgugaccaucggggaauguccuaaguauguaagguccacgaaauuacggauggugacuggacugcgcaauauuccaucaauccagagucgaggccucuucggcgccaucgcaggguuuauugagggagguuggacaggcauggucgacgggugguacggauaucaucaccagaacgaacaaggcagcgguuacgcugccgaucagaaguccacccagaaugcgauaaacgggaucacuaauaaagugaacucuguuauugagaagaugaauacacaguucaccgccgugggcaaagaguucaacaaacuugaaagaaggauggagaaucugaacaaaaaggucgacgauggauuuuuggacaucuggacguacaacgcagaacuacuggugcuccuggagaaugaacggacccuugacuuccacgauagcaacguaaagaaucuguaugagaaaguuaagucacaauugaaaaacaaugcuaaggagauaggcaacgggugcuuugaguucuaccauaaauguaaugacgaaugcauggaaagugugaagaacggaacauaugauuaccccaaguauuccgaggagagcaaacucaaucgugaaaagauugacggugucaaacuggagucuaugggcguguaccagaucuuagccaucuauucaacugucgcuaguagccuggugcuacucguuucccugggggccauuucuuuuuggaugugcucgaacggaagccuucagugucgcaucugcauuuga

SEQ ID NO: 130581 - RNA, 1698 nt, Artificial Sequence; identical to SEQ ID NO: 130005
  derived and/or modified CDS sequence (opt3) from hemagglutinin__InfluenzaA__ACN32804

SEQ ID NO: 130582 - RNA, 1698 nt, Artificial Sequence; identical to SEQ ID NO: 129993
  derived and/or modified CDS sequence (opt3) from hemagglutinin__InfluenzaA__ACN32815

SEQ ID NO: 130583 - RNA, 1698 nt, Artificial Sequence; identical to SEQ ID NO: 130003
  derived and/or modified CDS sequence (opt3) from hemagglutinin__InfluenzaA__ACN32826

SEQ ID NO: 130584 - RNA, 1701 nt, Artificial Sequence; identical to SEQ ID NO: 130482
  derived and/or modified CDS sequence (opt3) from hemagglutinin__InfluenzaA__ACN32848

SEQ ID NO: 130585 - RNA, 1701 nt, Artificial Sequence
  derived and/or modified CDS sequence (opt3) from hemagglutinin__InfluenzaA__ACN32870
augaagaccaucauugcccugagcuacauacucugccuuguguucgcucagaaauuucccggcaacgacaauuccacagcaacucuguguuuggggcaccaugccgucccuaacggaacgaucguuaagaccauuacaaaugaucaaaucgaggugacuaacgcgaccgaauuaguacagucuucaaguacaggugagauuugcgacagcccacaccagauccuggauggcgaaaauuguacccuaauagacgcucuccugggggauccgcagugcgacggauuccaaaacaaaaauugggaucuuuuuguggagagauccaaggccuauucuaacuguuaccccuaugacgucccugauuacgcaucgcugaggucauugguggccagcaguggcacucucgaguucaauaacgaauccuuuaauuggacagguguuacccagaacgggacgucuagcgcuugcauccggcgcuccaauaacucauucuuuagucgacugaauuggcugacucauagcaaauucaaguauccagcacucaacgugaccaugcccaacaaugagaacuuugacaaguuauacauuuggggaguccaccauccuggcacagauaaugaccagaucuuccuguaugcccaggcuucuggccguauuacuguguccaccaaaagaucacaacagacaguaaucccaaacauagggagcaggccccggguucgcaauauuccuaguagaaucucuauuuacuggaccaucgugaagccaggagauauccuuuugauuaacuccacggguaaucugauagccccgaggggcuacuuuaaaauccggagcgggaagucgucuauuaugcgcuccgacgcgcccaucggaaaauguaacucagaaugcauaacuccuaauggcaguauuccaaacgacaagcccuuccagaaugucaaccgaaucacauauggugcauguccuagauacgugaagcagaauacccuaaaacucgccacugggaugaggaacgugccagagaagcaaacacggggaaucuuuggcgcuauugccggcuucaucgaaaaugggugggagggaauggucgaugguugguauggcuuccgucaccagaacagcgaggggauuggacaggcagcugaccugaaauccacccaagccgcgauagaucagaucaacggcaaacuuaaucgccugauugguaagacgaacgaaaaguuucaccagaucgagaaagaguucucugaaguugaagggagaauccaggacuuggagaaguacguggaggauaccaagauugaccucuggagcuauaaugccgaacuguuaguagcacuggagaaccaacauacaauagaucucacugacucagaaaugaauaaacuuuuugagaagaccaaaaagcagcugagggaaaacgcugaggauaugggcaauggaugcuucaaaaucuaccacaagugugacaacgccugcauuggcaguauccggaaugggacauaugaucaugacguguaccgagacgaggcuuugaacaaucgcuuucagauuaagggagucgaacuaaaauccgguuacaaggauuggauccuguggaucagcuucgccauaucuugcuuucuccuguguauugcacuucugggcuucaucaugugggccugccagaaagggaacauuagauguaauaucugcauauga

SEQ ID NO: 130586 - RNA, 1701 nt, Artificial Sequence; identical to SEQ ID NO: 130585
  derived and/or modified CDS sequence (opt3) from hemagglutinin__InfluenzaA__ACN32892

SEQ ID NO: 130587 - RNA, 1701 nt, Artificial Sequence; identical to SEQ ID NO: 130482
  derived and/or modified CDS sequence (opt3) from hemagglutinin__InfluenzaA__ACN32903

SEQ ID NO: 130588 - RNA, 1701 nt, Artificial Sequence
  derived and/or modified CDS sequence (opt3) from hemagglutinin__InfluenzaA__ACN32914
augaagaccaucauugcccugagcuacauacucugccuugcuuucgcacagaaacugcccggcaacgacaauuccacagccacuuuguguuuagggcaccaugcggugccuaacggaacgaucgucaagaccauuacaaaugaucaaaucgagguuacuaacgcuaccgaacuggugcagucuucaaguacaggugagauuugcgacagcccacaccagauccuagauggcgaaaauuguacccucauagacgcccugcuuggggauccgcagugcgacggauuucaaaacaaaaagugggaucuguucguagagagauccaaagcauauucuaauuguuaccccuaugacgugccugauuacgccucguugaggucacucgucgcuagcaguggcacucuggaauuuaacaaugaguccuucaacuggacaggugugacccagaaugggacgucuagcgcaugcauccggcgcuccaacaauucauuuuucagucgacugaacuggcucacucauuuaaaguuuaaguauccagcccugaauguuaccaugcccaacaacgagcaguucgacaaacuuuacauuuggggagugcaccauccuggcacagauaaugaccagaucuuuuuguaugcucaagccagcggccguauuacugucucuaccaagagaucccagcagacagugaucccaaacauagggucaaggccccggguacgcaauauuccuagcagaaucaguauuuacuggaccaucguuaaaccaggagauauccugcuaauuaacucuacggguaaucucauagcgccgaggggcuacuucaagauccgguccgggaaaagcucgauuaugcgcucugacgcacccaucggaaaguguaacuccgaaugcauaacuccuaauggcucaauuccaaacgacaagcccuuucagaaugugaaccgaaucacauauggugccuguccuagauacgucaaacaaaauacccugaagcuggcuacugggaugaggaacgugccagagaaacagacacggggaaucuucggcgccauugcaggcuuuaucgaaaaugggugggagggaaugguggaugguugguauggcuuccgucaccagaacagugaggggcgcggacaagcugccgaccuuaagagcacccaggcggccauugaucagauaaauggcaaauugaacagacucaucgguaagacgaacgaaaaauuccaccagauugagaaggaauuuuccgaggucgaagggaggauccaagaccuggagaaguacguugaggauaccaaaaucgacuuauggucuuauaaugcagaacugcucguggcucuugagaaccagcauacaauugaucugacugacagcgaaaugaauaaguuguucgagaaaaccaagaaacagcuacgggaaaacgccgaggauaugggcaauggaugcuuuaagauauaccacaagugugacaacgcuugcaucggcucaauucgaaaugggacauaugaucaugacguauaccgcgacgaggcccugaacaauagauuccagaucaaaggaguggaacucaagagugguuacaaagauuggauucuguggaucuccuuugcaauaagcugcuuccuucugugugucgccuugcucggcuuuaucaugugggcuugccaaaaggggaacauuagguguaauaucugcauuuga

SEQ ID NO: 130589 - RNA, 1701 nt, Artificial Sequence; identical to SEQ ID NO: 130482
  derived and/or modified CDS sequence (opt3) from hemagglutinin__InfluenzaA__ACN32925

SEQ ID NO: 130590 - RNA, 1701 nt, Artificial Sequence
  derived and/or modified CDS sequence (opt3) from hemagglutinin__InfluenzaA__ACN32936
augaagaccaucauugcccugagcuacauacucugccuuguguucgcucagaaauuucccggcaacgacaauuccacagcaacucuguguuuggggcaccaugccgucccuaacggaacgaucguuaagaccauuacaaaugaucaaaucgaggugacuaacgcgaccgaauuaguacagucuucaaguacaggugagauuugcgacagcccacaccagauccuggauggcgaaaauuguacccuaauagacgcucuccugggggauccgcagugcgacggauuccaaaacaaaaauugggaucuuuuuguggagagauccaaggccuauucuaacuguuaccccuaugacgucccugauuacgcaucgcugaggucauugguggccagcaguggcacucucgaguucaauaacgaauccuuuaauuggacagguguuacccagaacgggacgucuagcgcuugcauccggcgcuccaauaacucauucuuuagucgacugaauuggcugacucauagcaaauucaaguauccagcacucaacgugaccaugcccaacaaugagaacuuugacaaguuauacauuuggggaguccaccauccuggcacagauaaugaccagaucuuccuguaugcccaggcuucuggccguauuacuguguccaccaaaagaucacaacagacaguaaucccaaacauagggagcaggccccggauuaagaauaucccuagucgcauuucuaucuacuggaccaucguuaaaccaggagauauucuuuugauaaacuccacggguaaucugaucgccccgagaggcuacuuuaagauuaggagcgggaaaucgucuaucaugcgguccgacgcgcccauaggaaaguguaacucagaaugcauuacuccuaauggcaguaucccaaacgacaagcccuuccagaaugugaaccgcaucacauauggugcauguccucgauacgucaaacagaauacccuaaagcucgccacugggaugagaaacgugccagagaaacaaacaaggggaauuuuuggcgcuaucgccggcuucauugaaaaugggugggagggaaugguggaugguugguauggcuuccggcaccagaacagcgaggggauaggacaggcagcugaccugaaguccacccaagccgcgaucgaucagauuaacggcaaacuuaaucgucugaucgguaagacgaacgaaaaauuucaccagaucgagaaggaguucucugaagucgaagggcgcauucaggacuuggagaaguacguugaggauaccaaaauagaccucuggagcuauaaugccgaacuguuaguggcacuggagaaccaacauacaaucgaucucacugacucagaaaugaauaaacuuuuugagaagaccaagaaacagcugagagaaaacgcugaggauaugggcaauggaugcuucaagauuuaccacaagugugacaacgccugcaucggcaguauuaggaaugggacauaugaucaugacguauaccgggacgaggcuuugaacaaucgauuucagaucaaaggaguggaacuaaaguccgguuacaaagauuggauacuguggaucagcuucgccauuucuugcuuucuccuguguaucgcacuucugggcuucauuaugugggccugccagaaggggaacauccgcuguaauauaugcauuuga

SEQ ID NO: 130591 - RNA, 1701 nt, Artificial Sequence; identical to SEQ ID NO: 130482
  derived and/or modified CDS sequence (opt3) from hemagglutinin__InfluenzaA__ACN32947

SEQ ID NO: 130592 - RNA, 1701 nt, Artificial Sequence
  derived and/or modified CDS sequence (opt3) from hemagglutinin__InfluenzaA__ACN32958
augaagaccaucauugcccugagcuacauacucugccuuguguucgcucagaaacugcccggcaacgacaauuccacagcaacuuuguguuuagggcaccaugccgucccuaacggaacgaucguuaagaccauuacaaaugaucaaaucgaggugacuaacgcgaccgaacugguacagucuucaaguacaggugagauuugcgacagcccacaccagauccuagauggcgaaaauuguacccucauagacgcucugcuuggggauccgcagugcgacggauuucaaaacaaaaagugggaucuguucguggagagaaauaaagccuauuccaacuguuaccccuaugacgucccugauuacgcaucuuugaggucgcucguggccucaagcggcacucuggaauuuaauaacgagaguuucaauuggacagguguuacccagaacgggacguccucugcuugcauccggcgcagcaauaacuccuuuuucucacgacugaauuggcucacucauuuaaaguuuaaguauccagcacugaacgugaccaugcccaacaaugagcaguucgacaaacuuuacauuuggggaguccaccauccuggcacagauaacgaccagaucuuuuuguaugcccaagcuaguggccguauuacugugagcaccaagagaucucagcagacaguaaucccaaauauaggguccaggccccggguucgcaacauuccuucaagaaucagcauuuacuggaccaucgugaaaccaggagauauccugcuaauuaauaguacggguaaccucauagccccgaggggcuacuucaagauccggucugggaaauccagcauuaugcgcucggacgcgcccaucggaaaguguaauucugaaugcauaacuccuaacggcuccauuccaaaugacaagcccuuucagaacgucaaucgaaucacauauggugcauguccuagauacgugaaacaaaacacccugaaacuugccacugggaugaggaaugugccagagaagcagacacggggaaucuucggcgcuauugccggcuuuaucgaaaacgggugggagggaauggucgaugguugguauggcuuccgucaccaaaauucagaggggcgcggacaggcagcugaccugaagaguacccaggccgcgauugaucagauaaacggcaaauugaacagacucaucgguaagacgaaugaaaaauuccaccagauugagaaggaauuuagcgagguugaagggaggauccaagaccuggagaaguacguggaggauaccaaaaucgacuuaugguccuauaacgccgaacugcucguagcacuugagaaucagcauacaauugaucugacugacucugaaaugaacaaguuguucgagaaaaccaagaaacagcuacgggaaaaugcugaggauaugggcaacggaugcuuuaagauauaccacaagugugacaaugccugcaucggcagcauucgaaacgggacauaugaucaugacguguaccgcgacgaggcucugaauaacagauuccagaucaaaggagucgaacucaagucagguuacaaagauuggauucuguggaucaguuuugccauauccugcuuccuucuguguguggcauugcucggcuuuaucaugugggccugccaaaaggggaauauuagguguaacaucugcauuuga

SEQ ID NO: 130593 - RNA, 1701 nt, Artificial Sequence
  derived and/or modified CDS sequence (opt3) from hemagglutinin__InfluenzaA__ACN32969
augaagaccaucauugcccugagcuacauacucugccuuguguccgcucagaaacugcccggcaacgacaauucuacagcaacuuuguguuuagggcaccaugccgucccuaacggaacgaucguuaagaccauuacaaaugaucaaaucgaggugacuaacgcgaccgaacugguacagucaaguagcacaggugagauuugcgacuccccacaccaggugcuagauggcgaaaauuguacccucaucgacgcucugcuuggggauccgcagugcgacggauuccaaaacaaaaagugggaucuguuugucgagagaucuaaagccuauucgaauuguuaccccuaugacgugccugauuacgcaucauugaggagccucguugccaguuccggcacucuggaguucaacaaugaaucuuuuaacuggacaggugugacccagaaugggacgagcuccgcuugcauacggcgcucaaacaauaguuucuuuagccgacugaacuggcucacucauucuaaguucaaguauccagcauuaaaugucaccaugcccaacaacgaggaauuugacaaacuguacaucuggggagugcaccauccuggcacagauaaugaccagauuuuccuuuaugcccaggcuuccggccguaucacuguaucaaccaagagaagccaacagacaguuauuccaaacaucgggaguaggccccgggugcgcaauauaccuucuagaauuuccaucuacuggaccauugucaaaccaggagauaucuugcugaucaacagcacggguaaucuaauugccccgaggggcuacuuuaagcuccggucggggaaaucuuccauaaugcgcucagacgcgcccaucggaaaguguaacagugagugcauuacuccuaauggcagcaucccaaacgacaagcccuuccagaaugugaaccgaauaacauauggugcauguccuagauacgugaaacagaauacccugaaacuugccacugggaugaggaacgucccagaaaaacaaacacggggaauuuuuggcgcuaucgccggcuucaucgagaaugggugggagggaaugguugaugguugguauggcuuucgucaccagaacuccgaagggauuggacaggcagcugaccugaagucuacccaagccgcgaucgaucagauuaauggcaaauugaaccgccucauagguaagacgaacgagaaauuccaccagaucgaaaaggaguucagcgaaguggaggggaggauucaggaccuggagaaguacguagaagauaccaaaaucgacuuauggucauauaaugccgagcugcucguggcacuugaaaaccaacauacaaucgaucugacugacagugagaugaauaaguuguuugaaaagaccaagaaacagcuaagagagaacgcugaggauaugggcaauggaugcuucaagauuuaccacaagugugacaacgccugcauaggcuccauccggaaugggacauaugaucaugaagucuaccgagacgaggcucugaacaaucgcuuucagauuaaaggaguggaacucaagagcgguuacaaagacuggauccuguggauuucuuucgccaucucaugcuuucuucuguguguugcauugcucggcuucauaaugugggccugccagaaggggaacaucagauguaauauuugcaucuga

SEQ ID NO: 130594 - RNA, 1701 nt, Artificial Sequence
  derived and/or modified CDS sequence (opt3) from hemagglutinin__InfluenzaA__ACN32980
augaagaccaucauugcccugagcuacauacucugccuuguguucgcucagaaacugcccggcaacgacaauuccacagcaacuuuguguuuagggcaccaugccgucccuaacggaacgaucguuaagaccauuacaaaugaucaaaucgaggugacuaacgcgaccgaacugguacagucuucaaguacaggugagauuugcgacagcccacaccagauccuagauggcgaaaauuguacccucauagacgcucugcuuggggauccgcagugcgacggauuucaaaacaaaaagugggaucuguucguggagagauccaaagcccauucuaauuguuaucccuacgacgucccugauuaugcaucguugaggucacucguggccagcaguggcacucuggaauuuaacaaugaguccuucaacuggacagguguuacccagaaugggacgucuagcgcuugcauccggcgcuccaagaacucauuuuucagucgacugaauuggcucacucacuuaaaguuuaaauacccagcacugaacgugaccaugcccaaugacgagaaguucgauaaacuuuauauuuggggaguccaucacccuggcacagacaacgaucagaucuuuuuguacgcccaggcuagcggccguauuacugugucuaccaagagaucccaacagacaguaaucccaaacauagggucaaggccccggguucgcaauauuccuagcagaaucaguauuuauuggaccaucgugaaaccaggagacauccugcuaauuaacucuacggguaaucucauagccccgaggggcuacuucaagauccgguccggaaagagcucgauuaugcgcucugacgcgcccaucgggaaauguaacuccgaaugcauaacuccuaauggcucaauuccaaacgauaagcccuuucagaaugucaaccgaaucacauacggugcauguccuagauaugugaaacagaauacccugaagcuggccacugggaugaggaacgugccagagaaacaaacacggggaaucuucggcgcuauugccggcuuuaucgaaaaugggugggagggaauggucgacgguugguacggcuuccgucaccagaacagugaggggauuggacaggcagcugaucuuaagagcacccaagccgcgauagaccagaucaauggcaaauugaaccgccucauugguaagacgaaugaaaaguuccaucagaucgagaaagaauuuuccgagguugaagggagaauccaggaucuggagaaguauguggaggacaccaaaauugauuuauggucuuacaacgccgaacugcucguagcacuugagaaccaacacacaauagaccugacugauagcgaaaugaauaaguuguucgagaaaaccaagaagcagcuaagggaaaacgcugaggacaugggcaauggaugcuuuaaaaucuaucauaagugugauaacgccugcgugggcucaauucggaaugggacauacgaccacgacgucuaucgagaugaggcucugaacaaucgcuuccagaucaaaggaguggaacucaagagugguuacaaagacuggauucuguggaucuccuuugccauaagcugcuuccuucuguguguugcauugcucggcuuuaucaugugggccugccagaaggggaacauuagauguaauaucugcauuuga

SEQ ID NO: 130595 - RNA, 1701 nt, Artificial Sequence; identical to SEQ ID NO: 130482
  derived and/or modified CDS sequence (opt3) from hemagglutinin__InfluenzaA__ACN32991

SEQ ID NO: 130596 - RNA, 1701 nt, Artificial Sequence; identical to SEQ ID NO: 130482
  derived and/or modified CDS sequence (opt3) from hemagglutinin__InfluenzaA__ACN33002

SEQ ID NO: 130597 - RNA, 1701 nt, Artificial Sequence; identical to SEQ ID NO: 130482
  derived and/or modified CDS sequence (opt3) from hemagglutinin__InfluenzaA__ACN33013

SEQ ID NO: 130598 - RNA, 1701 nt, Artificial Sequence
  derived and/or modified CDS sequence (opt3) from hemagglutinin__InfluenzaA__ACN33035
augaagaccaucauugcccugagcuacauacucugccuuguguucgcucagaaacugcccggcaacgacaauuccacagcaacuuuguguuuagggcaccaugccgucccuaacggaacgaucguuaagaccauuacaaaugaucaaaucgaggugacuaacgcgaccgaacugguacagucuucaaguacaggugagauuugcgacagcccacaccagauccuagauggcgaaaauuguacccucauagacgcucugcuuggggauccgcagugcgacggauuucaaaacaaaaagugggaucuguucguggagagauccaaagccuauucuaauuguuaccccuaugacgucccugauuacgcaucguugaggucacucguggccagcaguggcacucuggaauuuaacaaugaguccuucaacuggacagguguuacccagaaugggacgucuagcgcuugcauccggcgcuccaacaauucauuuuucagucgacugaacuggcucacucauuuaaaguuuaaguauccagcacugaaugugaccaugcccaacaacgagcaguucgacaaacuuuacgucuggggagugcaccauccuggcacagauaaugaccagaucuuuuuguaugcccaagcuagcggccguauuacuguaucuaccaagagaucccagcagacaguuauuccaaacaucgggucaaggccccgggugcgcaauauaccuagcagaauuaguaucuacuggaccauugucaaaccaggagauauccugcuaaucaacucuacggguaaucucauugccccgaggggcuacuucaagauacgguccgggaaaagcucgaucaugcgcucugacgcgcccauuggaaaguguaacuccgaaugcaucacuccuaauggcucaauaccaaacgacaagcccuuucagaaugugaaccgaauuacauauggugcauguccuagauacgugaaacaaaauacccugaagcuggccacugggaugaggaacgucccagagaaacagacacggggaaucuucggcgcuaucgccggcuuuauugaaaaugggugggagggaaugguugaugguugguauggcuuccgucaccagaacagugaggggcgcggacaagcagcugaccuuaagagcacccaggccgcgaucgaucagauuaauggcaaauugaacagacucauagguaagacgaacgaaaaauuccaccagaucgagaaggaauuuuccgagguggaagggaggauucaagaccuggagaaguacguagaggauaccaaaaucgacuuauggucuuauaaugccgaacugcucguggcacuugagaaccagcauacaaucgaucugacugacagcgaaaugaauaaguuguucgagaaaaccaagaaacagcuacgggaaaacgcugaggauaugggcaauggaugcuuuaagauuuaccacaagugugacaacgccugcauaggcucaauccgaaaugggacauaugaucaugacgucuaccgcgacgaggcucugaacaauagauuccagauuaaaggaguggaacucaagagugguuacaaagauuggauccuguggauuuccuuugccaucagcugcuuccuucuguguguugcauugcucggcuuuauaaugugggccugccaaaaggggaacaucagguguaauauuugcaucuga

SEQ ID NO: 130599 - RNA, 1701 nt, Artificial Sequence; identical to SEQ ID NO: 130482
  derived and/or modified CDS sequence (opt3) from hemagglutinin__InfluenzaA__ACN33046

SEQ ID NO: 130600 - RNA, 1701 nt, Artificial Sequence; identical to SEQ ID NO: 130482
  derived and/or modified CDS sequence (opt3) from hemagglutinin__InfluenzaA__ACN33057

SEQ ID NO: 130601 - RNA, 1701 nt, Artificial Sequence; identical to SEQ ID NO: 130482
  derived and/or modified CDS sequence (opt3) from hemagglutinin__InfluenzaA__ACN33068

SEQ ID NO: 130602 - RNA, 1701 nt, Artificial Sequence; identical to SEQ ID NO: 130585
  derived and/or modified CDS sequence (opt3) from hemagglutinin__InfluenzaA__ACN33079

SEQ ID NO: 130603 - RNA, 1698 nt, Artificial Sequence
  derived and/or modified CDS sequence (opt3) from hemagglutinin__InfluenzaA__ACN33090
augaaggugaaacugcucauccuucugugcaccuucacagccacuuacgcugacacgauuuguauaggcuaucacgcaaacaauagcaccgauacagucgacacuguuuuggagaagaacgugaccguaacacauuccgugaauuuacuggaagauucucacaacgggaaacuaugccuccugaagggaaucgcgccccuucagcuggguaauuguucagucgccggcuggauuuuggggaacccugagugcgaacuccugaucaguaaagagagcugguccuacauuguggaaaccccaaauccggagaacggaacuuguuaucccggcuacuuugcugacuaugaggaacugagagagcaacucucuucgguuagcucauucgaaagguuugagaucuucccuaaggagaguuccuggccaaaucauacagugaccggugucucugccagcugcucccacaacgggaagucaaguuuuuaccggaauuuacuguggcuuacgggcaaaaacggauuguaucccaaucugagcaagucuuacgcaaacaauaaagaaaaggaggugcuaguacucuggggcguucaucacccuuccaacauaggggaucagcgcgcccuguaccacacugaaaacgcuuaugugucagucgugagcagucauuacucucgacguuucaccccagagaucgcaaaaagacccaaggugagggaccaggaaggacggauuaauuauuacuggacacuucuggagccuggugauacuaucauuuuugaggccaacggcaauuugaucgcuccacgcuucgccuuugcgcucuccagaggguucggaagcggcauaauuaccucgaacgcaccgauggacgaaugugaugccaagugccagacaccccaaggugcuaucaauucuucccugccuuuucagaacguccacccaguuaccauuggggagugucccaaauaugugaggucaacgaaguuacggaugguaacuggacugcgcaauaucccuaguauccagagccgaggccucuucggcgccauugcaggguuuauagaaggagguuggacaggcaugguggacgggugguacggauaucaucaccagaacgagcaaggcuccgguuacgcugccgaucagaaaucuacccagaaugcgaucaacgggauuacuaauaaggucaacagcgugaucgaaaagaugaauacacaguucaccgccguuggcaaagaguucaacaaacuugagagaaggauggaaaaucugaacaagaagguggacgauggauuuuuggacauauggacguacaacgcagagcuacugguccuccuggaaaaugagcggacccuugacuuccacgauucaaacgugaaaaaucuguaugaaaagguaaaaagucaauugaagaacaaugcuaaagagauuggcaacgggugcuuugaguucuaccauaaguguaaugacgaaugcauggaguccguuaagaacggaacauaugauuacccaaaauauagcgaagagucuaagcucaaucgugagaaaaucgacggugugaagcuggaaucaaugggcgucuaccagaucuuagccauuuauaguacuguggcuagcucccugguccuacucgugucucugggggccaucucguuuuggaugugcagcaacggaucccuucagugucgcauuugcauauga

SEQ ID NO: 130604 - RNA, 1698 nt, Artificial Sequence; identical to SEQ ID NO: 129962
  derived and/or modified CDS sequence (opt3) from hemagglutinin__InfluenzaA__ACN33101

SEQ ID NO: 130605 - RNA, 1701 nt, Artificial Sequence; identical to SEQ ID NO: 130585
  derived and/or modified CDS sequence (opt3) from hemagglutinin__InfluenzaA__ACN33112

SEQ ID NO: 130606 - RNA, 1698 nt, Artificial Sequence; identical to SEQ ID NO: 130536
  derived and/or modified CDS sequence (opt3) from hemagglutinin__InfluenzaA__ACN33123

SEQ ID NO: 130607 - RNA, 1698 nt, Artificial Sequence; identical to SEQ ID NO: 130536
  derived and/or modified CDS sequence (opt3) from hemagglutinin__InfluenzaA__ACN33145

SEQ ID NO: 130608 - RNA, 1701 nt, Artificial Sequence; identical to SEQ ID NO: 130482
  derived and/or modified CDS sequence (opt3) from hemagglutinin__InfluenzaA__ACN33156

SEQ ID NO: 130609 - RNA, 1701 nt, Artificial Sequence
  derived and/or modified CDS sequence (opt3) from hemagglutinin__InfluenzaA__ACN33178
augaagaccaucauugcccugagcuacauacucugccuuguguucgcucagaaauuucccggcaacgacaauuccacagcaacucuguguuuggggcaccaugccgucccuaacggaacgaucguuaagaccauuacaaaugaucaaaucgaggugacuaacgcgaccgaauuaguacagucuucaaguacaggugagauuugcgacagcccacaccagauccuggauggcgaaaauuguacccuaauagacgcucuccugggggauccgcagugcgacggauuccaaaacaaaaauugggaucuuuuuguggagagauccaaggccuauucuaacuguuaccccuaugacgucccugauuacgcaucgcugaggucauugguggccagcaguggcacucucgaguucaauaacgaauccuuuaauuggacagguguuacccagaacgggacgucuagcgcuugcauccggcgcuccaauaacucauucuuuagucgacugaauuggcugacucauagcaaauucaaguauccagcacucaacgugaccaugcccaacaaugagaacuuugacaaguuauacauuuggggaguccaccauccuggcacagauaaugaccagaucuuccuguaugcccaggcuucuggccguauuacuguguccaccaaaagaucacaacagacaguaaucccaaacauagggagcaggccccggguucgcaauauuccuaguagaaucucuauuuacuggaccaucgugaagccaggagauauccuuuugauuaacuccacggguaaucugauagccccgaggggcuacuuuaaaauccggagcgggaagucgucuauuaugcgcuccgacgcgcccaucggaaaauguaacucagaaugcauaacuccuaauggcaguauuccaaacgacaagcccuuccagaaugucaaccgaaucacauauggugcauguccuagauacgugaagcagaauacccuaaaacucgccacugggaugaggaacgugccagagaagcaaacacggggaaucuuuggcgcuauugccggcuucaucgaaaaugggugggagggaauggucgaugguugguauggcuuccgucaccagaacagcgaggggauuggacaggcagcugaccugaaauccacccaagccgcgauagaucagaucaacggcaaacuuaaucgccugauugguaagacgaacgaaaaguuucaccagaucgagaaagaguucucugaaguugaagggagaauccaggacuuggagaaguacguggaggauaccaagauugaccucuggagcuauaaugccgaacuguuaguagcacuggagaaccaacauacaauagaucucacugacucagaaaugaauaaacuuuuugagaagaccaaaaagcagcugagggaaaacgcugaggauaugggcaauggaugcuucaaaaucuaccacaagugugacaacgccugcauuggcaguauccggaaugggacauaugaucaugacguguaccgagacgaggcuuugaacaaucgcuuucacauuaagggagucgaacuaaaauccgguuacaaggauuggauccuguggaucagcuucgccauaucuugcuuucuccuguguauugcacuucugggcuucaucaugugggccugccagaaagggaacauuagauguaauaucugcauauga

SEQ ID NO: 130610 - RNA, 1701 nt, Artificial Sequence; identical to SEQ ID NO: 130482
  derived and/or modified CDS sequence (opt3) from hemagglutinin__InfluenzaA__ACN33189

SEQ ID NO: 130611 - RNA, 1701 nt, Artificial Sequence
  derived and/or modified CDS sequence (opt3) from hemagglutinin__InfluenzaA__ACN33200
augaagaccaucauugcccugagcuacauacucugccuuguguucgcucagaaauuucccggcaacgacaauuccacagcaacucuguguuuggggcaccaugccgucccuaacggaacgaucguuaagaccauuacaaaugaucaaaucgaggugacuaacgcgaccgaauuaguacagucuucaaguacaggugagauuugcgacagcccacaccagauccuggauggcgaaaauuguacccuaauagacgcucuccugggggauccgcagugcgacggauuccaaaacaaaaauugggaucuuuuuguggagagauccaaggccuauucuaacuguuaccccuaugacgucccugauuacgcaucgcugaggucauugguggccagcaguggcacucucgaguucaauaacgaauccuuuaauuggacagguguuacccagaacgggacgucuagcgcuugcauccggcgcuccaauaacucauucuuuagucgacugaauuggcugacucauagcaaauucaaguauccagcacucaacgugaccaugcccaacaaugagaacuuugacaaguuauacauuuggggaguccaccauccuggcacagauaaugaccagaucuuccuguaugcccaggcuucuggccguauuacuguguccaccaaaagaucacaacagacaguaaucccaaacauagggagcaggccccggguucgcaauauuccuaguagaaucucuauuuacuggaccaucguggaaccaggagauauccuuuugauuaacuccacggguaaucugauagccccgaggggcuacuuuaagauccggagcgggaaaucgucuauuaugcgcuccgacgcgcccaucggaaaguguaacucagagugcauaacuccuaauggcaguauuccaaacgacaaacccuuccagaaugucaaccgaaucacauauggugcauguccuagauacgugaagcagaauacccuaaagcucgccacugggaugaggaacgugccagaaaaacaaacacggggaaucuuuggcgcuauugccggcuucaucgagaaugggugggagggaauggucgaugguugguauggcuuccgucaccagaacagcgaagggauuggacaggcagcugaccugaaguccacccaagccgcgauagaucagaucaacggcaaacuuaaucgccugauugguaagacgaacgagaaauuucaccagaucgaaaaggaguucucugaaguugaggggagaauccaggacuuggagaaauacguggaagauaccaagauugaccucuggagcuauaaugccgagcuguuaguagcacuggaaaaccaacauacaauagaucucacugacucagagaugaauaaacuuuuugaaaagaccaagaaacagcugagggagaacgcugaggauaugggcaauggaugcuucaagaucuaccacaaaugugacaacgccugcauuggcaguauccggaaugggacauaugaucaugacguguaccgagacgaggcuuugaacaaucgcuuucagauuaagggagucgaacuaaaguccgguuacaaagauuggauccuguggaucagcuucgccauaucuugcuuucuccuguguauugcacuucugggcuucaucaugugggccugccagaaggggaacauuagauguaauaucugcauauga

SEQ ID NO: 130612 - RNA, 1701 nt, Artificial Sequence
  derived and/or modified CDS sequence (opt3) from hemagglutinin__InfluenzaA__ACN33211
augaagaccaucauugcccugagcuacauacucugccuuguguucgcucagaaacugcccggcaacgacaauuccacagcaacuuuguguuuagggcaccaugccgucccuaacggaacgaucguuaagaccauuacaaaugaucaaaucgaggugacuaacgcgaccgaacugguacagucuucaaguacaggugagauuugcgacagcccacaccagauccuagauggcgaaaauuguacccucauagacgcucugcuuggggauccgcagugcgacggauuucaaaacaaaaagugggaucuguucguggagagauccaaagccuauucuaauuguuaccccuaugacgucccugauuacgcaucguugaggucacucguggccagcaguggcacucuggaauuuaacaaugaguccuucaacuggacagguguuacccagaaugggacgucuagcgcuugcauccggcgcuccaacaauucauuuuucagucgacugaacuggcucacucauuuaaaguuuaaguauccagcacugaaugugaccaugcccaacaacgagcaguucgacaaacuuuacauuuggggaguccaccauccuggcacagauaaugaccagaucuuuuuguaugcccaagcuagcggccguauuacugugucuaccaagagaucccagcagacaguaaucccaaacauagggucaaggccccggguucgcaauauuccuagcagaaucaguauuuacuggaccaucgugaaaccaggagauauccugcuaauuaacucuacggguaaucucauagccccgaggggcuacuucaagauccgguccgggaaaagcucgauuaugcgcucugacgcgcccaucggaaaguguaacuccgaaugcauaacuccuaauggcucaauuccaaacgacaagcccuuucagaaugucaaccgaaucacauauggugcauguccuagauacgugaaacaaaauacccugaagcuggccacugggaugaggaacgugccagagaaacagacacggggaaucuucggcgcuauugccggcuuuaucgaaaaugggugggagggaauggucgaugguugguauggcuuccgucaccagaacagugaggggcgcggacaagcagcugaccuuaagagcacccaggccgcgauugaucagauaaauggcaaauugaacagacucaucgguaagacgaacgaaaaauuccaccagauugagaaggaauuuuccgagguugaagggaggauccaagaccuggagaaguacguggaggauaccaaaaucgacuuauggucuuauaaugccgaacugcucguagcacuugagaaccagcauacaauugaucugacugacagcgaaaugaauaaguuguucgagaaaaccaagaaacagcuacgggaaaacgcugaggauaugggcaauggaugcuuuaagauauaccacaagugugacaacgccugcaucggcucaauucgaaaugggacauaugaucaugacguguaccgcgacgaggcucugaguaacagauuccagaucaaaggagucgaacucaaguccgguuacaaagauuggauucuguggaucagcuuugccauaucuugcuuccuucuguguguggcauugcucggcuuuaucaugugggccugccaaaaggggaauauuagguguaacaucugcauuuga

SEQ ID NO: 130613 - RNA, 1698 nt, Artificial Sequence; identical to SEQ ID NO: 130004
  derived and/or modified CDS sequence (opt3) from hemagglutinin__InfluenzaA__ACN42981

SEQ ID NO: 130614 - RNA, 1698 nt, Artificial Sequence; identical to SEQ ID NO: 130238
  derived and/or modified CDS sequence (opt3) from hemagglutinin__InfluenzaA__ACN42992

SEQ ID NO: 130615 - RNA, 1701 nt, Artificial Sequence; identical to SEQ ID NO: 130482
  derived and/or modified CDS sequence (opt3) from hemagglutinin__InfluenzaA__ACN43003

SEQ ID NO: 130616 - RNA, 1701 nt, Artificial Sequence
  derived and/or modified CDS sequence (opt3) from hemagglutinin__InfluenzaA__ACN43014
augaagaccaucauugcccugagcuacauacucugccuuguguucgcucagaaauuucccggcaacgacaauuccacagcaacucuguguuuggggcaccaugccgucccuaacggaacgaucguuaagaccauuacaaaugaucaaaucgaggugacuaacgcgaccgaauuaguacagucuucaaguacaggugagauuugcgacagcccacaccagauccuggauggcgaaaauuguacccuaauagacgcucuccugggggauccgcagugcgacggauuccaaaacaaaaauugggaucuuuuuguggagagauccaaggccuauucuaacuguuaccccuaugacgucccugauuacgcaucgcugaggucauugguggccagcaguggcacucucgaguucaauaacgaauccuuuaauuggaucgguguuacacagaacgggaccucuagcgcuugcauucggcgcuccaauaacucauucuuuagucgacugaauuggcugacgcauagcaaauucaaguauccagcacucaacgugacuaugcccaacaaugagaacuuugacaaguuauacaucuggggaguccaccauccuggcaccgauaaugaccagauuuuccuguaugcccaggcuucuggccguaucacaguguccacuaaaagaucacaacagaccguaauaccaaacauugggagcaggccccggguucgcaauaucccuaguagaauuucuaucuacuggacaaucgugaagccaggagauauucuuuugauaaacuccaccgguaaucugaucgccccgaggggcuacuuuaaaauucggagcgggaagucgucuaucaugcgcuccgacgcgcccauaggaaacuguaauucagaaugcauuacgccuaacggcaguaucccaaaugacaaacccuuccagaacgucaaucgaaucacuuaugguagcuguccuagauacgugaagcagaacacacuaaagcucgcaaccgggaugaggaaugugccagagaaacaaacucggggaauuuuuggcgccaucgcuggcuucauugaaaacgggugggagggaauggucgaugguugguauggcuuccgucaccagaacuccgaggggauaggacaggccgcagaccugaagucuacacaagcugccaucgaucagauuaauggcaaacuuaaccgccugaucgguaagaccaaugaaaaauuucaccagaucgagaaggaguucagcgaaguugaagggaggauucaggacuuggagaaauacguggaggauacgaagauagaccucuggucauauaacgcggaacuguuaguagcccuggagaaucaacauaccaucgaucucacagacagugaaaugaacaaacuuuuugagaagacuaagaaacagcugagagaaaaugcagaggauaugggcaacggaugcuucaagauuuaccacaaaugugacaaugcuugcaucggcuccauucggaacgggaccuaugaucaugacguguaccgagacgaggccuugaauaaccgcuuucagaucaagggagucgaacuaaagagcgguuacaaagauuggauacuguggaucucuuucgcuauuucaugcuuucuccuguguaucgcccuucugggcuucauuaugugggcaugccagaaggggaauaucagauguaacauaugcauuuga

SEQ ID NO: 130617 - RNA, 1701 nt, Artificial Sequence; identical to SEQ ID NO: 130482
  derived and/or modified CDS sequence (opt3) from hemagglutinin__InfluenzaA__ACN43025

SEQ ID NO: 130618 - RNA, 1701 nt, Artificial Sequence; identical to SEQ ID NO: 130482
  derived and/or modified CDS sequence (opt3) from hemagglutinin__InfluenzaA__ACN43036

SEQ ID NO: 130619 - RNA, 1701 nt, Artificial Sequence; identical to SEQ ID NO: 130482
  derived and/or modified CDS sequence (opt3) from hemagglutinin__InfluenzaA__ACN43047

SEQ ID NO: 130620 - RNA, 1701 nt, Artificial Sequence
  derived and/or modified CDS sequence (opt3) from hemagglutinin__InfluenzaA__ACN43058
augaagaccaucauugcccugagcuacauacucugccuuguguucgcucagaaacugcccggcaacgacaauuccacagcaacuuuguguuuagggcaccaugccgucccuaacggaacgaucguuaagaccauuacaaaugaucaaaucgaggugacuaacgcgaccgaacugguacagucuucaaguacaggugagauuugcggcagcccacaccagauccuagacggggaaaauuguacccucauagaugcucugcuuggagacccgcagugcgauggcuuucaaaacaaaaagugggaccuguucguggagagauccaaagccuauucuaauuguuaccccuaugaugucccugacuacgcaucguugaggucacucguggccagcagugguacucuggaauuuaacaaugaguccuucaacuggacagggguuacccagaauggaacgucuagcgcuugcauccggcgcuccaacaauucauuuuucagucgacugaacuggcucacucauuuaaaguuuaaguauccagcacugaaugugaccaugcccaacaacgagcaguucgauaaacuuuacauuuggggcguccaccauccuggcacagacaaugaucagaucuuuuuguaugcccaagcuagcgggcguauuacugugucuaccaagagaucccagcagacaguaaucccaaacauaggaucaaggccccggguucgcaauauuccuagcagaaucaguauuuacuggaccaucgugaaaccaggugacauccugcuaauuaacucuacgggcaaucucauagccccgaggggguacuucaagauccgguccggaaaaagcucgauuaugcgcucugaugcgcccaucggcaaguguaacuccgaaugcauaacuccuaaugguucaauuccaaacgacaagcccuuucagaaugucaaccgaaucacauauggggcauguccuagauacgugaaacaaaauacccugaagcuggccacuggaaugaggaacgugccagagaaacagacacggggcaucuucggcgcuauugccggguuuaucgaaaauggaugggaggguauggucgacggcugguauggguuccgucaccagaacagugagggacgcggccaagcagcugaucuuaagagcacccaggccgcgauugaccagauaaaugguaaauugaacagacucaucgggaagacgaacgaaaaauuccaccagauugagaaggaauuuuccgagguugaaggcaggauccaagaucuggagaaguacguggaggacaccaaaaucgauuuauggucuuauaaugccgaacugcucguagcacuugagaaccagcauacaauugaccugacugauagcgaaaugaauaaguuguucgagaaaaccaagaaacagcuacgggaaaacgcugaggacaugggaaauggcugcuuuaagauauaccacaagugugauaacgccugcaucgggucaauucgaaauggaacauaugaccaugauguguaccgcgacgaggcucugaacaauagauuccagaucaaaggugucgaacucaagaguggcuacaaagacuggauucuguggaucuccuuugccauaagcugcuuccuucuguguguggcauugcucggguuuaucaugugggccugccaaaagggaaacauuagguguaauaucugcauuuga

SEQ ID NO: 130621 - RNA, 1701 nt, Artificial Sequence; identical to SEQ ID NO: 130482
  derived and/or modified CDS sequence (opt3) from hemagglutinin__InfluenzaA__ACN43069

SEQ ID NO: 130622 - RNA, 1701 nt, Artificial Sequence; identical to SEQ ID NO: 130585
  derived and/or modified CDS sequence (opt3) from hemagglutinin__InfluenzaA__ACN43080

SEQ ID NO: 130623 - RNA, 1701 nt, Artificial Sequence
  derived and/or modified CDS sequence (opt3) from hemagglutinin__InfluenzaA__ACN72617
auggaggccaagcuguucgugcucuuuugcgcuuucaccgcacuuaaagccgacacaaucugugucggcuaccacgcgaacaauagcacugauacgguugacaccauucuggaaaagaacgugacaguaacucauuccgugaauuuguuagagaacucucacaaugggaaacugugcucacuaaacggaaaggcuccccuccagcuggguaauuguaacgucgccggcuggauacuugggaauccugaaugcgaucuguugcucaccgcaaacaguuggagcuauaucauugagacauccgacucuaaaaauggagccuguuacccaggcgaauuugcugauuaugaggagcugagagaacaacugucgaccgugaguagcuucgagagguuugaaaucuucccgaaggcaacuucauggcccaaccaugagacaaccaaggguacgacuguugccugcucccacucuggggcuaauagcuuuuaccggaaccucuuauggauugugaaaaagggaaauuccuauccuaaacugucaaagaguuacaccaacaacaaaggcaaggagguccuugugaucuggggcguacaucacccacccacagacagcgaucagcagacuuuguaucagaauaagcacaccuacguuucugugggguccucaaaauacuaucaacgcuucacaccugaaauagucacccgaccaaaggugcgugagcaggccggaagaaugaacuacuauuggacgcugcuagaccagggugauacuaucacauuugaagcgaccggcaaucucauugcacccuggcaugccuucgcucugaacaaagggagcaauaguggaaucaugaugucugacgcccacgugcauaacuguacuacaaagugccagaccccucacggcgcacuuaaagguaaucugccauuucaaaacguccacccgauuacgaucggggagugucccaaguacguuaaauccacccaguugaggauggcuacaggacuccggaauauaccuagcauucagucgcgcggccuguucggcgccaucgcgggguuuauugaaggagguuggacuggcaugaucgaugggugguauggauaccaucaccagaacgagcaaggcucugguuaugccgcagacagaaaguccacccagaucgcuauugaugggauaucaaauaaggugaacaguguaaucgagaaaaugaauauucaguucacaagcgugggcaaggaauuuaacaauuuagagaaaaggaucgaaaaccugaacaagaaagucgacgacggauuccucgauguguggacuuacaaugccgagcuucugauauugcuagaaaacgagcggacccuggacuuccaugauuuuaauguuaagaaccucuacgagaaggugaaaucccaacugcgcaauaacgcuaaggaaauuggcaaugggugcuucgaguuuuaucacaaaugugacaacgaaugcauggagucugucaagaauggaacauacaacuauccacgauacagcgaagagucaaaacuuaauagagaggaaaucgauggugugaagcuggagaguguaggcguucaucagaucuuggccauuuauuccaccguggcaagcucucucguccuguuagugucacugggggccaucaguuucuggaugugcagcaacggaucccuacaguguaggauuugcauauga

SEQ ID NO: 130624 - RNA, 1701 nt, Artificial Sequence
  derived and/or modified CDS sequence (opt3) from hemagglutinin__InfluenzaA__ACN72632
augaagaccgugaucgcccugagcuacgucuucugccucguuuuuggccaggaccuucccgggaaaggaaacaauacagcuacucuguguuugggucaccaugcagugccuaacggcacguuaguaaagaccauuacagaugaccaaauagaggugacuaaugccaccgaacugguccagaacuucuccaucgggaaaauuugcaagaauccacacagaauccuagauggagcgaacuguacacucauugacucucugcuuggcgauccgcauugcgacgguuuucagaaugagaaaugggaucuguucaucgaaaggucaaaggcuuuuaguaacuguuaucccuacgacgugccugaguauaccagcuugcggucccucauagccucuucggggacucuggaguucacaaaugaagauuuuaacuggaccggaguuacgcagaauggcggcucaagcgcaugcaagcgcgggccaaacaauaguuucuuuucccgacugaacuggcucuacaaaucuggaaauacuuaucccauguuaaacgugaccaugccuaacagcgacgauuucgacaagcuguacaucugggguguccaccauccauccacagaucgugagcaaacuaaucuuuauauucaggccucaggcaaaaucauugugaguaccaagagaagccagcagacaaucauacccaacauugggucuaggccuuggguacggggauuguccucacgcaucagcauuuacuggaccaucguuaaaccaggcgacauccugauuauaaauaguaacgguaaucuaaucgcuccgagaggguacuuuaagauucaaacgggaaagucuuccgugaugaggagcgacgcacccaucggcacuuguaacuaugaaugcauaacaccuaauggcucgauuccaaacgauaaacccuuccagaaugucaaccggaucaccuacggggccuguccucacuauaucaagcagaauacucucaaacuggcuacaggaaugcgcaacauuccagagcgacagaccagagguaucuuuggcgccauugcgggguucauagaaaauggaugggagggcauggugaacgguugguacggguucaggcaccaaaauucugagggcaucggacaggcagccgaccuuaaguccacgcaggcugccauuaaccaaaucaacggcaaacugaaucgggugaucgaaaagaccaacgagaaauuucaucagauugaaaaggaguucucagaagucgaggggcguauacaggauuuggagcgcuauguugaagacacaaagaucgaucucuggaguuacaaugcagagcuguuaguggcucuggaaaaccagcacacuauugaccucaccgauagcgagaugaauaaacuuuuugaaaagacaagaaaacaacugagggagaacgccgaggacaugggaaaugguugcuucaagaucuaucauaaaugugauaacuccugcauggaaucuauucggaauggcacuuacgaccacaacgaguaccgagaugaagcgguaaauaaccgcuuucagaucaagagcguggaguugaagucaggguauaaagacuggauacuauggaucaguuucgccauuuccugcuuucugcucugugcagucuggcugggauucaucauuugggcuugccagaagggcaauaucagauguaacauaugcauuuga

SEQ ID NO: 130625 - RNA, 1701 nt, Artificial Sequence; identical to SEQ ID NO: 130482
  derived and/or modified CDS sequence (opt3) from hemagglutinin__InfluenzaA__ACN76478

SEQ ID NO: 130626 - RNA, 1701 nt, Artificial Sequence
  derived and/or modified CDS sequence (opt3) from hemagglutinin__InfluenzaA__ACN76489
augaagaccaucauugcccugggcuacauacucugccuugugagcgcucagaaacugcccgggaacgacaauuccacagcaacuuuguguuuaggacaccaugccgucccuaacgguacgaucguuaagaccauuacaaaugaucaaaucgaggugacuaacgcgaccgaacugguacagucuucaaguacaggcgagauuugcgacagcccacaccaggugcuagauggggaaaauuguacccucaucgacgcucugcuuggagauccgcagugcgacggcuuccaaaacaaaaagugggaucuguuugucgagagauccaaagccuauucuaauuguuaccccuaugacgugccugauuacgcaucguugaggucacucguugccagcagugguacucuggaguucaacaaugaauccuuuaacuggacaggggugacccagaauggaacgucuagcgcuugcauacggcgcuccaacaauucauucuuuagucgacugaacuggcucacucauuuaaaguucaaguauccagcacugaaugucaccaugcccaacaacgaggaauuugacaaacuuuacaucuggggcgugcaccauccuggcacagauaaugaccagauuuucuuguaugcccaggcuagcgggcguaucacuguaucuaccaagagaucccaacagacaguuauuccaaacaucggaucaaggccccgggugcgcaauauaccuagcagaauuaguaucuacuggaccauugucaaaccaggugauauccugcuaaucaacucuacgggcaaucucauugccccgaggggguacuuuaagauacgguccggaaaaagcucgaucaugcgcucugacgcgcccauuggcaaguguaacuccgagugcaucacuccuaaugguucaauaccaaacgacaagcccuuccagaaugugaaccgaauuacauauggggcauguccuagauacgugaaacagaauacccugaagcuggccacuggaaugaggaacgucccagaaaaacaaacacggggcaucuuuggcgcuaucgccggguucauugagaauggaugggaggguaugguugauggcugguauggguuucgucaccagaacagugaaggaaucggccaggcagcugaccuuaagagcacccaagccgcgauugaucagauaaaugguaaauugaaccgccucaucgggaagacgaacgagaaauuccaccagauugaaaaggaguucuccgaaguggagggcagaauccaggaccuggagaaguacguagaagauaccaaaaucgacuuauggucuuauaaugccgagcugcucguggcacuugaaaaccaacauacaauugaucugacugacagcgagaugaauaaguuguuugagaaaaccaagaaacagcuaagggaaaacgcugaggauaugggaaauggcugcuucaagauauaccacaagugugacaacgccugcaucgggucaauucggaauggaacauaugaucaugaagucuaccgagacgaggcucugaacaaucgcuuucagaucaaagguguggaacucaagaguggcuacaaagacuggauucuguggaucuccuucgccauaagcugcuuucuucuguguguugcauugcucggguucaucaugugggccugccagaagggaaacauuagauguaauaucugcauuuga

SEQ ID NO: 130627 - RNA, 1701 nt, Artificial Sequence; identical to SEQ ID NO: 130482
  derived and/or modified CDS sequence (opt3) from hemagglutinin__InfluenzaA__ACN76500

SEQ ID NO: 130628 - RNA, 1701 nt, Artificial Sequence; identical to SEQ ID NO: 130482
  derived and/or modified CDS sequence (opt3) from hemagglutinin__InfluenzaA__ACN76511

SEQ ID NO: 130629 - RNA, 1701 nt, Artificial Sequence; identical to SEQ ID NO: 130482
  derived and/or modified CDS sequence (opt3) from hemagglutinin__InfluenzaA__ACN76522

SEQ ID NO: 130630 - RNA, 1701 nt, Artificial Sequence; identical to SEQ ID NO: 130482
  derived and/or modified CDS sequence (opt3) from hemagglutinin__InfluenzaA__ACO36331

SEQ ID NO: 130631 - RNA, 1701 nt, Artificial Sequence
  derived and/or modified CDS sequence (opt3) from hemagglutinin__InfluenzaA__ACO36342
augaagaccaucauugcccugagcuacauacucugccuuguguucgcucagaaauuucccggcaacgacaauuccacagcaacucuguguuuggggcaccaugccgucccuaacggaacgaucguuaagaccauuacaaaugaucaaaucgaggugacuaacgcgaccgaauuaguacagucuucaaguacaggugagauuugcgacagcccacaccagauccuggauggcgaaaauuguacccuaauagacgcucuccugggggauccgcagugcgacggauuccaaaacaaaaauugggaucuuuuuguggagagauccaaggccuauucuaacuguuaccccuaugacgucccugauuacgcaucgcugaggucauugguggccagcaguggcacucucgaguucaauaacgaauccuuuaauuggacagguguuacccagaacgggacgucuagcgcuugcauccggcgcuccaauaacucauucuuuagucgacugaauuggcugacucauagcaaauucaaguauccagcacucaacgugaccaugcccaacaaugagaacuuugacaaguuauacauuuggggaguccaccauccuggcacagauaaugaccagaucuuccuguaugcccaggcuucuggccguauuacuguguccaccaaaagaucacaacagacaguaaucccaaacauagggagcaggccccggguucgcaauauuccuaguagaaucucuauuuacuggaccaucgugaagccaggagauauccuuuugauuaacuccacggguaaucugauagccccgaggggcuacuuuaaaauccggagcgggaagucgucuauuaugcgcuccgacgcgcccaucggaaaauguaacucagaaugcauaacuccuaauggcaguauuccaaacgacaagcccuuccagaaugucaaccgaaucacauauggugcauguccuagauacgugaagcagaauacccuaaaacucgccacugggaugaggaacgugccagagaagcaaacacggggaaucuuuggcgcuauugccggcuucaucgaaaaugggugggagggaauggucgaugguugguauggcuuccgucaccagaacagcgaggggauuggacaggcagcugaccugaaauccacccaagccgcgauagaucagaucaacggcaaacuuaaucgccugauugguaagacgaacgaaaaguuucaccagaucgagaaagaguucucugaaaucgaagggaggauucaggacuuggagaaguacguugaggauaccaagauagaccucuggagcuauaaugccgaacuguuaguggcacuggagaaccaacauacaaucgaucucacugacucagaaaugaauaaacuuuuugagaagaccaaaaagcagcugagagaaaacgcugaggauaugggcaauggaugcuucaaaauuuaccacaagugugacaacgccugcaucggcaguauucggaaugggacauaugaucaugacguauaccgagacgaggcuuugaacaaucgcuuucagaucaagggaguggaacuaaaauccgguuacaaggauuggauacuguggaucagcuucgccauuucuugcuuucuccuguguaucgcacuucugggcuucauuaugugggccugccagaaagggaacaucagauguaauauaugcauuuga

SEQ ID NO: 130632 - RNA, 1701 nt, Artificial Sequence
  derived and/or modified CDS sequence (opt3) from hemagglutinin__InfluenzaA__ACO36364
augaagaccaucauugcccugagcuacauacucugccuuguguucgcucagaaacugcccggcaacgacaauuccacagcaacuuuguguuuagggcaccaugccgucccuaacggaacgaucguuaagaccauuacaaaugaucaaaucgaggugacuaacgcgaccgaacugguacagucuucaaguacaggugagauuugcgacagcccacaccagauccuagauggcgaaaauuguacccucauagacgcucugcuuggggauccgcagugcgacggauuucaaaacaaaaagugggaucuguucguggagagauccaaagccuauucuaauuguuaccccuaugacgucccugauuacgcaucguugaggucacucguggccagcaguggcacucuggaauuuaacaaugaguccuucaacuggacagguguuacccagaaugggacgucuagcgcuugcauccggcgcuccaacaauucauuuuucagucgacugaacuggcucacucauuuaaaguuuaaguauccagcacugaaugugaccaugcccaacaacgagaaauucgacaaacuuuacauuuggggaguccaccauccuggcacagauaaugaccagaucuuuuuguaugcccaggcuagcggccguauuacugugucuaccaaaagaucccaacagacaguaaucccaaacauagggucaaggccccggguucgcaauauuccuagcagaaucaguauuuacuggaccaucgugaagccaggagauauccugcuaauuaacucuacggguaaucucauagccccgaggggcuacuucaaaauccgguccggaaagagcucgauuaugcgcucugacgcgcccaucgggaaguguaacuccgaaugcauaacuccuaauggcucaauuccaaacgacaaacccuuucagaaugucaaccgaaucacauauggugcauguccuagauacgugaagcagaauacccugaaacuugccacugggaugaggaacgugccagagaagcaaacacggggaaucuucggcgcuauugccggcuuuaucgaaaaugggugggagggaauggucgaugguugguauggcuuccgucaccagaacagugaggggaccggacaggcagcugaccugaaaagcacgcaagccgcgauugaucagauaaauggcaaguugaaccgccucaucgguaaaaccaacgaaaaguuccaccagauugagaaggaauuuuccgagguugaagggagaauccaggaccuggagaaauacguggaggauacaaagaucgacuuauggucuuauaaugccgaacugcucguagcacuugagaaccaacauacuauugaucugaccgacagcgaaaugaauaaauuguucgagaagacaaagaagcagcuaagggaaaacgcugaggauaugggcaauggaugcuuuaagauauaccacaaaugugacaacgccugcaucggcucaauucggaaugggacuuaugaucaugacguguaccgagacgaggcucugaacaaucgcuuccagaucaagggagucgaacucaaaagugguuacaaggauuggauucuguggaucuccuuugccauaagcugcuuccuucuguguguggcauugcucggcuuuaucaugugggccugccagaaagggaacauuagauguaauaucugcauuuga

SEQ ID NO: 130633 - RNA, 1701 nt, Artificial Sequence; identical to SEQ ID NO: 130349
  derived and/or modified CDS sequence (opt3) from hemagglutinin__InfluenzaA__ACO36375

SEQ ID NO: 130634 - RNA, 1698 nt, Artificial Sequence; identical to SEQ ID NO: 130536
  derived and/or modified CDS sequence (opt3) from hemagglutinin__InfluenzaA__ACO36397

SEQ ID NO: 130635 - RNA, 1701 nt, Artificial Sequence; identical to SEQ ID NO: 130349
  derived and/or modified CDS sequence (opt3) from hemagglutinin__InfluenzaA__ACO36408

SEQ ID NO: 130636 - RNA, 1701 nt, Artificial Sequence; identical to SEQ ID NO: 129976
  derived and/or modified CDS sequence (opt3) from hemagglutinin__InfluenzaA__ACO36419

SEQ ID NO: 130637 - RNA, 1701 nt, Artificial Sequence; identical to SEQ ID NO: 129976
  derived and/or modified CDS sequence (opt3) from hemagglutinin__InfluenzaA__ACO36430

SEQ ID NO: 130638 - RNA, 1701 nt, Artificial Sequence
  derived and/or modified CDS sequence (opt3) from hemagglutinin__InfluenzaA__ACO36441
augaagaccaucauugcccugagcuacauacucugccuuguguucgcucagaaacugcccggcaacgacaauuccacagcaacuuuguguuuagggcaccaugccgucccuaacggaacgaucguuaagaccauuacaaaugaucaaaucgaggugacuaacgcgaccgaacugguacagucuucaaguacagguggcauuugcgacagcccacaccagauccuagauggggagaauuguacccucauagacgcucugcuuggagauccgcagugcgacggcuuucaaaacaaaaagugggaucuguucguggaaagauccaaagccuauucuaauuguuaccccuaugacgucccugauuacgcaucguugaggucacucguggccagcagugguacucuggaguuuaacaaugaauccuucgacuggacagggguuacccagaacggaacgucuagcgcuugcaagcggcgcuccaauaagucauuuuucagucgacugaacuggcucacucauuuaaaauauaaguacccagcacugaaugugaccaugcccaacaaugagaaauuugauaaacuuuauaucuggggcguccaccauccuggcacagacagcgaucagauuucuuuguacgcccaggcuuccgggcguaucacugugucaaccaagagaagccaacagacaguaauuccaaacaucggaaguaggccccggguucgcgacgugucuuccagaauaagcauuuacuggaccaucgucaagccuggugacauucugcuaaucaacucgacgggcaaucucaucgccccaaggggguauuucaagauucggucuggaaaauccucaauaaugcgcagugaugcgccgaucggcaaguguaacagcgagugcauuacucccaaugguuccaucccuaacgacaaaccauuucagaaugugaaccgaauaacauacggggcaugucccagauaugugaagcagaauacccugaaacuugccacuggaaugaggaacgucccugaaaagcaaacacggggcauuuucggcgcuaucgccggguuuaucgagaauggaugggaagguaugguugauggcugguacggguuccgucaccagaacucugagggaaccggccaggcagcugaccugaaaagcacgcaagccgcgauuaaucagaucaacgguaaguugaaucgccucauugggaagaccaacgagaaauuucaccagauagaaaaggaguucucagaaguggagggcagaauccaggaucuggaaaaauauguagaggacacaaagauugauuuauggaguuacaaugccgagcugcucguggcacuugaaaaccaacauacuaucgaccugaccgauuccgagaugaacaaauuguucgaaaggacaaagaagcagcuacgggagaaugcugaagacaugggaaacggcugcuuuaaaaucuaucacaagugugauaaugccugcauugggagcauacgaaacggaacuuacgaccaugacgucuaccgcgaugaggcucugaauaacagauuccagaucaaagguguggagcucaagucuggcuauaaagacuggauucuguggaucucauuugccauuaguugcuuccuucuguguguugcauugcucggguuuaucaugugggccugccagaagggaaauauaaggugugauaucugcauuuga

SEQ ID NO: 130639 - RNA, 1701 nt, Artificial Sequence
  derived and/or modified CDS sequence (opt3) from hemagglutinin__InfluenzaA__ACO36452
augaagaccaucauugcccugagcuacauacucugccuuguguucgcucagaaacugcccggcaacgacaauuccacagcaacuuuguguuuagggcaccaugccgucccuaacggaacgaucguuaagaccauuacaaaugaucaaaucgaggugacuaacgcgaccgaacugguacagucuucaaguacagguggcauuugcgacagcccacaccagauccuagauggggagaauuguacccucauagacgcucugcuuggagauccgcagugcgacggcuuucaaaacaaaaagugggaucuguucguggaaagauccaaagccuauucuaauuguuaccccuaugacgucccugauuacgcaucguugaggucacucguggccagcagugguacucuggaguuuaacaaugaauccuucgacuggacagggguuacccagaacggaacgucuagcuccugcaagcggcgcucaaauaacagcuuuuucagucgacugaauuggcucacucauuuaaaguauaaauacccagcucugaacgugaccaugcccaauaacgagaaguuugauaaacuuuauaucuggggcguccaccauccuggcacagacucugaucagauuuccuuguacgcacaggccucagggcguaucacuauuagcaccaagagaagucaacagacagugaucccaaacauaggaucuaggccccggguacgcgacguuuccagcagaauuucgaucuacuggaccauugugaaaccuggugacauccugcuaaucaauucuacgggcaaccucauugcuccaaggggguauuucaagauacgguccggaaagucaaguaucaugcgcagcgaugccccgauuggcaaauguaauuccgagugcaucacucccaacgguucuauaccuaaugacaagccauuucagaacgucaaucgaauuacauacggggcgugucccagauaugugaaacagaacacccugaaacuugcaacuggaaugaggaaugugccugaaaaacaaacacggggcaucuucggcgccaucgcuggguuuauugagaacggaugggaagguauggucgauggcugguacggguuccgucaccagaauagcgagggaaccggccaggccgcagaccugaagucaacgcaagcugccaucaaccagauuaaugguaaauugaaccgccucauagggaagaccaaugagaaguuucaccagaucgaaaaagaguucagugaaguugagggcaggauucaggaucuggaaaaguauguggaggacacaaaaaucgauuuaugguccuacaacgcggagcugcucguagcccuugaaaaccaacauacuaucgaccugaccgauagcgagaugaauaaguuguucgaaagaacaaagaagcagcuacgggagaacgcagaagacaugggaaauggcugcuuuaagauuuaucacaaaugugauaacgcuugcauagggucuauccgaaauggaacuuacgaccaugacguguaccgcgaugaggcccugaacaauagauuccagauuaagggugucgagcucaaaucaggcuauaaggacuggauccuguggauuaguuuugcuaucagcugcuuccuucuguguguggccuugcucggguuuauaaugugggcaugccagaaaggaaacaucagguguaauauuugcaucuga

SEQ ID NO: 130640 - RNA, 1701 nt, Artificial Sequence
  derived and/or modified CDS sequence (opt3) from hemagglutinin__InfluenzaA__ACO36463
augaagaccaucauugcccugagcuacauacucugccuuguguucgcucagaaacugcccggcaacgacaauuccacagcaacuuuguguuuagggcaccaugccgucccuaacggaacgaucguuaagaccauuacaaaugaucaaaucgaggugacuaacgcgaccgaacugguacagucuucaaguacagguggcauuugcgacagcccacaccagauccuagauggggagaauuguacccucauagacgcucugcuuggagauccgcagugcgacggcuuucaaaacaaaaagugggaucuguucaucgaaagauccaaagccuauucuaauuguuaccccuaugacgugccugauuacgcaucguugaggucacucgucgccagcagugguacucuggaguuuaacaaugaauccuucaacuggacaggggugacccagaauggaacgucuagcgcuugccagcggcgcuccaacaagucauuuuucagucgacugaauuggcucacucauuuaaaguuuaaauauccagcacugaacguuaccaugcccaauaacgagaaguucgacaaacuuuacauuuggggcgugcaccauccuggcacagauaacgaccagaucagcuuguaugcccaaacuucugggcguauuaccgucuccacaaagagaucacagcagaccgugaucccaaauauaggaagcaggccccggguacgcgauguuccuaguagaauuucuaucuacuggacgauugugaaaccaggugacauccugcuaaucaacuccacuggcaaucucauugcuccgaggggguacuuuaagauacggagcggaaagucgucuaucaugcgcuccgacgcccccauuggcaaauguaacucagagugcaucacaccuaaugguaguauaccaaacgauaagcccuuccagaaugucaaccgaauuaccuauggggcguguccuagauacgugaaacaaaauacucugaaacuugcaacaggaaugaggaacgugccagaacggcagacccguggcaucuuuggcgccaucgcuggguucauugagaauggaugggaagguauggucgacggcugguauggguuucgccaccagaacagcgagggaacgggccaagccgcagaucugaaguccacccaggcugccaucaaucagauuaacgguaaguugaauagacucauagggaaaacaaacgagaaguuccaccagaucgaaaaggaguucucugaaguugagggcaggauucaagaccuggaaaaauacguggaggauacuaagaucgacuuauggagcuauaacgcggagcugcucguagcccuugaaaaucagcauaccaucgaucugacagacucagagaugaacaaauuguuugaacggacuaagaaacagcuacgagagaaugcagaagauaugggaaacggcugcuucaagauuuaccacaagugugacaaugcuugcauagggaguauccgcaacggaaccuaugaucaugacguguacagagacgaggcccugaauaacagguuucagauuaaaggugucgagcucaaguccggcuacaaagauuggauccuguggauuagcuucgcuaucucuugcuuugugcuuuguguugcccuguugggguucauaaugugggcaugccaaaagggaaauauccgguguaacauuugcaucuga

SEQ ID NO: 130641 - RNA, 1701 nt, Artificial Sequence
  derived and/or modified CDS sequence (opt3) from hemagglutinin__InfluenzaA__ACO36474
augaagaccaucauugcccugagcuacauacucugccuuguguucgcucagaaacugcccggcaacgacaauuccacagcaacuuuguguuuagggcaccaugccgucccuaacggaacgaucguuaagaccauuacaaaugaucaaaucgaggugacuaacgcgaccgaacugguacagucuucaaguacagguggcauuugcgacagcccacaccagauccuagauggggagaauuguacccucauagacgcucugcuuggagauccgcagugcgacggcuuucaaaacaaaaagugggaucuguucguggaaagauccaaagccuauucuaauuguuaccccuaugacgucccugauuacgcaucguugaggucacucguggccagcagugguacucuggaguuuaacaaugaauccuucgacuggacagggguuacccagaacggaacgucuagcuccugcaagcggcgcucaaauaacagcuuuuucagucgacugaauuggcucacucauuuacguuauaaguacccagcucugaacgugaccaugcccaauaacgagaaauuugauaaacuuuauaucuggggcguccaccauccuggcacagacucugaucagauuuccuuguacgcacaggccucagggagaaucacugugagcaccaagaggagucaacagacaguaauuccaaacaucggaucucggccccgcguuagagacguguccagcaggauaucgauuuacuggaccaucgucaagccuggugacauucugcuaaucaauucuacgggcaaccucaucgcuccacggggguauuucaaaauucgcuccggaaagucaaguauaaugcgaagcgaugccccgaucggcaaguguaauuccgagugcauuacucccaacgguucuaucccuaaugacaaaccauuucagaacgugaauagaauaacauacggggauugucccagguaugugaagcagaacacccugaaacuugcgacuggaaugcggaaugucccugaaaagcaaacacguggcauuuucggcgcaaucgccggguuuaucgagaacggaugggaagguaugguugacggcugguacggguuccgccaccagaauagcgagggaaccggccaggcugccgaucugaaaucaacgcaagcagcuauuaaccagaucaaugguaaguugaacagacucauugggaaaaccaaugagaaguuucaccagauagaaaaggaguucagugaaguggagggcaggauccaggaccuggaaaaauauguagaggauacaaagauugacuuaugguccuacaacgccgagcugcucguggcgcuugaaaaccaacauacuaucgaucugaccgacagcgagaugaauaaauuguucgaacggacaaagaaacagcuacgagagaacgccgaagauaugggaaauggcugcuuuaagaucuaucacaagugugacaacgcaugcauugggucuauacgcaauggaacuuacgaccaugaugucuacagagacgaggcucugaacaauagguuccagaucaaagguguggagcucaagucaggcuauaaagauuggauucuguggaucaguuuugccauuagcugcuuccuucuguguguugcuuugcucggguuuaucaugugggccugccagaagggaaacauacgguguaauaucugcauuuga

SEQ ID NO: 130642 - RNA, 1701 nt, Artificial Sequence
  derived and/or modified CDS sequence (opt3) from hemagglutinin__InfluenzaA__ACO36496
augaagaccaucauugcccugagcuacauacucugccuuguguucgcucagaaacugcccggcaacgacaauuccacagcaacuuuguguuuagggcaccaugccgucccuaacggaacgaucguuaagaccauuacaaaugaucaaaucgaggugacuaacgcgaccgaacugguacagucuucaaguacagguggcauuugcgacagcccacaccagauccuagauggggagaauuguacccucauagacgcucugcuuggagauccgcagugcgacggcuuucaaaacaaaaagugggaucuguucguggaaagauccaaagccuauucuaauuguuaccccuaugacgucccugauuacgcaucguugaggucacucguggccagcagugguacucuggaguuuaacaaugaauccuucaacuggacagggguuacccagaauggaacgucuagcgcuugcaagcggcgcuccaacaauggcuuuuucucacgacugaacuggcucacucauuuaaaguuuaaauauccagcacugaaugugaccaugcccaacaacgagaaguucgacaaacuuuacaucuggggcguccaccauccugggacagauaaugaccagauuaguuuguaugcccaggcuagcggacguaucacugugucuaccaagagaucccaacagacaguaauuccaaacaucgguucaaggccccggguucgcgauauaagcaguagaauuucuaucuacuggaccauugugaaaccuggcgacauccugcuaaucaauuccacggggaaccucauugccccaaggggauacuuuaagauacggagcggcaagucgucuaucaugcgcuccgacgcgccgauugguaaauguaauucagagugcaucacucccaacgggaguauaccuaaugauaagccauuccagaacgucaaucgaauuacauauggagcaugucccagauacgugaaacagaacacccugaaacuugccacuggcaugaggaaugugccugaaacacaaacccggggcaucuuuggggcuaucgccggauucauugagaacgguugggaaggcauggucgacgggugguauggauuucgucaccagaauagcgagggcacgggucaggcagcugaucugaaguccacccaagccgcgaucaaccagauuaaugggaaguugaaccgccucauaggcaaaacaaacgagaaguuccaccagaucgaaaaggaguucucugaaguugagggaaggauucaggaccuggaaaaauacguggaggauacuaagaucgacuuauggagcuauaaugccgagcugcucguagcacuugaaaaccaacauaccaucgaucugacagacucagagaugaauaaauuguuugaaagaacuaagaaacagcuacgggagaacgcugaagauaugggcaaugggugcuucaagauuuaccacaagugugacaacgccugcauaggaaguauccgaaaugguaccuaugaucaugacguguaccgcgacgaggcucugaacaauagauuucagauuaaaggcgucgagcucaaguccggguacaaagauuggauccuguggauuagcuucgccaucucuugcuuucuucuguguguggcauugcucggauucauaaugugggccugccagaagggcaacaucagguguaauauuugcaucuga

SEQ ID NO: 130643 - RNA, 1701 nt, Artificial Sequence
  derived and/or modified CDS sequence (opt3) from hemagglutinin__InfluenzaA__ACO36518
augaagaccaucauugcccugagcuacauacucugccuuguguucgcucagaaacugcccggcaacgacaauuccacagcaacuuuguguuuagggcaccaugccgucccuaacggaacgaucguuaagaccauuacaaaugaucaaaucgaggugacuaacgcgaccgaacugguacagucuucaaguacagguggcauuugcgacagcccacaccagauccuagauggggagaauuguacccucauagacgcucugcuuggagauccgcagugcgacggcuuucaaaacaaaaagugggaucuguucguggaaagauccaaagccuauucuaauuguuaccccuaugacgucccugauuacgcaucguugaggucacucguggccagcagugguacucuggaguuuaacaaugaauccuucaacuggacagggguuacccagaauggaacgucuagcgcuugcaagcggcgcuccaacaagucauuuuucagucgacugaauuggcucacucauuuaaaauuuaaguauccagcacugaacgugaccaugcccaauaacgagaaauucgacaaacuuuacaucuggggcguccaccauccuggcacagauaacgaccagauuagcuuguaugcccaggcuucugggcguaucacuguguccaccaagagaucacaacagacaguaauuccaaauaucggaagcaggccccggguucgcgaugugccuaguagaauaucuauuuacuggaccaucgucaagccaggugacauucugcuaaucaacuccacgggcaaucucaucgccccgaggggguacuuuaagauucggagcggaaaaucgucuauaaugcgcuccgacgcgcccaucggcaaguguaacucagagugcauuacuccuaaugguaguaucccaaacgauaaacccuuccagaaugugaaccgaauaacauaugggaccuguccuagauacgugaagcagaauacucugaaacuugcaacaggaaugaggaacgucccagaaaagcaaacccggggcauuuuuggcgccaucgcuggguucaucgagaauggaugggaagguaugguugacggcugguauggguuucgucaccagaacagcgagggaacgggccaggccgcagaucugaaauccacccaagcugccauuaaucagaucaacgguaaguugaaucgccucauugggaagacaaacgagaaauuccaccagauagaaaaggaguucucugaaguggagggcagaauccaggaccuggaaaaauacguagaggauacuaagauugacuuauggagcuauaacgcggagcugcucguggcccuugaaaaucaacauaccaucgaucugacagacucagagaugaacaaauuguuugaaaggacuaagaagcagcuacgggagaaugcagaagauaugggaaacggcugcuucaaaaucuaccacaagugugacaaugcuugcauugggaguauacgaaacggaaccuaugaucaugacgucuaccgcgacgaggcccugaauaacagauuucagaucaaagguguggagcucaagcugggcuacaaagauuggauucuuuggaucuccuucgcuauuagcugcuuucuguuguguguugcccuccugggguucaucaugugggcaugccagaagggaaauauaagguguaacaucugcauuuga

SEQ ID NO: 130644 - RNA, 1701 nt, Artificial Sequence
  derived and/or modified CDS sequence (opt3) from hemagglutinin__InfluenzaA__ACO36551
augaagaccaucauugcccugagccacauacucugccuuguguucgcucagaaacccccuggcaacgacaauuccacagcaacucuguguuuggggcaucacgccgucccaaacggaacgaucguuaagaccauuacaaaugaucaaaucgaggugacuaacgcgaccgaauuaguacagucuucaaguacagguggcauuugcgacagcccgcaucagauccuggauggggagaauuguacccuaauagacgcucuccugggagauccccagugcgacggcuuucaaaacaaaaagugggaucuuuucguggaaagauccaaagccuacucuaauuguuauccuuacgacgucccagauuaugcaucgcugaggucauugguggccagcagugguacucucgaguuuaacaaugaauccuucaacuggacagggguuacccagaauggaacgucuagcgcuugcaagcggcgcuccaacaauucauuuuucagucgacugaacuggcugacucaccucaaguuuaaauaccccgcauuaaaugugaccaugccuaacaacgagaaguucgacaaacuguauaucuggggcguccaucacccaggcacagauaaugaccagauuagccuuuacgcccaggcuucugggcguaucacuguguccaccaagagaucacaacagacaguaauucccaacaucggaagcaggccucggguucgcgauauaaguucuagaauuuccaucuauuggaccauugugaaaccaggugacaucuugcugaucaauagcacgggcaaccuaauugccccgaggggguacuuuaagauacggucgggaaagucuuccaucaugcgcucagacgcgcccauuggcaaauguaauagugagugcaucacuccuaacgguagcauaccaaaugauaagcccuuccagaacgucaaucgaauuacauacggggcauguccuagauaugugaaacagaacacccucaagcuggccacuggaaugaggaaugugccagaaacacaaacccggggcaucuuuggcgcuaucgccggguucauugagaacggaugggaagguauggucgacggcugguacggguuucgucaccagaauagcgagggaacgggccaggcagcugaucuuaaaucuacccaagccgcgaucaaccagauuaaugguaagcugaaccgcuugauagggaaaacaaacgagaaguuccaucagaucgaaaaggaguucagcgaaguugagggcaggauucaggaccucgaaaaauauguggaggauacuaagaucgaccuguggucauacaaugccgaguuacugguagcacucgaaaaccaacacaccaucgaucuuacagacagugagaugaauaaacuguuugaaagaacuaagaaacaguugcgggagaacgcugaagauaugggaaauggcugcuucaagauuuaucauaagugugacaacgccugcauaggguccauccgaaaugagaccuacgaucacgacguguaucgcgacgaggcucuaaacaauagauuucagauuaaaggagucgaacugaaguccgguuacaaagauuggauccucuggauuucuuucgccaucucaugcuuucugcuuuguguggcacuguugggcuucauaaugugggccugccagaaggggaacaucagguguaauauuugcaucuga

SEQ ID NO: 130645 - RNA, 1701 nt, Artificial Sequence
  derived and/or modified CDS sequence (opt3) from hemagglutinin__InfluenzaA__ACO36562
augaagaccaucauugcccugagcuacauacucugccuuguguucgcucagaaacugcccggcaacgacaauuccacagcaacuuuguguuuagggcaccaugccgucccuaacggaacgaucguuaagaccauuacaaaugaucaaaucgaggugacuaacgcgaccgaacugguacagucuucaaguacagguggcauuugcgacagcccacaccagauccuagauggggagaauuguacccucauagacgcucugcuuggagauccgcagugcgacggcuuucaaaacaaaaagugggaucuguucguggaaagauccaaagccuauucuaauuguuaccccuaugacgucccugauuacgcaucguugaggucacucguggccagcagugguacucuggaguuuaacaaugaauccuucaacuggacagggguuacccagaauggaacgucuagcgcuugcaagcggcgcuccaacaauucauuuuucagucgacugaacuggcucacucauuuaaaguuuaaauauccagcacugaaugugaccaugcccaacaacgagaaguucgacaaacuuuacaucuggggcguccaccauccuggcacagauaaugaccagauuagcuuguaugcccaggcuucugggcguaucacuguguccaccaagagaucacaacagacaguaauuccaaacaucggaagcaggccccggguucgcgauauaccuaguagaauuucuaucuacuggaccauugugaaaccaggugacauccugcuaaucaauuccacgggcaaccucauugccccgaggggguacuuuaagauacggagcggaaagucgucuaucaugcgcuccgacgcgcccauuggcaaauguaauucagagugcaucacuccuaacgguaguauaccaaaugauaagcccuuccagaacgucaaucgaauuacauauggggcauguccuagauacgugaaacagaacacccugaaacuugccacuggaaugaggaaugugccagaaacacaaacccggggcaucuuuggcgcuaucgccggguucauugagaacggaugggaagguauggucgacggcugguauggguuucgucaccagaauagcgagggaacgggccaggcagcugaucugaaguccacccaagccgcgaucaaccagauuaaugguaaguugaaccgccucauagggaaaacaaacgagaaguuccaccagaucgaaaaggaguucucugaaguugagggcaggauucaggaccuggaaaaauacguggaggauacuaagaucgacuuauggagcuauaaugccgagcugcucguagcacuugaaaaccaacauaccaucgaucugacagacucagagaugaauaaauuguuugaaagaacuaagaaacagcuacgggagaacgcugaagauaugggaaauggcugcuucaagauuuaccacaagugugacaacgccugcauagggaguauccgaaaugagaccuaugaucaugacguguaccgcgacgaggcucugaacaauagauuucagauuaaaggagucgaacucaaguccgguuacaaagauuggauccuguggauuagcuucgccaucucuugcuuucuucuguguguggcauugcucggcuucauaaugugggccugccagaaggggaacaucagguguaauauuugcaucuga

SEQ ID NO: 130646 - RNA, 1701 nt, Artificial Sequence
  derived and/or modified CDS sequence (opt3) from hemagglutinin__InfluenzaA__ACO36573
augaagaccaucauugcccugagcuacauacucugccuuguguucgcucagaaacugcccggcaacgacaauuccacagcaacuuuguguuuagggcaccaugccgucccuaacggaacgaucguuaagaccauuacaaaugaucaaaucgaggugacuaacgcgaccgaacugguacagucuucaaguacagguggcauuugcgacagcccacaccagauccuagauggggagaauuguacccucauagacgcucugcuuggagauccgcagugcgacggcuuucaaaacaaaaagugggaucuguucguggaaagauccaaagccuauucuaauuguuaccccuaugacgucccugauuacgcaucguugaggucacucguggccagcagugguacucuggaguuuaacaaugaauccuucaacuggacagggguuacccagaauggaacgucuagcgcuugcaagcggcgcuccaacaauucauuuuucagucgacugaacuggcucacucauuuaaaguuuaaauauccagcacugaaugugaccaugcccaacaacgagaaguucgacaaacuuuacaucuggggcguccaccauccuggcacagauaaugaccagauuagcuuguaugcccaggcuucugggcguaucacuguguccaccaagagaucacaacagacaguaauuccaaacaucggaagcaggccccggguucgcgauauaaguucuagaauuuccaucuacuggaccauugugaaaccuggugacauccugcuaaucaauagcacgggcaaccucauugccccaaggggguacuuuaagauacggucgggaaagucuuccaucaugcgcucagacgcgccgauuggcaaauguaauagugagugcaucacucccaacgguagcauaccuaaugauaagccauuccagaacgucaaucgaauuacauauggggcaugucccagauacgugaaacagaacacccugaaacuugccacuggaaugaggaaugugccugaaacacaaacccggggcaucuuuggcgcuaucgccggguucauugagaacggaugggaagguauggucgacggcugguauggguuucgucaccaaaauuccgagggaacgggccaggcagcugaucugaagucuacccaggccgcgaucaaccagauuaaugguaaguugaaccgccucauagggaaaacaaacgagaaguuccaccagaucgaaaaggaguucagcgaaguugagggcaggauucaggaccuggaaaaauacguggaggauacuaagaucgacuuauggucauauaaugccgagcugcucguagcacuugaaaaccaacauaccaucgaucugacagacagugagaugaauaaauuguuugaaagaacuaagaaacagcuacgggagaacgcugaagauaugggaaauggcugcuucaagauuuaccacaagugugacaacgccugcauaggguccauccgaaaugagaccuaugaucaugacguguaccgcgacgaggcucugaacaauagauuucagauuaaaggagucgaacucaagagcgguuacaaagauuggauccuguggauuucuuucgccaucucaugcuuucuucuguguguggcauugcucggcuucauaaugugggccugccagaaggggaacaucagguguaauauuugcaucuga

SEQ ID NO: 130647 - RNA, 1701 nt, Artificial Sequence
  derived and/or modified CDS sequence (opt3) from hemagglutinin__InfluenzaA__ACO36584
augaagaccaucauugcccugagcuacauacucugccuuguguucucccagaaacugcccggcaacgacaauucuacagcuacuuuguguuuagggcaccaugcagucccuaacggaacgaucguuaagaccauuacaaaugaucaaaucgaggugacuaacgccaccgaacugguacagucaaguagcacagguggcauuugcgacuccccacaccagauccuagauggggagaauuguacccucauagacgcgcugcuuggagauccgcagugcgacggcuuucaaaacaaaaagugggaucuguucguggaaagaucuaaggcuuauucgaauuguuaccccuaugacgucccugauuacgccucauugaggagccucguggcaaguuccgguacucuggaguuuaacaaugaaucuuucaacuggacagggguuacccagaauggaacgagcuccgccugcaagcggcgcucaaacaauagcuuuuucagucgacugaacuggcucacucauuuaaaguuuaaauauccagcucugaaugugaccaugcccaacaacgagaaguucgacaaacuuuacaucuggggcguccaccauccuggcacagauaaugaccagauuucuuuguaugcacaggccuccgggcguaucacugugucaaccaagaaaagccaacagacaguaauuccaaacaucggaaguagacccaggguucgggauauaucuucccgcauuagcaucuacuggaccauugugaagccuggugacauccugcuaaucaauucgacgggcaaccucauugcuccaagaggguacuuuaagauaaggucuggaaaauccucaaucaugcggagugacgccccgauuggcaaguguaauagcgagugcaucacucccaacgguuccauaccuaaugauaaaccauuccagaacgucaaucgcauuacauauggggcguguccccgauacgugaagcagaacacccugaaacuugcaacuggaaugagaaaugugccugaaacacaaaccaggggcaucuuuggcgccaucgcuggguucauugagaacggaugggaagguauggucgacggcugguauggguuucggcaccaaaauucugagggaacgggccaggccgcagaucugaaaagcacccaggcugccaucaaccagauuaaugguaaauugaaccgucucauagggaagacaaacgagaaguuccaccagaucgaaaaagaguucucagaaguugagggccgcauucaggaccuggaaaaguacguggaggauacuaaaaucgacuuauggaguuauaaugcggagcugcucguagcccuugaaaaccaacauaccaucgaucugacagacuccgagaugaauaaguuguuugaaagaacuaaaaagcagcuaagggagaacgcagaagauaugggaaauggcugcuucaagauuuaccacaaaugugacaacgcuugcauagggagcauccggaaugagaccuaugaucaugacguguaccgagacgaggcccugaacaaucgcuuucagauuaagggagucgaacucaaaucugguuacaaggauuggauccuguggauuucauucgcuaucaguugcuuucuucuguguguggccuugcucggcuucauaaugugggcaugccagaaagggaacaucagauguaauauuugcaucuga

SEQ ID NO: 130648 - RNA, 1701 nt, Artificial Sequence; identical to SEQ ID NO: 128678
  derived and/or modified CDS sequence (opt3) from hemagglutinin__InfluenzaA__ACO36595

SEQ ID NO: 130649 - RNA, 1701 nt, Artificial Sequence
  derived and/or modified CDS sequence (opt3) from hemagglutinin__InfluenzaA__ACO36606
augaagaccaucauugcccugagcuacauacucugccuuguguucgcucagaaacugcccggcaacgacaauuccacagcaacuuuguguuuagggcaccaugccgucccuaacggaacgaucguuaagaccauuacaaaugaucaaaucgaggugacuaacgcgaccgaacugguacagucuucaaguacagguggcauuugcgacagcccacaccagauccuagauggggagaauuguacccucauagacgcucugcuuggagauccgcagugcgacggcuuucaaaacaaaaagugggaucuguucguggaaagauccaaagccuauucuaauuguuaccccuaugacgucccugauuacgcaucguugaggucacucguggccagcagugguacucuggaguuuaagaacgaauccuucaauuggacagggguuacccagaacggaacgucuagcgcuugcaagcggcgcuccaauaacucauuuuucagucgacugaauuggcucacucauuuaaaauuuaaguauccagcacugaacgugaccaugcccaauaacgagaaauucgacaagcuguacaucuggggcguccaccauccuggcacagauaacgaccagauuuuucuuuaugcccaggcuagcgggcguaucacugugucuacccaaagaucccagcagacaguaauuccaaauaucggaucaaggccccggguucgcaacauaccuagcagaauuaguaucuacuggaccauugugaaaccaggugauauccugcuaaucaauucuacgggcaaccucauugccccgaggggguacuucaagauacgguccggaaagagcucgaucaugcgcucugacgcgcccauuggcaaauguaauuccgagugcaucacuccuaacgguucaauaccaaaugacaagcccuuucagaacgucaaucgaauuacauauggggcauguccuagauacgugaaacaaaacacccugaaguuggccacuggaaugaggaaugugccagaaaaacagacacggggcaucuucggcgcuaucgccggguuuauugagaacggaugggaagguauggucgauggcugguauggguuccgucaccagaauagugagggaaucggccaagcagcugaccuuaagagcacccaggccgcgauuaaccagauaaaugguaaauugaaccgccucaucgggaagacgaacgagaaguuccaccagauugaaaaagaguuuuccgaaguugagggcagaauccaagaucuggaaaaguacguggaggacaccaaaaucgauuuauggucuuauaaugccgagcugcucguagcacuugaaaaccagcauacaauugaccugacugauagcgagaugaauaaguuguucgaaaggaccaaaaagcagcuacgggagaacgcugaagacaugggaaauggcugcuuuaagauauaccacaaaugugauaacgccugcaucgggucaauucgaaauggaacauaugaccaugauguguaccgcgacgaggcucugaacaauagauuccagaucaagggugucgagcucaaaaguggcuacaaggacuggauucuguggaucuccuuugccauaagcugcuuccuucuguguguggcauugcucggguuuaucaugugggccugccaaaaaggaaacauuagguguaauaucugcauuuga

SEQ ID NO: 130650 - RNA, 1701 nt, Artificial Sequence; identical to SEQ ID NO: 128678
  derived and/or modified CDS sequence (opt3) from hemagglutinin__InfluenzaA__ACO36617

SEQ ID NO: 130651 - RNA, 1701 nt, Artificial Sequence; identical to SEQ ID NO: 128678
  derived and/or modified CDS sequence (opt3) from hemagglutinin__InfluenzaA__ACO36628

SEQ ID NO: 130652 - RNA, 1701 nt, Artificial Sequence
  derived and/or modified CDS sequence (opt3) from hemagglutinin__InfluenzaA__ACO36639
augaagaccaucauugcccugagcuacauacucugccuuguguucgcucagaaacugcccggcaacgacaauuccacagcaacuuuguguuuagggcaccaugccgucccuaacggaacgaucguuaagaccauuacaaaugaucaaaucgaggugacuaacgcgaccgaacugguacagucuucaaguacagguggcauuugcgacagcccacaccagauccuagauggggagaauuguacccucauagacgcucugcuuggagauccgcagugcgacggcuuucaaaacaaaaagugggaucuguucguggaaagauccaaagccuauucuaauuguuaccccuaugacgucccugauuacgcaucguugaggucacucguggccagcagugguacucuggaguuuaacaaugaauccuucaacuggacagggguuacccagaauggaacgucuagcgcuugcaagcggcgcuccaacaauucauuuuucagucgacugaacuggcucacucauuuaaaguuuaaauauccagcacugaaugugaccaugcccaacaacgagaaguucgacaaacuuuacaucuggggcguccaccauccuggcacagauaaugaccagaucuuuuuguaugcccaggcuagcgggcguauuacugugucuaccaagagaucccaacagacaguaauuccaaacaucggaucaaggccccggguucgcaauauaccuagcagaauuaguaucuacuggaccauugugaaaccaggugauauccugcuaaucaacucuacgggcaaucucauugccccgaggggguacuucaagauacgguccggaaagagcucgaucaugcgcucugacgcgcccauuggcaaauguaacuccgagugcaucacuccuaaugguucaauaccaaacgacaagcccuuucagaaugucaaccgaauuacauauggggcauguccuagauacgugaaacagaauacccugaagcuggccacuggaaugaggaacgugccagaaaaacaaacacggggcaucuucggcgcuaucgccggguuuauugagaauggaugggaagguauggucgauggcugguauggguuccgucaccagaacagugagggaaucggccaggcagcugaccuuaagagcacccaagccgcgauuaaucagauaaacgguaaauugaaccgccucaucgggaagacgaaugagaaguuccaccagauugaaaaagaguuuuccgaaguugagggcagaauccaggaucuggaaaaguacguggaggacaccaaaaucgauuuauggucuuauaacgccgagcugcucguagcacuugaaaaucaacauacaauugaccugacugauagcgagaugaacaaguuguucgaaaggaccaaaaagcagcuacgggagaaugcugaagacaugggaaacggcugcuuuaagauauaccacaaaugugauaaugccugcaucgggucaauucgaaacggaacauaugaccaugauguguaccgcgacgaggcucugaauaacagauuccagaucaagggugucgagcucaaaaguggcuacaaggacuggauucuguggaucuccuuugccauaagcugcuuccuucuguguuuugcauugcucggguucaucaugugggccugccagaaaggaaauauuagguguaacaucugcauuuga

SEQ ID NO: 130653 - RNA, 1701 nt, Artificial Sequence
  derived and/or modified CDS sequence (opt3) from hemagglutinin__InfluenzaA__ACO36661
augaagaccaucauugcccugagcuacauacucugccuuguguucgcucagaaacugcccggcaacgacaauuccacagcaacuuuguguuuagggcaccaugccgucccuaacggaacgaucguuaagaccauuacaaaugaucaaaucgaggugacuaacgcgaccgaacugguacagucuucaaguacagguggcauuugcgacagcccacaccagauccuagauggggagaauuguacccucauagacgcucugcuuggagauccgcagugcgacggcuuucaaaacaaaaagugggaucuguucguggaaagauccaaagccuauucuaauuguuaccccuaugacgucccugauuacgcaucguugaggucacucguggccagcagugguacucuggaguuuaacaaugaauccuucaacuggacagggguuacccagaauggaacgucuagcgcuugcaagcggcgcuccaacaauucauuuuucagucgacugaacuggcucacucauuuaaaguuuaaauauccagcacugaaugugaccaugcccaacaacgagaaguucgacaaacuuuacaucuggggcguccaccauccuggcacagauaaugaccagaucuuuuuguaugcccaggcuagcgggcguauuacugugucuaccaagagaucccaacagacaguaauuccaaacaucggaucaaggccccggguucgcaauauaccuagcagaauuaguaucuacuggaccauugugaaaccaggugauauccugcuaaucaacucuacgggcaaucucauugccccgaggggguacuucaagauacgguccggaaagagcucgaucaugcgcucugacgcgcccauuggcaaauguaacuccgagugcaucacuccuaaugguucaauaccaaacgacaagcccuuucagaaugucaaccgaauuacauauggggcauguccuagauacgugaaacagaauacccugaagcuggccacuggaaugaggaacgugccagaaaaacaaacacggggcaucuucggcgcuaucgccggguuuauugagaauggaugggaagguauggucgauggcugguauggguuccgucaccagaacagugagggaaucggccaggcagcugaccuuaagagcacccaagccgcgauuaaucagauaaacgguaaauugaaccgccucaucgggaagacgaaugagaaguuccaccagauugaaaaagaguuuuccgaaguugagggcagaauccaggaucuggaaaaguacguggaggacaucaaaauugauuuauggucuuauaacgccgagcugcucguagcacuugaaaaucaacauaccauagaccugacagauagcgagaugaacaaguuguucgaaaggacuaaaaagcagcuacgggagaaugcugaagacaugggaaacggcugcuuuaagaucuaccacaaaugugauaaugccugcauugggucaauccgaaacggaaccuaugaccaugauguguaccgcgacgaggcucugaauaacagauuccagauuaagggugucgagcucaaaaguggcuacaaggacuggauccuguggauauccuuugccaucagcugcuuccuucuguguguggcauugcucggguuuauuaugugggccugccagaaaggaaauaucagguguaacauuugcaucuga

SEQ ID NO: 130654 - RNA, 1701 nt, Artificial Sequence; identical to SEQ ID NO: 128678
  derived and/or modified CDS sequence (opt3) from hemagglutinin__InfluenzaA__ACO36683

SEQ ID NO: 130655 - RNA, 1701 nt, Artificial Sequence; identical to SEQ ID NO: 130645
  derived and/or modified CDS sequence (opt3) from hemagglutinin__InfluenzaA__ACO37122

SEQ ID NO: 130656 - RNA, 1701 nt, Artificial Sequence
  derived and/or modified CDS sequence (opt3) from hemagglutinin__InfluenzaA__ACO94514
augaagaccaucauugcccugagcuacauacucugccuuguguucgcucagaaacugcccggcaacgacaauuccacagcaacuuuguguuuagggcaccaugccgucccuaacggaacgaucguuaagaccauuacaaaugaucaaaucgaggugacuaacgcgaccgaacugguacagucuucaaguacaggugagauuugcgacagcccacaccagauccuagauggcgaaaauuguacccucauagacgcucugcuuggggauccgcagugcgacggauuucaaaacaaaaagugggaucuguucguggagagauccaaagccuauucuaauuguuaccccuaugacgucccugauuacgcaucguugaggucacucguggccagcaguggcacucuggaauuuaacaaugaguccuucaacuggacagguguuacccagaaugggacgucuagcgcuugcauccggaaguccaacaauucauuuuucagucgccugaacuggcucacucauuuaaaguuuaaauauccagcacugaaugugaccaugcccaacaacgagcaguucgacaaacuuuacauuuggggaguccaccauccuggcacagauaaugaccagaucuuuuuguaugcccaagcuagcggccgaauuacugugucuaccaagcguucccagcagacaguaaucccaaacauagggucaagacccaggguucggaauauuccuagccgcaucaguauuuacuggaccaucgugaagccaggagauauccugcuaauuaacucuacggguaaucucauagccccgagaggcuacuucaaaaucagguccggaaagagcucgauuaugcggucugacgcgcccaucgggaaguguaacuccgaaugcauaacuccuaauggcucaauuccaaacgacaaacccuuucagaaugucaaccgcaucacauauggugcauguccucgauacgugaagcaaaauacccugaaacuugccacugggaugagaaacgugccagagaagcagacaaggggaaucuucggcgcuauugccggcuuuaucgaaaaugggugggagggaauggucgaugguugguauggcuuccggcaccagaacagugaggggcguggacaagcagcugaccugaaaagcacccaggccgcgauugaucagauaaauggcaaguugaaccgccucaucgguaaaacgaacgaaaaguuccaccagauugagaaggaauuuuccgagguugaagggagaauccaagaccuggagaaauacguggaggauaccaagaucgacuuauggucuuauaaugccgaacugcucguagcacuugagaaccagcauacaauugaucugacugacagcgaaaugaauaaauuguucgagaagaccaaaaagcagcuaagggaaaacgcugaggauaugggcaauggaugcuuuaagauauaccacaaaugugacaacgccugcaucggcucaauucggaaugggacauaugaucaugacguguaccgagacgaggcucugaacaaucgcuuccagaucaagggagucgaacucaaaagugguuacaaggauuggauucuguggaucuccuuugccauaagcugcuuccuucuguguguggcauugcucggcuuuaucaugugggccugccaaaaagggaacauuagauguaauaucugcauuuga

SEQ ID NO: 130657 - RNA, 1701 nt, Artificial Sequence
  derived and/or modified CDS sequence (opt3) from hemagglutinin__InfluenzaA__ACO94515
augaagaccaucauugcccugagcuacauacucugccuuguguucgcucagaaacugcccggcaacgacaauuccacagcaacuuuguguuuagggcaccaugccgucccuaacggaacgaucguuaagaccauuacaaaugaucaaaucgaggugacuaacgcgaccgaacugguacagucuucaaguacaggugagauuugcgacagcccacaccagauccuagauggcgaaaauuguacccucauagacgcucugcuuggggauccgcagugcgacggauuucaaaacaaaaagugggaucuguucguggagagauccaaagccuauucuaauuguuaccccuaugacgucccugauuacgcaucguugaggucacucguggccagcaguggcacucuggaauuuaacaaugaguccuucaacuggacagguguuacccagaaugggacgucuagcgcuugcauccggaaguccaacaauucauuuuucagucgccugaacuggcucacucauuuaaaguuuaaauauccagcacugaaugugaccaugcccaacaacgagcaguucgacaaacuuuacauuuggggaguccaccauccuggcacagauaaugaccagaucuuuuuguaugcccaagcuagcggccgaauuacugugucuaccaagcguucccagcagacaguaaucccaaacauagggucaagacccaggguucggaauauuccuagccgcaucaguauuuacuggaccaucgugaagccaggagauauccugcuaauuaacucuacggguaaucucauagccccgagaggcuacuucaaaaucagguccggaaagagcucgauuaugcggucugacgcgcccaucgggaaguguaacuccgaaugcauaacuccuaauggcucaauuccaaacgacaaacccuuucagaaugucaaccgcaucacauauggugcauguccucgauacgugaagcaaaauacccugaaacuugccacugggaugagaaacgugccagagaagcagacaaggggaaucuucggcgcuauugccggcuuuaucgaaaaugggugggagggaaugauggaugguugguauggcuuccggcaccagaacagugaggggcguggacaagcagcugaccugaaaagcacccaggccgcgauugaucagauaaauggcaaguugaaccgccucaucgguaaaacgaacgaaaaguuccaccagauugagaaggaauuuuccgaggucgaagggagaauccaagaccuggagaaauacguugaggauaccaagaucgacuuauggucuuauaaugccgaacugcucguggcacuugagaaccagcauacaauugaucugacugacagcgaaaugaauaaauuguucgagaagaccaaaaagcagcuaagggaaaacgcugaggauaugggcaauggaugcuuuaagauauaccacaaaugugacaacgccugcaucggcucaauucggaaugggacauaugaucaugacguauaccgagacgaggcucugaacaaucgcuuccagaucaagggaguggaacucaaaagugguuacaaggauuggauucuguggaucuccuuugccauaagcugcuuccuucugugugucgcauugcucggcuuuaucaugugggccugccaaaaagggaacauuagauguaauaucugcauuuga

SEQ ID NO: 130658 - RNA, 1701 nt, Artificial Sequence; identical to SEQ ID NO: 130482
  derived and/or modified CDS sequence (opt3) from hemagglutinin__InfluenzaA__ACO94516

SEQ ID NO: 130659 - RNA, 1701 nt, Artificial Sequence; identical to SEQ ID NO: 130482
  derived and/or modified CDS sequence (opt3) from hemagglutinin__InfluenzaA__ACO94672

SEQ ID NO: 130660 - RNA, 1701 nt, Artificial Sequence
  derived and/or modified CDS sequence (opt3) from hemagglutinin__InfluenzaA__ACO94683
augaagaccaucauugcccugagcuacauacucugccuuguguccgcucagaaacugcccggcaacgacaauucuacagcaacuuuguguuuagggcaccaugccgucccuaacggaacgaucguuaagaccauuacaaaugaucaaaucgaggugacuaacgcgaccgaacugguacagucaaguagcacaggugagauuugcgacuccccacaccaggugcuagauggcgaaaauuguacccucaucgacgcucugcuuggggauccgcagugcgacggauuccaaaacaaaaagugggaucuguuugucgagagaucuaaagccuauucgaauuguuaccccuaugacgugccugauuacgcaucauugaggagccucguugccaguuccggcacucuggaguucaacaaugaaucuuuuaacuggacaggugugacccagaaugggacgagcuccgcuugcauacggcgcucaaacaauaguuucuuuagccgacugaacuggcucacucauucuaaguucaaguauccagcauuaaaugucaccaugcccaacaacgaggaauuugacaaacuguacaucuggggagugcaccauccuggcacagauaaugaccagauuuuccuuuaugcccaggcuuccggccguaucacuguaucaaccaagagaagccaacagacaguuauuccaaacaucgggaguaggccccgggugcgcaauauaccuucuagaauuuccaucuacuggaccauugucaaaccaggagauaucuugcugaucaacagcacggguaaucuaauugccccgaggggcuacuuuaagauacggucggggaaaucuuccaucaugcgcucagacgcgcccauuggaaaguguaacagugagugcaucacuccuaauggcagcauaccaaacgacaagcccuuccagaaugugaaccgaauuacauauggugcauguccuagauacgugaaacagaauacccucaagcuggccacugggaugaggaacgucccagaaaaacaaacacggggaaucuuuggcgcuaucgccggcuucauugagaaugggugggagggaaugguugaugguugguauggcuuucgucaccagaacuccgaagggaucggacaggcagcugaccuuaagucuacccaagccgcgauugaucagauaaauggcaaacugaaccgcuugaucgguaagacgaacgagaaauuccaccagauugaaaaggaguucaccgaaguggaggggagaauccaggaccucgagaaguacguagaagauacaaaaaucgaccuguggagcuauaaugccgaguuacugguggcacucgaaaaccaacauacuauugaucuuaccgacucagagaugaauaagcuguuugagaaaacaaagaaacaguugagggaaaacgcugaggauaugggcaauggaugcuucaagauauaccacaagugugacaacgccugcaucggcaguauucggaaugggacuuaugaucaugaagucuaccgagacgaggcucuaaacaaucgcuuucagaucaaaggaguggaacugaaguccgguuacaaagacuggauucucuggaucagcuucgccauaucuugcuuucugcuuuguguugcacuguugggcuucaucaugugggccugccagaaggggaacauuagauguaauaucugcauuuga

SEQ ID NO: 130661 - RNA, 1701 nt, Artificial Sequence; identical to SEQ ID NO: 130482
  derived and/or modified CDS sequence (opt3) from hemagglutinin__InfluenzaA__ACO94694

SEQ ID NO: 130662 - RNA, 1698 nt, Artificial Sequence; identical to SEQ ID NO: 130536
  derived and/or modified CDS sequence (opt3) from hemagglutinin__InfluenzaA__ACO94705

SEQ ID NO: 130663 - RNA, 1701 nt, Artificial Sequence
  derived and/or modified CDS sequence (opt3) from hemagglutinin__InfluenzaA__ACO94727
augaagaccaucauugcccugagcuacauacucugccuuguguucgcucagaaacugcccggcaacgacaauuccacagcaacuuuguguuuagggcaccaugccgucccuaacggaacgaucguuaagaccauuacaaaugaucaaaucgaggugacuaacgcgaccgaacugguacagucuucaaguacaggugagauuugcgacagcccacaccagauccuagauggcgaaaauuguacccucauagacgcucugcuuggggauccgcagugcgacggauuucaaaacaaaaagugggaucuguucguggagagauccaaagccuauucuaauuguuaccccuaugacgucccugauuacgcaucguugaggucacucguggccagcaguggcacucuggaauuuaacaaugaguccuucaacuggacagguguuacccagaaugggacgucuagcgcuugcauccggcgcuccaacaauucauuuuucagucgacugaacuggcucacucauuuaaaguuuaaguauccagcacugaaugugaccaugcccaacaacgagcaguucgacaaacuuuacauuuggggaguccaccauccuggcacagauaaugaccagaucuuuuuguaugcccaagcuagcggccguauuacugugucuaccaagagaucccagcagacaguaaucccaaacauagggucaaggccccggguucgcaauauuccuagcagaaucaguauuuacuggaccaucgugaaaccaggagauauccugcuaauuaacucuacggguaaucucauagccccgaggggcuacuucaagauccgguccgggaaaagcucgauuaugaagucugacgcgcccaucggaaaguguaacuccgaaugcauaacuccuaauggcucaauuccaaacgacaaacccuuucagaaugucaaccgcaucacauauggugcauguccucgauacgugaagcaaaauacccugaaacuugccacugggaugagaaacgugccagagaagcagacaaggggaaucuucggcgcuauugccggcuuuaucgaaaaugggugggagggaauggucgaugguugguauggcuuccggcaccagaacagugaggggcguggacaagcagcugaccugaaaagcacccaggccgcgauugaucagauaaauggcaaguugaaccgccucaucgguaaaacgaacgaaaaguuccaccagauugagaaggaauuuuccgagguugaagggagaauccaagaccuggagaaauacguggaggauaccaagaucgacuuauggucuuauaaugccgaacugcucguagcacuugagaaccagcauacaauugaucugacugacagcgaaaugaauaaauuguucgagaagaccaaaaagcagcuaagggaaaacgcugaggauaugggcaauggaugcuuuaagauauaccacaaaugugacaacgccugcaucggcucaauucggaaugggacauaugaucaugacguguaccgagacgaggcucugaacaaucgcuuccagaucaagggagucgaacucaaaagugguuacaaggauuggauucuguggaucuccuuugccauaagcugccuucuguuguguguggcacuccugggcuucaucaugugggccugccaaaaagggaacauuagauguaauaucugcauuuga

SEQ ID NO: 130664 - RNA, 1701 nt, Artificial Sequence
  derived and/or modified CDS sequence (opt3) from hemagglutinin__InfluenzaA__ACO94738
augaagaccaucauugcccugagcuacauacagugccucguguucgcucaaaaauuucccggcaacgacaauuccacagcaacucuuugucuggggcaccaugccgucccuaacggaacgguugugaagaccaucacaaaugaucagauugagguaacuaacgcgaccgaauuggugcagucuucaaguacaggugagaucugcgacagcccacaccagauuuuagauggcgaaaauuguacccugaucgacgcucuacucggggauccgcaaugcgacggauuccagaacaaaaauugggaucuguuugucgagagauccaaggccuauucuaacuguuaccccuaugacgugccugauuacgcaucgcuuaggucacugguugccagcaguggcacuuuggaguucaauaacgaauccuuuaauuggacaggugugacccagaacgggacgucuagcgcuugcauacggcgcuccaauaacucauucuuuagucgacucaauuggcugacucauagcaaauucaaguauccagcacugaacgucaccaugcccaacaaugagaacuuugacaagcucuacaucuggggagugcaccauccuggcacagauaaugaccagauuuucuuauaugcccgugcuucuggcagaaucacuguauccaccaaaaggucacaacagacaguuauuccaaacaucgggagccggccccgcgugagaaauauaccuaguaggauuucuaucuacuggaccauugucaagccaggagauauccugcuuaucaacuccacggguaauuugauugccccgcggggcuacuuuaaaauacgcagcgggaagucgucuaucaugcgauccgacgcgcccauuggaaaauguaacucagaaugcaucacuccuaauggcaguauaccaaacgacaagcccuuccagaaugugaacagaauuacauauggugcauguccuagguacgugaagcagaauacccugaaacuagccacugggaugcggaacgucccagagaagcaaacacguggaaucuuuggcgcuaucgccggcuucauugaaaaugggugggagggaaugguugaugguugguauggcuuccgccaccagaacagcgaggggaucggacaggcagcugaccucaaauccacccaagccgcgauugaucagauaaacggcaagcugaauagacuuaucgguaaaacgaacgaaaaguuucaccagauugagaaagaguucucugaaguggaagggaggauccaggaccuggagaaguacguagaggauaccaagaucgacuuguggagcuauaaugccgaacuccugguggcauuagagaaccaacauacaauugaucugacugacucagaaaugaauaaacucuuugagaagaccaaaaagcagcuucgggaaaacgcugaggauaugggcaauggaugcuucaaaauauaccacaagugugacaacgccugcaucggcaguauucgaaaugggacauaugaucaugacgucuaccgcgacgaggcucugaacaauagauuucagaucaagggaguggaauugaaauccgguuacaaggauuggauucuauggaucagcuucgccauaucuugcuuucugcucuguaucgcacugcuuggcuucauuaugugggccugccagaaagggaacaucagguguaauauuugcaucuga

SEQ ID NO: 130665 - RNA, 1701 nt, Artificial Sequence; identical to SEQ ID NO: 130585
  derived and/or modified CDS sequence (opt3) from hemagglutinin__InfluenzaA__ACO94760

SEQ ID NO: 130666 - RNA, 1701 nt, Artificial Sequence
  derived and/or modified CDS sequence (opt3) from hemagglutinin__InfluenzaA__ACO94771
augaagaccaucauugcccugagcuacauacucugccuuguguucgcucagaaacugcccggcaacgacaauuccacagcaacuuuguguuuagggcaccaugccgucccuaacggaacgaucguuaagaccauuacaaaugaucaaaucgaggugacuaacgcgaccgaacugguacagucuucaaguacaggugagauuugcgacagcccacaccagauccuagauggcgaaaauuguacccucauagacgcucugcuuggggauccgcagugcgacggauuucaaaacaaaaagugggaucuguucguggagagauccaaagccuauucuaauuguuaccccuaugacgucccugauuacgcaucguugaggucacucguggccagcaguggcacucuggaauuuaacaaugaguccuucaacuggacagguguuacccagaaugggacgucuagcgcuugcauccggcgcuccaacaauucauuuuucagucgacugaacuggcucacucauuuaaaguuuaaguauccagcacugaaugugaccaugcccaacaacgagcaguucgacaaacuuuacauuuggggaguccaccauccuggcacagauaaugaccagaucuuuuuguaugcccaagcuagcggccguauuacugugucuaccaagagaucccagcagacaguaaucccaaacauagggucaaggccccggguucgcaauauuccuagcagaaucaguauuuacuggaccaucgugaaaccaggagauauccugcuaauuaacucuacggguaaucucauagccccgaggggcuacuucaagauccgguccgggaaaagcucgauuaugcgcucugacgcgcccaucggaaaguguaacuccgaaugcauaacuccuaauggcucaauuccaaacgacaagcccuuucagaaugucaaccgaaucacauauggugcauguccuagauacgugaaacaaaauacccugaagcuggccacugggaugaggaacgugccagagaaacagacacggggaaucuucggcgcuauugccggcuuuaucgaaaaugggugggagggaauggucgaugguugguauggcuuccgucaccagaacagugaggggcgcggacaagcagcugaccuuaagagcacccaggccgcgauugaucagauaaauggcaaauugaacagacucaucgguaagacgaacgaaaaauuccaccagauugagaaggaauuuuccgagguugaagggaggauccaagaccuggagaaguacguggaggauaccaaaaucgacuuauggucuuauaaugccgaacugcucguagcacuugagaaccagcauacaauugaucugacugacagcgaaaugaauaaguuguucgagaaaaccaagaaacagcuacgggaaaacgcugaggauaugggcaauggaugcuuuaagauauaccacaagugugacaacgccugcaucggcucaauucgaaaugggacauaugaucaugacguguaccgcgacgaggcucugaacaauagauuccagaucaaaggagucgaacucaagagugguuacaaagauuggauucuguggaucuccuuugccauaagcugccuucuguuguguguggcacuccugggcuucaucaugugggccugccaaaaggggaacauuagguguaauaucugcauuuga

SEQ ID NO: 130667 - RNA, 1701 nt, Artificial Sequence; identical to SEQ ID NO: 130482
  derived and/or modified CDS sequence (opt3) from hemagglutinin__InfluenzaA__ACO94782

SEQ ID NO: 130668 - RNA, 1701 nt, Artificial Sequence; identical to SEQ ID NO: 130482
  derived and/or modified CDS sequence (opt3) from hemagglutinin__InfluenzaA__ACO94793

SEQ ID NO: 130669 - RNA, 1698 nt, Artificial Sequence
  derived and/or modified CDS sequence (opt3) from hemagglutinin__InfluenzaA__ACO94804
augaaggugaaacugcucguccuucugugcaccuucacagccacuuacgcugacacgaucuguauuggcuaucacgcaaacaauagcaccgauacaguugacacuguguuggagaagaacguaaccgugacacauuccgucaauuuacuggaagauucucacaacgggaaacuaugccuccugaagggaauagcgccccuucagcuggguaauuguucaguggccggcuggaucuuggggaacccugagugcgaacuccugauuaguagagagagcugguccuacaucguugaaaaaccaaauccggagaacggaaccuguuaucccggccauuuugcugacuacgaggaacugagggagcaacucucuucggugagcucauucgaacgguuugagauuuucccuaaggagaguuccuggccaaaucacacuacaaccggugucucugccagcugcucccauaacggggaaucaaguuuuuauaagaauuuacuguggcuuacgggaaagaacggcuuguaccccaaucugagcaagucuuaugcaaacaauaaagagaaggaagugcuaguacucuggggcguucaccacccuccaaacaucgggaaccagcgcgcccuguaccauacugagaaugcuuacguguccgucgugucaagccacuauagucgaaaauucacccccgaaauagcaaagcguccuaaggugagagaucaggagggaaggaucaacuacuauuggacacuucuggagccaggugacacuauuaucuuugaagccaauggcaacuugauugcuccgcgguacgccuucgcgcucucucgcggguuuggauccggcaucauaaauagcaacgcacccauggaugguugugacgccaaaugccagaccccucaaggggcuauuaauucgucucugccauuccagaacguccaucccguuacaaucggagaguguccuaaguaugugagauccgccaaauuaaggaugguaaccggccugcggaauauuccaucaauccagagucgcggccucuuuggggcaaucgcuggauucauugaagguggcuggacggggaugguggauggaugguacggcuaucaccaccagaacgagcaagguagcggguacgccgcggaccagaaguccacucagaaugccauaaacggcaucacaaauaaagucaacucugugauugaaaagaugaauacccaguuuacugcaguuggaaaagaguucaacaaacuugagcgaagaauggaaaaccugaauaagaaaguggaugacggcuucaucgauauauggacauacaacgcugaguugcuaguccugcucgaaaaugagaggacccuggacuuucaugacagcuaugugaagaaccuuuacgaaaaaguaaagucacaacugaaaaauaacgccaaggagauugggaauggaugcuucgaguuuuaucacaaguguaacgaugaaugcauggagaguguuaaaaaugguacguacgacuaucccaaguacuccgaagagagcaaauugaaccgggagaagaucgauggcgugaaacucgaaucuaugggggucuaucagauccuggcuauuuacucaaccguggccaguagcuuaguccugcuagugucccucggagcaaucucuuucuggaugugcucgaauggcagccugcagugucguauuugcauauga

SEQ ID NO: 130670 - RNA, 1701 nt, Artificial Sequence; identical to SEQ ID NO: 130349
  derived and/or modified CDS sequence (opt3) from hemagglutinin__InfluenzaA__ACO94815

SEQ ID NO: 130671 - RNA, 1701 nt, Artificial Sequence; identical to SEQ ID NO: 130356
  derived and/or modified CDS sequence (opt3) from hemagglutinin__InfluenzaA__ACO94848

SEQ ID NO: 130672 - RNA, 1698 nt, Artificial Sequence; identical to SEQ ID NO: 130536
  derived and/or modified CDS sequence (opt3) from hemagglutinin__InfluenzaA__ACO94859

SEQ ID NO: 130673 - RNA, 1698 nt, Artificial Sequence
  derived and/or modified CDS sequence (opt3) from hemagglutinin__InfluenzaA__ACO94870
augaaggugaaacugcucguccuucugugcaccuucacagccacuuacgcugacacgaucuguauuggcuaucacgcaaacaauagcaccgauacaguugacacuguguuggagaagaacguaaccgugacacauuccgucaauuuacuggaaaacucucacaaugggaaacuaugccuccugaagggaauagcgccccuucagcuggguaacuguucaguggccggcuggaucuuggggaauccugagugcgaacuccugauuaguaaagagagcugguccuacaucguugaaaagccaaacccggagaauggaaccuguuaucccggccauuuugcugauuacgaggaacugagagagcaacucucuucggugagcucauucgaaagguuugagauuuucccuaaggagaguuccuggccaaaccacacugucacaggugugucugccagcugcucccauaauggggaaucaaguuuuuaucggaacuuacuguggcuuaccgggaaaaauggcuuguaccccaaccugagcaagucuuaugcaaauaacaaaggcaaggagguucuaguacucuggggagugcaccacccuccaaacaucggagaccagaauacgcuguaccauacugaaaacgccuacgucuccguggugucaagccacuauagucgcaaauucacccccgagauagcuaagcgaccuaagguccgugaucaggaagguagaaucaauuacuauuggacacuucuggagccaggcgacacuauuaucuuugaggcaaacgggaauuugauugccccgagguacgcuuucgcccucaaccggggauuuggcucugguaucauaaauuccaacgcgcccauggauaaaugugacgcaaagugccagaccccucaaggggccauuaauagcucgcugccauuccagaacguucaucccgugacaaucggagaauguccuaaauauguacgcucugcuaaguuaagaauggugaccggccugaggaauauuccauccauccagucacggggccucuuuggggccaucgcaggauucauugaggguggcuggacggggauggucgauggaugguacggcuaucaccaccagaacgaacaagguaguggguacgcugccgaccagaaaagcacucagaaugcgauaaacggcaucacaaauaaggugaacuccguuauugagaaaaugaacacccaguuuacugccgugggaaaggaguucaauaaacuugaacgccgaauggagaaccugaauaaaaaggucgaugacggcuucaucgauauauggacauacaacgcagaauugcuagugcugcucgagaaugaaagaacccuggacuuucaugacucuaacguaaagaaucuuuaugagaagguuaaaagccaacugaagaacaaugcuaaggaaauugggaacggaugcuucgaguuuuaccacaaauguaaugaugagugcauggaaucagugaagaacgguacguaugacuaccccaaauauagugaggaauccaaguugaauagggagaaaaucgauggcgucaagcucgagagcauggggguguaccagauccuggccauuuauucuaccgucgcuucaaguuuagugcugcuaguuagccucggagccaucuccuucuggaugugcucuaacggcucgcugcagugucggauuugcauauga

SEQ ID NO: 130674 - RNA, 1701 nt, Artificial Sequence
  derived and/or modified CDS sequence (opt3) from hemagglutinin__InfluenzaA__ACO94881
augaagaccaucauugcccugagcuacauacucugccuuguguucgcucagaaacugcccggcaacgacaauuccacagcaacuuuguguuuagggcaccaugccgucccuaacggaacgaucguuaagaccauuacaaaugaucaaaucgaggugacuaacgcgaccgaacugguacagucuucaaguacagguggcauuugcgacagcccacaccagauccuagauggggagaauuguacccucauagacgcucugcuuggagauccgcagugcgacggcuuucaaaacaaaaagugggaucuguucguggaaagauccaaagccuauucuaauuguuaccccuaugacgucccugauuacgcaucguugaggucacucguggccagcagugguacucuggaguuuaacaaugaauccuucgacuggacagggguuacccagaacggaacgucuagcuccugcaagcggcgcucaaauaacagcuuuuucagucgacugaauuggcucacucauuuaaaguauaaauacccagcucugaacgugaccaugcccaauaacgagaaguuugauaaacuuuauaucuggggcguccaccauccuggcacagacucugaucagauuuccuuguacgcacaggccucagggcguaucacugugagcaccaagagaagucaacagacaguaauuccaaacaucggaucuaggccccggguucgcgacguguccagcagaauaucgauuuacuggaccaucgucaaaccuggugacauucugcuaaucaauucuacgggcaaccucaucgcuccaaggggguauuucaagauucgguccggaaagucaaguauaaugcgcagcgaugccccgaucggcaaauguaauuccgagugcauuacucccaacgguucuaucccuaaugacaagccauuucagaacgugaaucgaauaacauacggggcgugucccagauaugugaaacagaacacccugaaacuugcaacuggaaugaggaaugucccugaaaaacaaacacggggcauuuucggcgccaucgcuggguuuaucgagaacggaugggaagguaugguugauggcugguacggguuccgucaccagaauagcgagggaaccggccaggccgcagaccugaagucaacgcaagcugccauuaaccagaucaaugguaaauugaaccgccucauugggaagaccaaugagaaguuucaccagauagaaaaagaguucagugaaguggagggcagaauccaggaucuggaaaaguauguagaggacacaaaaauugauuuaugguccuacaacgcggagcugcucguggcccuugaaaaccaacauacuaucgaccugaccgauagcgagaugaauaaguuguucgaaaggacaaagaagcagcuacgggagaacgcagaagacaugggaaauggcugcuuuaagaucuaucaccgaugugauaacgcuugcauugggucuauacgcaauggaacuuacgaccaugacgucuacagagaugaggcccugaacaauagguuccagaucaaagguguggagcucaagucaggcuauaaagacuggauucuguggaucaguuuugcuauuagcugcuuccuucuguguguugccuugcucggguuuaucaugugggcaugccagaagggaaacauacgguguaauaucugcauuuga

SEQ ID NO: 130675 - RNA, 1701 nt, Artificial Sequence
  derived and/or modified CDS sequence (opt3) from hemagglutinin__InfluenzaA__ACO94892
augaagaccaucauugcccugagcuacauacucugccuuguguucgcucagaaacugcccggcaacgacaauuccacagcaacuuuguguuuagggcaccaugccgucccuaacggaacgaucguuaagaccauuacaaaugaucaaaucgaggugacuaacgcgaccgaacugguacagucuucaaguacagguggcauuugcgacagcccacaccagauccuagauggggagaauuguacccucauagacgcucugcuuggagauccgcagugcgacggcuuucaaaacaaaaagugggaucuguucguggaaagauccaaagccuauucuaauuguuaccccuaugacgucccugauuacgcaucguugaggucacucguggccagcagugguacucuggaguuuaacaaugaauccuucaacuggacagggguuacccagaauggaacgucuagcgcuugccagcggcgcuccaacaagucauuuuucagucgacugaauuggcucacucauuuaaaguuuaaauauccagcacugaacgugaccaugcccaauaacgagaaguucgacaaacuuuacaucuggggcguccaccauccuggcacagauaacgaccagauuagcuuguaugcccaaacuucugggcguaucaccauuuccacaaagagaucacagcagaccgugaucccaaauauaggaagcaggccccggguacgcgauguuccuaguagaauuucuaucuacuggacgauugugaaaccaggugacauccugcuaaucaacuccacuggcaaucucauugcuccgaggggguacuuuaagauacggagcggaaagucgucuaucaugcgcuccgacgcccccauugucaaauguaacucagagugcaucacaccuaauggcaguauaccaaacgauaagcccuuccagaaugugaaccgaauuaccuauggugcguguccuagauacgugaaacaaaauacucugaaacuugcaacagggaugaggaacgucccagaacggcagacccguggaaucuuuggcgccaucgcuggcuucauugagaaugggugggaaggaaugguugacgguugguauggcuuucgccaccagaacagcgaggggacgggacaagccgcagaucugaaguccacccaggcugccaucaaucagauuaacggcaaguugaauagacucauagguaaaacaaacgagaaguuccaccagaucgaaaaggaguucucugaaguggaggggaggauucaagaccuggaaaaauacguagaggauacuaagaucgacuuauggagcuauaacgcggagcugcucguggcccuugaaaaucagcauaccaucgaucugacagacucagagaugaacaaauuguuugaacggacuaagaaacagcuacgagagaaugcagaagauaugggcaacggaugcuucaagauuuaccacaagugugacaaugcuugcauaggcaguauccgcaacgggaccuaugaucaugacgucuacagagacgaggcccugaauaacagguuucagauuaaaggaguggagcucaaguccgguuacaaagauuggauccuguggauuagcuucgcuaucucuugcuuucuucuguguguugccuugcucggcuucauaaugugggcaugccaaaaggggaauauccgguguaacauuugcaucuga

SEQ ID NO: 130676 - RNA, 1701 nt, Artificial Sequence
  derived and/or modified CDS sequence (opt3) from hemagglutinin__InfluenzaA__ACO94903
augaagaccaucauugcccugagcuacauacucugccuuguguucgcucagaaacugcccggcaacgacaauuccacagcaacuuuguguuuagggcaccaugccgucccuaacggaacgaucguuaagaccauuacaaaugaucaaaucgaggugacuaacgcgaccgaacugguacagucuucaaguacagguggcauuugcgacagcccacaccagauccuagauggggagaauuguacccucauagacgcucugcuuggagauccgcagugcgacggcuuucaaaacaaaaagugggaucuguucguggaaagauccgaggccuauucuaauuguuaccccuaugacgucccugauuacgcaucguugaggucacucguggccagcagugguacucuggaauuuaacaaugaguccuucaacuggacagggguuacccagaauggaacgucuagcgcuugcaaacggcgcuccaacaagucauuuuucagucgacugaauuggcucacucauuuaaaguuuaaauauccagcacugaacgugaccaugcccaauaacgagaaguucgacaaacuuuacaucuggggcguccaccauccuggcacagauaacgaccagauuagcuuguaugcccaggcuucugggcguaucacuguguccaccaagagaucacaacagacaguaauuccaaauaucggaagcaggccccggguucgcgaugugccuaguagaauaucuauuuacuggaccaucgucaaaccaggugacauucugcuaaucaacuccacgggcaaucucaucgccccgaggggguacuuuaagauucggagcggaaagucgucuauaaugcgcuccgacgcgcccaucggcaaauguaacucagaaugcauuacuccuaaugguaguaucccaaacgauaagcccuuccagaaugugaaccgaauaacauauggggcauguccuagauacgugaaacagaauacccugaaacuugccacuggaaugaggaacgucccagagaaacaaacacggggcauuuuuggcgcuaucgccggguucaucgaaaauggaugggaggguaugguugacggcugguauggguuucgucaccagaacagcgagggaaccggccaggcagcugaucugaaguccacgcaagccgcgauuaaucagaucaacgguaaauugaaucgccucauugggaagaccaacgaaaaguuccaccagauagagaaagaguucucugaaguggaaggcagaauccaggaccuggagaaguacguagaggauacaaaaauugacuuauggagcuauaacgccgaacugcucguggcacuugagaaucaacauacuaucgaucugaccgacucagaaaugaacaaguuguuugagaggacaaagaagcagcuacgggaaaaugcugaggauaugggaaacggcugcuucaagaucuaccacaaaugugacaaugccugcauugggaguauacgaaacggaacuuaugaucaugacgucuaccgcgacgaggcucugaauaacagauuucagaucaaggguguggaacucaaauccggcuacaaggauuggauucuguggaucagcuucgccauuucuugcuuucuucuguguguugcauugcucggguucaucaugugggccugccagaaaggaaauauaagguguaacaucugcauuuga

SEQ ID NO: 130677 - RNA, 1701 nt, Artificial Sequence
  derived and/or modified CDS sequence (opt3) from hemagglutinin__InfluenzaA__ACO94925
augaagaccaucauugcccugagcuacauacucugccuuguguucgcucagaaacugcccggcaacgacaauuccacagcaacuuuguguuuagggcaccaugccgucccuaacggaacgguugugaagaccaucacaaaugaucaaauugagguaacuaacgcgaccgaacuggugcagucuucaaguacagguggcaucugcgacagcccacaccagauucuagauggggagaauuguacccucaucgacgcucugcuuggagauccgcagugcgacggcuuucaaaacaaaaagugggaucuguucgucgaaagauccaaagccuauucuaauuguuaccccuaugacgugccugauuacgcaucguugaggucacucguugccagcagugguacucuggaguuuaacaaugaauccuucaacuggacaggggugacccagaauggaacgucuagcgcuugcaagcggcgcuccaacaagucauuuuucagucgacugaauuggcucacucauuuaaaauuuaaguauccagcacugaacgucaccaugcccaauaacgagaaauucgacaaacuuuacauauggggcgugcaccauccuggcacagauaacgaccagaucagcuuguaugcccaggcuucugggcguauuacuguauccaccaagagaucacaacagacaguuaucccaaauauuggaagcaggccccgggugcgcgaugucccuaguagaaucucuauauacuggaccauugugaagccaggugacauccugcuaauuaacuccacgggcaaucucaucgccccgaggggguacuuuaagauccggagcggaaaaucgucuauuaugcgcuccgacgcgcccauaggcaaguguaacucagagugcaucacuccuaaugguaguauuccaaacgauaaacccuuccagaaugugaaccgaaucacauauggggcauguccuagauacgucaagcagaauacccugaaacuugccacuggaaugaggaacguuccagaaaagcaaacacggggcauauuuggcgcuauugccggguucaucgagaauggaugggaagguaugguggacggcugguauggguuucgucaccagaacagcgagggaaccggccaggcagcugaucugaaauccacgcaagccgcgaucaaucagauuaacgguaaguugaaucgccucaucgggaagaccaacgagaaauuccaccagauugaaaaggaguucucugaaguagagggcagaauacaggaccuggaaaaauacguggaggauacaaagaucgacuuauggagcuauaacgccgagcugcucgucgcacuugaaaaucaacauacuauugaucugaccgacucagagaugaacaaauuguuugaaaggacaaagaagcagcuacgggagaaugcugaagauaugggaaacggcugcuucaaaaucuaccacaagugugacaaugccugcaucgggaguauucgaaacggaacuuaugaucaugacguguaccgcgacgaggcucugaauaacagauuucagauaaaagguguugagcucaaguccggcuacaaagauuggauccuguggauuagcuucgccaucucuugcuuucuucuguguguggcauugcucggguucauuaugugggccugccagaagggaaauaucagguguaacauaugcaucuga

SEQ ID NO: 130678 - RNA, 1701 nt, Artificial Sequence
  derived and/or modified CDS sequence (opt3) from hemagglutinin__InfluenzaA__ACO94936
augaagaccaucauugcccugagcuacauacucugccuuguguucgcucagaaacugcccggcaacgacaauuccacagcaacuuuguguuuagggcaccaugccgucccuaacggaacgaucguuaagaccauuacaaaugaucaaaucgaggugacuaacgcgaccgaacugguacagucuucaaguacagguggcauuugcgacagcccacaccagauccuagauggggaggacuguacccucauagaugcucugcuuggagacccgcagugcgauggcuuucaaaauaaaaagugggaccuguucguggaaagauccaaagccuauucuaacuguuaccccuaugaugucccugacuacgcaucguugaggucacucguggccagcagugguacucuggaguuuaauaacgaauccuucgauuggacagggguuacccagaauggaacgucuagcuccugcaagcggcgcucaaacaauagcuuuuucagucgacugaacuggcucacucauuuaaaguauaaauacccagcucugaaugugaccaugcccaacaaugagaaguuugacaaacuuuauaucuggggcguccaccauccuggcacagauucugaccagauuuccuuguacgcacaggccucagggcguaucacugugagcaccaagagaagucaacagacaguaauuccaaacaucggaucuaggccccggguucgcgacguguccagcagaauaucgauuuacuggaccaucgucaaaccuggugauauucugcuaaucaacucuacgggcaaucucaucgcuccaaggggguauuucaagauucgguccggaaagucaaguauaaugcgcagcgacgccccgaucggcaaauguaacuccgagugcauuacucccaaugguucuaucccuaacgauaagccauuucagaaugugaaccgaauaacauacggggcgugucccagauaugugaaacagaauacccugaaacuugcaacuggaaugaggaacgucccugaaaaacaaacacggggcauuuucggcgccaucgcuggguuuaucgagaauggaugggaagguaugguugacggcugguacggguuccgucaccagaacagcgagggaaccggccaggccgcagaucugaagucaacgcaagcugccauuaaucagaucaacgguaaauugaaucgccucauugggaagaccaacgagaaguuucaccagauagaaaaagaguucagugaaguggagggcagaauccaggaccuggaaaaguauguagaggauacaaaaauugacuuaugguccuacaaugcggagcugcucguggcccuugaaaaccaacauacuaucgaucugaccgacagcgagaugaacaaguuguucgaaaggacaaagaagcagcuacgggagaaugcagaagauaugggaaacggcugcuuuaagaucuaucacaaaugugacaaugcuugcauugggucuauacgaaacggaacuuacgaccaugaugucuaccgcgacgaggcccugaauaacagauuccagaucaaggguguggagcucaaaucaggcuauaaggauuggauucuguggaucaguuuugcuauuagcugcuuccuucuguguguugccuugcucggguuuaucaugugggcaugccagaaaggaaauauaagguguaacaucugcauuuga

SEQ ID NO: 130679 - RNA, 1701 nt, Artificial Sequence
  derived and/or modified CDS sequence (opt3) from hemagglutinin__InfluenzaA__ACO94947
augaagaccaucauugcccugagcuacauacucugccuuguguucgcucagaaacugcccggcaacgacaauuccacagcaacuuuguguuuagggcaccaugccgucccuaacggaacgaucguuaagaccauuacaaaugaucaaaucgaggugacuaacgcgaccgaacugguacagucuucaaguacagguggcauuugcgacagcccacaccagauccuagauggggagaauuguacccucauagacgcucugcuuggagauccgcagugcgacggcuuucaaaacaaaaagugggaucuguucguggaaagauccaaagccuauucuaauuguuaccccuaugacgucccugauuacgcaucguugaggucacucguggccagcagugguacucuggaguuuaacaaugaauccuucaacuggacagggguuacccagaauggaacgucuagcgcuugcaagcggcgcuccaacaagucauuuuucagucgacugaauuggcucacucauuuaaaauuuaaguauccagcacugaacgugaccaugcccaauaacgagaaauucgacaaacuuuacaucuggggcguccaccauccuggcacagauaacgaccagauuagcuuguaugcccaggcuucugggcguaucacuguguccaccaaaagaucacaacagacaguaauuccaaauaucggaagcaggccccggguucgcgaugugccuaguagaauaucuauuuacuggaccaucgucaagccaggugacauucugcuaaucaacuccacgggcaaucucaucgccccgaggggguacuuucggauucgcagcggaaagucgucuauaaugcgauccgacgcgcccaucggcaaauguaacucagagugcauuacuccuaaugguaguaucccaaacgauaagcccuuccagaaugugaacagaauaacauauggggcauguccuagguacgugaaacagaauacccugaaacuugccacuggaaugcggaacgucccagaaaagcaaacacguggcauuuuuggcgcuaucgccggguucaucgagaauggaugggaagguaugguugacggcugguauggguuucgccaccagaacagcgagggaaccggccaggcagcugaucugaaguccacgcaagccgcgauuaaucagaucaacgguaaauugaauagacucauugggaagaccaacgagaaguuccaccagauagaaaaagaguucucugaaguggagggcaggauccaggaccuggaaaaguacguagaggauacaaaaauugacuuauggagcuauaacgccgagcugcucguggcacuugaaaaucaacauacuaucgaucugaccgacucagagaugaacaaguuguuugaacggacaaagaagcagcuacgagagaaugcugaagauaugggaaacggcugcuucaagaucuaccacaaaugugacaaugccugcauugggaguauacgcaacggaacuuaugaucaugacgucuacagagacgaggcucugaauaacagguuucagaucaaggguguggagcucaaauccggcuacaaggauuggauucuguggaucagcuucgccauuucuugcuuucuucuguguguugcauugcucggguucaucaugugggccugccagaaaggaaauauacgguguaacaucugcauuuga

SEQ ID NO: 130680 - RNA, 1701 nt, Artificial Sequence
  derived and/or modified CDS sequence (opt3) from hemagglutinin__InfluenzaA__ACO95153
augaagaccaucauugcccugagcuacauacucugccuuguguucgcucagaaacugcccggcaacgacaauuccacagcaacuuuguguuuagggcaccaugccgucccuaacggaacgaucguuaagaccauuacaaaugaucaaaucgaggugacuaacgcgaccgaacugguacagucuucaaguacagguggcauuugcgacagcccacaccagauccuagauggggagaauuguacccucauagacgcucugcuuggagauccgcagugcgacggcuuucaaaacaaaaagugggaucuguucguggaaagauccaaagccuauucuaauuguuaccccuaugacgucccugauuacgcaucguugaggucacucguggccagcagugguacucuggaguuuaacaaugaauccuucaacuggacagggguuacccagaauggaacgucuagcgcuugcaagcggcgcuccaacaauucauuuuucagucgacugaacuggcucacucauuuaaaguuuaaauauccagcacugaaugugaccaugcccaacaacgagaauuucgacaaacuuuacaucuggggcguccaccauccuggcacagauaacgaccagauuagcuuguaugcccaggcuucugggcguaucacuguguccaccaagagaucacaacagacaguaauuccaaauaucggaagcaggccccggguucgcgauauaaguucuagaauuuccaucuacuggaccauugugaagccuggugacauccugcuaaucaacagcacgggcaaucucauugccccaaggggguacuuuaaaauacggucgggaaagucuuccaucaugcgcucagacgcgccgauuggcaaguguaacagugagugcaucacucccaaugguagcauaccuaacgauaaaccauuccagaaugucaaccgaauuacauauggggcaugucccagauacgugaagcagaauacccugaaacuugccacuggaaugaggaacgugccugaaacacaaacccggggcaucuuuggcgcuaucgccggguucauugagaauggaugggaagguauggucgacggcugguauggguuucgucaccagaacuccgagggaacgggccaggcagcugaucugaagucuacccaagccgcgaucaaucagauuaacgguaaauugaaccgccucauagggaagacaaaugagaaauuccaccagaucgaaaaggaguucagcgaaguugagggcaggauucaggaccuggaaaaguacguggaggauacuaaaaucgacuuauggucauauaacgccgagcugcucguagcacuugaaaaucaacauaccaucgaucugacagacagugagaugaacaaguuguuugaaagaacuaaaaagcagcuacgggagaaugcugaagauaugggaaacggcugcuucaaaauuuaccacaagugugacaaugccugcauaggguccauccgaaacggaaccuaugaucaugacguguaccgcgacgaggcucugaauaacagauuucagauuaagggugucgagcucaaaagcggcuacaaggauuggauccuguggauuucuuucgccaucucaugcuuucuucuguguguggcauugcucggguucauaaugugggccugccagaaaggaaauaucagguguaacauuugcaucuga

SEQ ID NO: 130681 - RNA, 1701 nt, Artificial Sequence; identical to SEQ ID NO: 130646
  derived and/or modified CDS sequence (opt3) from hemagglutinin__InfluenzaA__ACO95171

SEQ ID NO: 130682 - RNA, 1701 nt, Artificial Sequence
  derived and/or modified CDS sequence (opt3) from hemagglutinin__InfluenzaA__ACO95193
augaagaccaucauugcccugagcuacauacucugccuuguguucgcucagaaacugcccggcaacgacaaguccacagcaacuuuguguuuagggcaccaugccgucccuaauggaacgaucguuaaaaccauuacaaacgaucaaaucgaggugacuaaugcgaccgaacugguacagucuucaaguacagguggcauuugcgacagcccacaccagauccuagauggggagaacuguacccucauagacgcucugcuuggagauccgcagugcgacggcuuucaaaauaagaaaugggaucuguucguggaaagauccaaggccuauucuaacuguuaccccuaugacgucccugauuacgcaucguugaggucacucguggccagcagugguacucuggaguuuaauaacgaaaauuucaacuggacagggguuacccagaauggaacguccucugcuugcaagcggcgcagcaacaauuccuuuuucucacgacugaacuggcucacucauuuaaaauuuaaguauccagcacugaaugugaccaugcccaacaacgagaaauucgacaaacuuuacaucuggggcguccaccauccuggcacagauaaugaccagauuaguuuguaugcccaggcuagcgggcguaucacugugucuaccaagagaucccaacagacaguaauuccaaacaucggaucaaggccccggguucgcgauauaagcaguagaauuucuaucuacuggaccauugugaagccuggugacauccugcuaaucaauuccacgggcaaccucauugccccaaggggguacuuuaagauacggagcggaaaaucgucuaucaugcgcuccgacgcgccgauuggcaaguguucaagugagugcaucacucccaaugguagcauaccuaacgauaaaccauuccagaaugucaaccgaauuacauauggggcaugucccagauacgugaagcagaauacccugaaacuugccacuggaaugaggaacgugccugaaacacaaacccggggcaucuuuggcgcuaucgccggguucauugagaauggaugggaagguauggucgacggcugguauggguuucgucaccagaacuccgagggaacgggccaggcagcugaucugaagucuacccaagccgcgaucaaucagauuaacgguaaauugaaucgccucauagggaagacaaacgagaaguuccaccagaucgaaaaagaguucagcgaaguugagggcaggauucaggaccuggaaaaguacguggaggauacuaaaaucgacuuauggucauauaacgccgagcugcucguagcacuugaaaaucaacauaccaucgaucugacagacagugagaugaacaaguuguuugaaagaacuaaaaagcagcuacgggagaaugcugaagauaugggaaacggcugcuucaagauuuaccacaaaugugacaaugccugcauaggguccauccgaaacggaaccuaugaucaugacguguaccgcgacgaggcucugaauaacagauuucagauuaagggugucgagcucaaaagcggcuacaaggauuggauccuguggauuucuuucgccaucucaugcuuucuucuguguguggcauugcucggguucauaaugugggccugccagaaaggaaauaucagguguaacauuugcaucuga

SEQ ID NO: 130683 - RNA, 1701 nt, Artificial Sequence; identical to SEQ ID NO: 130645
  derived and/or modified CDS sequence (opt3) from hemagglutinin__InfluenzaA__ACO95204

SEQ ID NO: 130684 - RNA, 1701 nt, Artificial Sequence
  derived and/or modified CDS sequence (opt3) from hemagglutinin__InfluenzaA__ACO95215
augaagaccaucauugcccugagcuacauacucugccuuguguucgcucagaaacugcccggcaacgacaauuccacagcaacuuuguguuuagggcaccaugccgucccuaacggaacgaucguuaagaccauuacaaaugaucaaaucgaggugacuaacgcgaccgaacugguacagucuucaaguacagguggcauuugcgacagcccacaccagauccuagauggggagaauuguacccucauagacgcucugcuuggagauccgcagugcgacggcuuucaaaacaaaaagugggaucuguucguggaaagauccaaagccuauucuaauuguuaccccuaugacgucccugauuacgcaucguugaggucacucaucgccagcagugguacucuggaguuuaacaaugaauccuucaacuggacaggggugacccagaauggaacgucuagcgcuugcaagcggcgcuccaacaauucauuuuucagucgacugaacuggcucacucauuuaaaguuuaaauauccagcacugaauguuaccaugcccaacaacgagaaguucgacaaacuuuacauuuggggcgugcaccauccuggcacagauaaugaccagaucagcuuguaugcccaggcuucugggcguauuacugucuccaccaagagaucacaacagacagugaucccaaacauaggaagcaggccccggguacgcgauauuaguucuagaaucuccauuuacuggaccaucguuaaaccuggugacauccugcuaauuaauagcacgggcaaccucauagccccaaggggguacuuuaagauccggucgggaaagucuuccauuaugcgcucagacgcgccgaucggcaaauguaauagugagugcauaacucccaacgguagcauuccuaaugauaagccauuccagaacgugaaucgaaucacauauggggcaugucccagauacgucaaacagaacacccugaaacuugccacuggaaugaggaaugugccugaaacacaaacccggggcaucuuuggcgcuauugccggguucaucgagaacggaugggaagguaugguggacggcugguauggguuucgucaccaaaauuccgagggaacgggccaggcagcugaucugaagucuacccaggccgcgauuaaccagauaaaugguaaguugaaccgccucaucgggaaaacaaacgagaaguuccaccagauugaaaaggaguucagcgaagucgagggcagaauccaggaccuggaaaaauacguugaggauacuaagaucgacuuauggucauauaaugccgagcugcucguggcacuugaaaaccaacauaccauugaucugacagacagugagaugaauaaauuguuugaaaggacuaagaaacagcuacgggagaacgcugaagauaugggaaauggcugcuucaagauauaccacaagugugacaacgccugcaucggguccauucgaaaugagaccuaugaucaugacguauaccgcgacgaggcucugaacaauagauuucagaucaaaagcguggaacucaagucuggauacaaagauuggauucuguggaucucauucgccauaaguugcuuucuucugugugucgcauugcucgguuucaucaugugggccugccagaagggcaacauuagguguaauaucugcauuuga

SEQ ID NO: 130685 - RNA, 1701 nt, Artificial Sequence; identical to SEQ ID NO: 128329
  derived and/or modified CDS sequence (opt3) from hemagglutinin__InfluenzaA__ACO95226

SEQ ID NO: 130686 - RNA, 1701 nt, Artificial Sequence; identical to SEQ ID NO: 128678
  derived and/or modified CDS sequence (opt3) from hemagglutinin__InfluenzaA__ACO95248

SEQ ID NO: 130687 - RNA, 1701 nt, Artificial Sequence
  derived and/or modified CDS sequence (opt3) from hemagglutinin__InfluenzaA__ACO95270
augaagaccaucauugcccugagcuacauacucugccuuguguucacacagaaacugcccggcaacgacaauuccacugcuacguuguguuuagggcaccaugcagucccuaacggaaccaucguuaagacaauuacuaaugaucaaaucgaggugaccaacgccacagaacugguacagucuucaaguaccggugagauuugcgacagcccacaccagauccuagauggcgaaaauuguacucucauagacgcgcugcuuggggauccgcagugcgacggauuucaaaacaaaaagugggaucuguucguggagagauccaaggcuuauucuaauuguuaccccuaugacgucccugauuacgccucguugaggucacucguggcaagcaguggcacacuggaauuuaacaaugaguccuucaacuggaccgguguuacgcagaaugggacuucuagcgccugcauccggcgcuccaacaauucauuuuucagucgacugaacuggcucacccauuuaaaguuuaaguauccagcucugaaugugacaaugcccaacaacgagaaauucgacaaacuuuacauuuggggaguccaccauccugugacugauaauaaccagaucuuuuuguaugcacaggccagcggccguauuaccguaucuacaaaaagaucccaacagaccguuaucccaaauauaggcucaaggccccgggugcgcaacauuccuagcagaaucaguauuuacuggacgaucgucaagccaggggacauccugcuaauuaauucuacuggaaaccucauagcuccgagggguuacuucaaaauccgguccggcaagagcucgauuaugcgcucugaugcccccaucgggaaguguaauuccgaaugcauaacaccuaacggaucaauuccaaaugacaaacccuuucagaacgugaaucgaaucaccuauggcgcguguccuagauacgugaagcagaacacucugaaacuugcaacagguaugaggaaugucccagagaagcaaacccgggggaucuucggagccauugcuggcuuuaucgaaaacggcugggaggggaugguugacggaugguaugguuuccgucaccagaauagugagggcauugggcaggccgcagaucugaaaagcacgcaagcugccauagaccagaucaacggaaaguugaaccgccucauuggcaaaaccaaugaaaaguuccaccagaucgagaaggaauuuuccgagguggaagguagaauccaggaucuggagaaauacguagaggacacaaagauugauuuauggucuuauaacgcggaacugcucguggcccuugagaaucaacauacuauagaccugaccgauagcgaaaugaacaaauuguucgagaagacuaaaaagcagcuaagggaaaaugcagaggacauggggaacggcugcuuuaagaucuaccacaaaugugauaaugcuugcauuggaucaauccggaacggcacauaugaccaugaugucuaccgagacgaggcccugaauaaccgcuuccagauuaaggggguggaacucaaaaguggauacaaggacuggauccuguggauauccuuugcuaucagcugcuuccuucuguguguugccuugcucgguuuuauuaugugggcaugccagaaaggcaauaucagauguaacauuugcaucuga

SEQ ID NO: 130688 - RNA, 1701 nt, Artificial Sequence; identical to SEQ ID NO: 130482
  derived and/or modified CDS sequence (opt3) from hemagglutinin__InfluenzaA__ACO95281

SEQ ID NO: 130689 - RNA, 1701 nt, Artificial Sequence
  derived and/or modified CDS sequence (opt3) from hemagglutinin__InfluenzaA__ACO95292
augaagaccaucauugcccugagcuacauacucugccuuguguucgcucagaaacugcccggcaacgacaauuccacagcaacuuuguguuuagggcaccaugccgucccuaacggaacgaucguuaagaccauuacaaaugaucaaaucgaggugacuaacgcgaccgaacugguacagucuucaaguacaggugagauuugcgacagcccacaccagauccuagauggcgaaaauuguacccucauagacgcucugcuuggggauccgcagugcgacggauuucaaaacaaaaagugggaucuguucguggagagauccaaagccuauucuaauuguuaccccuaugacgucccugauuacgcaucguugaggucacucguggccagcaguggcacucuggaauuuaacaaugaguccuucaacuggacagguguuacccagaaugggacgucuagcgcuugcauccggcgcuccaacaauucauuuuucagucgacugaacuggcucacucauuuaaaguuuaaguauccagcacugaaugugaccaugcccaacaacgagcaguucgacaaacuuuacauuuggggaguccaccauccuggcacagauaaugaccagaucuuuuuguaugcccaagcuagcggccguauuacugugucuaccaagagaucccagcagacaguaaucccaaacauagggucaaggccccggguucgcaauauuccuagcagaaucaguauuuacuggaccaucgugaaaccaggagauauccugcuaauuaacucuacggguaaucucauagccccgaggggcuacuucaagauccaguccgggaaaagcucgauuaugcggucugacgcgcccaucggaaaguguaacuccgaaugcauaacuccuaauggcucaauuccaaacgacaagcccuuucaaaaugucaaccgcaucacauauggugcauguccucgauacgugaaacagaauacccugaagcuggccacugggaugagaaacgugccagagaaacagacaaggggaaucuucggcgcuauugccggcuuuaucgaaaaugggugggagggaauggucgaugguugguauggcuuccggcaccaaaacagugaggggcguggacaggcagcugaccuuaagagcacccaggccgcgauugaucagauaaauggcaaauugaaccgccucaucgguaagacgaacgaaaaauuccaccaaauugagaaggaauuuuccgagguugaagggagaauccaggaccuggagaaguacguggaggauaccaaaaucgacuuauggucuuauaaugccgaacugcucguagcacuugagaaccagcauacaauugaucugacugacagcgaaaugaauaaguuguucgagaaaaccaagaaacagcuaagggaaaacgcugaggauaugggcaauggaugcuuuaagauauaccacaagugugacaacgccugcaucggcucaauucggaaugggacauaugaucaugacguguaccgagacgaggcucugaacaaucgcuuccaaaucaaaggagucgaacucaagagugguuacaaagauuggauucuguggaucuccuuugccauaagcugcuuccuucuguguguggcauugcucggcuuuaucaugugggccugccagaaggggaacauuagauguaauaucugcauuuga

SEQ ID NO: 130690 - RNA, 1701 nt, Artificial Sequence; identical to SEQ ID NO: 130585
  derived and/or modified CDS sequence (opt3) from hemagglutinin__InfluenzaA__ACO95303

SEQ ID NO: 130691 - RNA, 1698 nt, Artificial Sequence
  derived and/or modified CDS sequence (opt3) from hemagglutinin__InfluenzaA__ACO95382
augaaggugaaacugcucguccuucugugcaccuucacagccacuuacgcugacacgaucuguauuggcuaucacgcaaacaauagcaccgauacaguugacacuguguuggagaagaacguaaccgugacacauuccgucaauuuacuggaaaacucucacaaugggaaacuaugccuccugaagggaauagcgccccuucagcuggguaacuguucaguggccggcuggaucuuggggaauccugagugcgaacuccugauuaguaaagagagcugguccuacaucguugaaaagccaaacccggagaauggaaccuguuaucccggccauuuugcugauuacgaggaacugagagagcaacucucuucggugagcagcuucgaaagguuugagauuuucccuaaggaggguaguuggccaaaccacacugucacagggguguccgccucuugcagccauaauggagaauccucauuuuaucggaacuuacuguggcuuaccggcaaaaauggcuuguaccccaaccugaguaagagcuaugcaaauaacaaagagaaggaaguucuaguacucuggggagugcaccacccuccaaacaucggggaccagaaagcccuguaccauacggagaaugcuuacgucucugugguguccucacacuauagccgcaaguucacucccgaaauagcaaagcgaccuaaaguccgugaucaggaggguagaaucaacuacuauuggacccuucuggagccaggcgacacaauuaucuuugaagccaaugggaacuugauugcuccgagguacgccuucgcgcucagucggggauuuggcucugguaucauaaauuccaacgcacccauggauaagugugacgccaaaugccagacuccucaaggggcuauuaauagcucgcugccauuccagaacguucaucccgugaccaucggagaguguccuaaguauguacgcucugccaaauuaagaauggugacaggccugaggaauauuccauccauccagucacggggccucuuuggggcaaucgcuggauucauugaagguggcuggaccgggauggucgauggaugguacggcuaucaccaccagaacgagcaagguaguggguacgccgcggaccagaagucaacgcagaaugccauaaacggcaucacuaauaaagugaacuccguuauugaaaagaugaauacacaguuuaccgcagugggaaaggaguucaacaaacuugagcgccgaauggaaaaccugaauaagaaagucgaugacggcuucaucgauauauggacuuacaacgcugaguugcuagugcugcucgaaaaugagagaacacuggacuuucaugacucuaacguaaagaaucuuuaugaaaaaguuaagagccaacugaagaacaaugccaaagagauugggaacggaugcuucgaguuuuaccacaaguguaaugaugaaugcauggagucagugaaaaacgguaccuaugacuaccccaaguauagugaagaguccaaauugaauagggagaagaucgauggcgucaagcucgaaagcauggggguguaccagauccuggcuauuuauucuacggucgccucaaguuuagugcugcuaguuagccucggagcaaucuccuucuggaugugcucuaacggcucgcugcagugucggauuugcauauga

SEQ ID NO: 130692 - RNA, 1698 nt, Artificial Sequence
  derived and/or modified CDS sequence (opt3) from hemagglutinin__InfluenzaA__ACO95415
augaaggugaaacugcucguccuucugugcaccuucacagccacuuacgcugacacgaucuguauuggcuaucacgcaaacaauagcaccgauacaauagacacuguuuuggagaagaacgugaccguaacacauuccgugaauuuacuggaaaacucucacaaugggaaacuaugccuccugaagggaaucgcgccccuucagcuggguaacuguucagucgccggcuggauuuuggggaauccugagugcgaacuccugaucaguaaagagagcugguccuacauuguggaaaagccaaacccggagaauggaaccuguuaucccggccauuuugcugauuacgaggaacugagagagcaacucucuucgguuagcucauucgaaagguuugagaucuucccuaaggagaguuccuggccaaaccacacugugacaggugucucugccagcugcucccauaauggggaaucaaguuuuuaucggaacuuacuguggcuuaccgggaaaaauggcuuguaccccaaccugagcaagucuuaugcaaauaacaaaggcaaggaggugcuaguacucuggggaguucaccacccuccaaacauaggagaccagaauacgcuguaccauacugaaaacgccuacguguccgucgugucaagccacuauagucgcaaauucacccccgagaucgcuaagcgaccuaaggugcgugaucaggaagguagaauuaauuacuauuggacacuucuggagccaggcgacacuaucauuuuugaggcaaacgggaauuugaucgccccgagguacgcuuucgcccucucucggggauuuggcuccgguauaauuaacagcaaugcgcccauggauaaaugugacgcaaagugccagaccccucaaggggccaucaacucgucucugccauuccagaauguccaucccguuacaauuggagaauguccuaaauaugugcgcuccgcuaaguuaagaaugguaaccggccugaggaacaucccaucaauccagagucggggccucuuuggggccauugcaggauucauagaggguggcuggacggggaugguggauggaugguacggcuaucaccaccagaaugaacaagguagcggguacgcugccgaccagaaauccacucagaacgcgaucaauggcauuacaaacaaggucaauucugugaucgagaaaaugaacacccaguuuacugccguuggaaaggaguucaacaaacuugaacgccgaauggagaaucugaacaagaagguggaugacggcuucauagauauuuggacauacaaugcagaauugcuaguccugcucgagaacgaaagaacccuggacuuucaugacagcaaugugaaaaaccuuuaugagaagguaaaaucacaacugaagaauaacgcuaaggaaaucgggaauggaugcuucgaguuuuaccacaaauguaacgaugagugcauggaaaguguuaagaaugguacguaugacuaccccaaauauuccgaggaaagcaaguugaacagggagaaaaucgauggcgugaagcucgagucuaugggggucuaccagauucuggccaucuauucaaccguggcuaguagcuuaguccugcuagugucccucggagccauuucuuucuggaugugcucgaauggcagccugcagugucggauaugcaucuga

SEQ ID NO: 130693 - RNA, 1701 nt, Artificial Sequence
  derived and/or modified CDS sequence (opt3) from hemagglutinin__InfluenzaA__ACO95426
augaagaccaucauugcccugagcuacauacucugccuuguguucgcucagaaacugcccggcaacgacaauuccacagcaacuuuguguuuagggcaccaugccgucccuaacggaacgaucguuaagaccauuacaaaugaucaaaucgaggugacuaacgcgaccgaacugguacagucuucaaguacagguggcauuugcgacagcccacaccagauccuagauggggagaauuguacccucauagacgcucugcuuggagauccgcagugcgacggcuuucaaaacaaaaagugggaucuguucguggaaagauccaaagccuauucuaauuguuaccccuaugacgucccugauuacgcaucguugaggucacucguggccagcagugguacucuggaguuuaacaaugaauccuucgacuggacagggguuacccagaacggaacgucuagcuccugcaagcggcgcucaaauaacagcuuuuucagucgacugaauuggcucacucauuuaaaguauaaauacccagcucugaacgugaccaugcccaauaacgagaaguuugauaaacuuuauaucuggggcguccaccauccuggcacagacucugaucagauuuccuuguacgcacaggccucagggcguaucacugugagcaccaagagaagucaacagacaguaauuccaaacaucggaucuaggccccggguucgcgacguguccagcagaauaucgauuuacuggaccaucgucaaaccuggugacauucugcuaaucaauucuacgggcaaccucaucgcuccaaggggguauuucaagauucgguccggaaagucaaguauaaugcgcagcgaugccccgaucggcaaauguaauuccgagugcauuacucccaacgguucuaucccuaaugacaagccauuucagaacgugaaucgaauaacauacggggcgugucccagauaugugaaacagaacacccugaaacuugcaacuggaaugaggaaugucccugaaaaacaaacacggggcauuuucggcgccaucgcuggguuuaucgagaacggaugggaagguaugguugauggcugguacggguuccgucaccagaauagcgagggaaccggccaggccgcagaccugaagucaacgcaagcugccauuaaccagaucaaugguaaauugaaccgccucauugggaagaccaaugagaaguuucaccagauagaaaaagaguucagugaaguggagggcagaauccaggaucuggaaaaguauguagaggacacaaaaauugauuuaugguccuacaacgcggagcugcucguggcccuugaaaaccaacauacuaucgaccugaccgauagcgagaugaauaaguuguucgaaaggacaaagaagcagcuacgggagaacgcagaagacaugggaaauggcugcuuuaagaucuaucacaaaugugauaacgcuugcauugggucuauacgaaauggaacuuacgaccaugacgucuaccgcgaugaggcccugaacaauagauuccagaucaaggguguggagcucaaaucaggcuauaaggacuggauucuguggaucaguuuugcuauuagcugcuuccuucuguguguugccuugcucggguuuaucaugugggcaugccagaaaggaaacauaagguguaauaucugcauuuga

SEQ ID NO: 130694 - RNA, 1701 nt, Artificial Sequence; identical to SEQ ID NO: 129843
  derived and/or modified CDS sequence (opt3) from hemagglutinin__InfluenzaA__ACO95437

SEQ ID NO: 130695 - RNA, 1701 nt, Artificial Sequence
  derived and/or modified CDS sequence (opt3) from hemagglutinin__InfluenzaA__ACO95448
augaagaccaucauugcccugagcuacauacucugccuuguguucgcucagaaacugcccggcaacgacaauuccacagcaacuuuguguuuagggcaccaugccgucccuaacggaacgaucguuaagaccauuacaaaugaucaaaucgaggugacuaacgcgaccgaacugguacagucuucaaguacagguggcauuugcgacagcccacaccagauccuagauggggagaauuguacccucauagacgcucugcuuggagauccgcagugcgacggcuuucaaaacaaaaagugggaucuguucguggaaagauccaaagccuauucuaauuguuaccccuaugacgucccugauuacgcaucguugaggucacucaucgccagcagugguacucuggaguuuaacaaugaauccuucaacuggacaggggugacccagaauggaacgucuagcgcuugcaagcggcgcuccaacaauucauuuuucagucgacugaacuggcucacucauuuaaaguuuaaauauccagcacugaauguuaccaugcccaacaacgaggaguucgacaaacuuuacauuuggggcgugcaccauccuggcacagauaaugaccagaucaacuuguaugcccaggcuagcgggcguauuacugucucuaccaagagaucccaacagacagugaucccaaauauaggaucaaggccccggguacgcgauauuccuagcagaaucaguauuuacuggaccaucguuaagccaggugacauccugcuaauuaacucuacgggcaaucucauagccccgaggggguacuuuaaaauccgguccggaaagagcucgauuaugcgcucugacgcgcccaucggcaaguguaacuccgaaugcauaacuccuaaugguucaauuccaaacgauaaacccuuccagaaugugaaccgaaucacauauggggcauguccuagauacgucaagcagaauacccugaaacuugccacuggaaugaggaacgugccagagaagcaaacacggggcaucuuuggcgcuauugccggguucaucgaaaauggaugggaggguaugguggacggcugguauggguuucgucaccagaacagugagggaauuggccaggcagcugaucugaaaagcacccaagccgcgauagaccagaucaaugguaaguugaaccgccucauugggaaaacgaacgaaaaguuccaccagaucgagaaggaguucuccgaagucgaaggcagaauccaggaucuggagaaauacguugaggacaccaagauugauuuauggucuuauaaugccgaacugcucguggcacuugagaaccaacauacaauagaccugacugauagcgaaaugaauaaauuguuugagaggaccaagaaacagcuacgggaaaacgcugaggacaugggaaauggcugcuucaagaucuaccacaagugugauaacgccugcauugggucaauccgaaauggaacauaugaccaugacguauaccgcgaugaggcucugaacaauagauuucagauuaaagguguggaacucaagaguggcuacaaagacuggauccuguggauauccuucgccaucagcugcuuucuucugugugucgcauugcucggguucauuaugugggccugccagaagggaaacaucagguguaauauuugcaucuga

SEQ ID NO: 130696 - RNA, 1701 nt, Artificial Sequence; identical to SEQ ID NO: 128678
  derived and/or modified CDS sequence (opt3) from hemagglutinin__InfluenzaA__ACO95459

SEQ ID NO: 130697 - RNA, 1701 nt, Artificial Sequence
  derived and/or modified CDS sequence (opt3) from hemagglutinin__InfluenzaA__ACO95470
augaagaccaucauugcccugagcuacauacucugccuuguguucgcucagaaacugcccggcaacgacaauuccacagcaacuuuguguuuagggcaccaugccgucccuaacggaacgaucguuaagaccauuacaaaugaucaaaucgaggugacuaacgcgaccgaacugguacagucuucaaguacagguggcauuugcgacagcccacaccagauccuagauggggagaauuguacccucauagacgcucugcuuggagauccgcagugcgacggcuuucaaaacaaaaagugggaucuguucguggaaagauccaaagccuauucuaauuguuaccccuaugacgucccugauuacgcaucguugaggucacucguggccagcagugguacucuggaguuuaacaaugaauccuucaacuggacagggguuacccagaauggaacgucuagcgcuugcaagcggcgcuccaacaauucauuuuucagucgacugaacuggcucacucauuuaaaguuuaaauauccagcacugaaugugaccaugcccaacaacgagaaguucgacaaacuuuacaucuggggcguccaccauccuggcacagauaaugaccagaucuuuuuguaugcccaggcuagcgggcguauuacugugucuaccaagagaucccaacagacaguaauuccaaacaucggaucaaggccccggguucgcaauauaccuagcagaauuaguaucuacuggaccauugugaaaccaggugauauccugcuaaucaacucuacgggcaaucucauugccccgaggggguacuucaagauacgguccggaaagagcucgaucaugcgcucugacgcgcccauuggccgauguaacuccgagugcaucacuccuaaugguucaauaccaaacgacaaacccuuucagaaugucaacagaauuacauauggggcauguccuagguacgugaagcagaauacccugaaacuugccacuggaaugcggaacgugccagaaaagcaaacacguggcaucuucggcgcuaucgccggguuuauugagaauggaugggaagguauggucgauggcugguauggguuccgccaccagaacagugagggaaucggccaggcagcugaccugaaaagcacccaagccgcgauuaaucagauaaacgguaaguugaacagacucaucgggaaaacgaaugagaaguuccaccagauugaaaaggaguuuuccgaaguugagggcaggauccaggaucuggaaaaauacguggaggacaccaagaucgauuuauggucuuauaacgccgagcugcucguagcacuugaaaaucaacauacaauugaccugacugauagcgagaugaacaaauuguucgaacggaccaagaaacagcuacgagagaaugcugaagacaugggaaacggcugcuuuaagauauaccacaagugugauaaugccugcaucgggucaauucgcaacggaacauaugaccaugauguguacagagacgaggcucugaauaacagguuccagaucaaaggugucgagcucaagaguggcuacaaagacuggauucuguggaucuccuuugccauaagcugcuuccuucuguguguggcauugcucggguuuaucaugugggccugccagaagggaaauauucgguguaacaucugcauuuga

SEQ ID NO: 130698 - RNA, 1701 nt, Artificial Sequence
  derived and/or modified CDS sequence (opt3) from hemagglutinin__InfluenzaA__ACO95481
augaagaccaucauugcccugagcuacauacucugccuuguguucgcucagaaacugcccggcaacgacaauuccacagcaacuuuguguuuagggcaccaugccgucccuaacggaacgaucguuaagaccauuacaaaugaucaaaucgaggugacuaacgcgaccgaacugguacagucuucaaguacagguggcauuugcgacagcccacaccagauccuagauggggagaauuguacccucauagacgcucugcuuggagauccgcagugcgacggcuuucaaaacaaaaagugggaucuguucguggaaagauccaaagccuauucuaauuguuaccccuaugacgucccugauuacgcaucguugaggucacucguggccagcagugguacucuggaguuuaacaaugaauccuucaacuggacagggguuacccagaauggaacgucuagcgcuugcaagcggcgcuccaacaauucauuuuucagucgacugaacuggcucacucauuuaaaguuuaaauauccagcacugaaugugaccaugcccaacaacgagaaguucgacaaacuuuacaucuggggcguccaccauccuggcacagauaaugaccagaucuuuuuguaugcccaggcuagcgggcguauuacugugucuaccaagagaucccaacagacaguaauuccaaacaucggaucaaggccccggguucgcaauauaccuagcagaauuaguaucuacuggaccauugugaaaccaggugauauccugcuaaucaacucuacgggcaaucucauugccccgaggggguacuucaagauacgguccggaaagagcucgaucaugcgcucugacgcgcccauuggcaaauguaacuccgagugcaucacuccuaaugguucaauaccaaacgacaagcccuuucagaaugucaaccgaauuacauauggggcauguccuagauacgugaaacagaauacccugaaguuggccacuggaaugaggaaccugccagaaaaacaaacacggggcaucuucggcgcuaucgccggguuuauugagaauggaugggaagguaugguggauggcugguauggguuccgucaccagaacagugagggaaucggccaggcagcugaccuuaagagcacccaagccgcgauuaaucagauaaacgguaaacucaaccgccugaucgggaagacgaaugagaaguuccaccagauugaaaaagaguuuuccgaagucgagggcagaauccaggauuuagaaaaguacguugaggacaccaaaaucgaucuguggucuuauaacgccgagcuccuuguggcacuggaaaaucaacauacaauugacuugacugauagcgagaugaacaagcuauucgaaaggaccaaaaagcagcugcgggagaaugcugaagacaugggaaacggcugcuuuaagauauaccacaaaugugauaaugccugcaucgggucaauucgaaacggaacauaugaccaugauguauaccgcgacgaggcucucaauaacagauuccagaucaaggguguggagcugaaaaguggcuacaaggacuggauucuuuggaucuccuuugccauaagcugcuuccuguugugugucgcacuccugggguuuaucaugugggccugccagaaaggaaauauuagguguaacaucugcauuuga

SEQ ID NO: 130699 - RNA, 1701 nt, Artificial Sequence; identical to SEQ ID NO: 128678
  derived and/or modified CDS sequence (opt3) from hemagglutinin__InfluenzaA__ACO95492

SEQ ID NO: 130700 - RNA, 1701 nt, Artificial Sequence; identical to SEQ ID NO: 128678
  derived and/or modified CDS sequence (opt3) from hemagglutinin__InfluenzaA__ACO95503

SEQ ID NO: 130701 - RNA, 1701 nt, Artificial Sequence; identical to SEQ ID NO: 128678
  derived and/or modified CDS sequence (opt3) from hemagglutinin__InfluenzaA__ACO95514

SEQ ID NO: 130702 - RNA, 1701 nt, Artificial Sequence; identical to SEQ ID NO: 128678
  derived and/or modified CDS sequence (opt3) from hemagglutinin__InfluenzaA__ACO95536

SEQ ID NO: 130703 - RNA, 1701 nt, Artificial Sequence; identical to SEQ ID NO: 128678
  derived and/or modified CDS sequence (opt3) from hemagglutinin__InfluenzaA__ACO95547

SEQ ID NO: 130704 - RNA, 1701 nt, Artificial Sequence
  derived and/or modified CDS sequence (opt3) from hemagglutinin__InfluenzaA__ACP41963
augaaggccauccuggugguccuccuuuacaccuucgcuacagcaaacgccgacacucugugcauuggcuaucacgcgaauaacagcacggauaccguugacacaguguuggagaaaaauguaacugugacccauuccgucaacuuacuggaagauaagcacaaugggaaacuauguaagcucagaggaguggcuccccugcaucuugguaaaugcaacauagccggcuggauccuggggaauccugagugugaaucuuugucaacagcaaguagcugguccuacauuguugagaccucuucgucagacaacggaacuugcuauccaggcgauuuuaucgacuacgaggagcucagggagcagcugagcaguguguccucuuucgaacgguuugagauuuucccgaagacaagcuccuggcccaaucacgauucaaacaagggugucaccgccgcuuguccucaugcaggggccaaaaguuuuuauaagaaucugaucuggcucgugaaaaagggaaacagcuacccaaaauuaucuaaguccuauauaaaugacaagggcaaagaaguacugguucuuuggggcauccaccaccccucaacgagcgcugaucaacagaguuuguaccagaacgccgacgcguacguguucgucgggucuucccgcuauagcaagaaauuuaagccugagauugcaauccgaccaaaagugcgugaucaggagggaagaaugaauuacuauuggacucugguggaacccggugacaagauuaccuucgaggccacaggcaaccuagucguuccuagguacgcuuuugccauggaacggaacgcagggucgggaaucauaauuucugauacuccagugcaugacugcaauaccacaugucaaaccccgaaaggcgcuaucaacacgucccuccccuuccagaauauucacccuaucacuaucgguaagugcccaaaguauguaaaaucaacaaagcugcgccuugccaccgggcugagaaacgugcccaguauucagagcaggggauuguuuggcgcgauagccggcuucaucgaagggggauggacugguauggucgacggcugguacggguaucaucaccagaaugaacaaggauccggcuacgcagcugaucucaaaucuacacagaacgccauugacgagaucaccaauaaggugaacagcguuauagagaaaaugaauacgcaguuuaccgcuguggguaaggaguucaaccaccuggaaaagcggauugaaaauuuaaacaaaaaggucgaugacggguuccuggauaucuggacauacaaugccgagcuccuugugcuguuggaaaacgagcgcacucuagacuaucaugauucaaauguaaagaaccuguacgagaagguucgaagucagcucaaaaacaaugcaaaggaaaucggcaacggauguuuugaguucuaucacaagugcgacaauaccuguauggaauccgugaaaaacggcacauacgauuauccuaaguacagcgaggaagccaaacugaauagagaggagauugacggggucaaacuugaaucuacuaggaucuaucaaauucuggcuauauacucaaccguggcgaguagcuugguccucgugguuucccugggagcaaucucuuuuuggaugugcucgaacgguagcuuacagugccggauuuguaucuga

SEQ ID NO: 130705 - RNA, 1698 nt, Artificial Sequence; identical to SEQ ID NO: 130691
  derived and/or modified CDS sequence (opt3) from hemagglutinin__InfluenzaA__ACP44192

SEQ ID NO: 130706 - RNA, 1698 nt, Artificial Sequence; identical to SEQ ID NO: 130691
  derived and/or modified CDS sequence (opt3) from hemagglutinin__InfluenzaA__ACP44203

SEQ ID NO: 130707 - RNA, 1698 nt, Artificial Sequence
  derived and/or modified CDS sequence (opt3) from hemagglutinin__InfluenzaA__ACP44225
augaaggugaaacugcucguccuucugugcaccuucacagccacuuacgcugacacgaucuguauuggcuaucacgcaaacaauagcaccgauacaguugacacuguguuggagaagaacguaaccgugacacauuccgucaauuuacuggaaaacucucacaaugggaaacuaugccuccugaagggaauagcgccccuucagcuggguaacuguucaguggccggcuggaucuuggggaauccugagugcggacuccugauuaguaaagaaagcugguccuacaucguugagaagccaaacccggaaaauggcaccuguuaucccggucauuuugcugauuacgaggagcugagagaacaacucucuucggugagcucauucgagagguuugaaauuuucccuaaggagaguuccuggccaaaccacacugucacaggggugucugccagcugcucccauaauggagagucaaguuuuuaucggaacuuacuguggcuuaccggcaaaaauggcuuguaccccaaccugagcaagucuuaugcaaauaacaaagaaaaggagguucuaguacucuggggagugcaccacccuccaaacaucggggaccagaaagcccuguaccauacggaaaaugcuuacgucuccguggugucaagccacuauagucgcaaguucacucccgagauagcaaagcgaccuaaaguccgugaucaggaagguagaaucaacuacuauuggacccuucuggagccaggcgacacaauuaucuuugaggccaaugggaacuugauugcuccgagguacgccuucgcgcucucucggggauuuggcuccgguaucauaaauagcaacgcacccauggauaagugugacgccaaaugccagacuccucaaggggcuauuaauucgucucugccauuccagaacguucaucccgugaccaucggagaauguccuaaguauguacgcuccgccaaauuaagaauggugacaggccugaggaauauuccaucaauccagagucggggccucuuuggggcaaucgcuggauucauugaggguggcuggaccgggauggucgauggaugguacggcuaucaccaccagaacgaacaagguagcggguacgccgcggaccagaaguccacgcagaaugccauaaacggcaucacuaauaaagugaacucuguuauugagaagaugaauacacaguuuaccgcagugggaaaggaguucaacaaacuugaacgccgaauggagaaccugaauaagaaagucgaugacggcuucaucgauauauggacuuacaacgcugaauugcuagugcugcucgagaaugaaagaacacuggacuuucaugacagcaacguaaagaaucuuuaugagaaaguuaagucacaacugaagaacaaugccaaagaaauugggaacggaugcuucgaguuuuaccacaaguguaaugaugagugcauggaaagugugaaaaacgguaccuaugacuaccccaaguauuccaaagagagcaaguugaauagggaaaagaucgauggcgucaaacucgagucuauggggguguaccagauccuggcuauuuauucaacggucgccaguagcuuagugcugcuaguuucccucggagcaaucucuuucuggaugugcucgaacggcagccugcagugucggauuugcauauga

SEQ ID NO: 130708 - RNA, 1701 nt, Artificial Sequence
  derived and/or modified CDS sequence (opt3) from hemagglutinin__InfluenzaA__ACP44236
augaagaccaucauugcccugagcuacauacucugccuuguguucgcucagaaacugcccggcaacgacaauuccacagcaacuuuguguuuagggcaccaugccgucccuaacggaacgaucguuaagaccauuacaaaugaucaaaucgaggugacuaacgcgaccgaacugguacagucuucaaguacagguggcauuugcgacagcccacaccagauccuagauggggagaauuguacccucauagacgcucugcuuggagauccgcagugcgacggcuuucaaaacaaaaagugggaucuguucguggaaagauccaaagccuauucuaauuguuaccccuaugacgucccugauuacgcaucguugaggucacucguggccagcagugguacucuggaguuuaacaaugaauccuucaacuggacagggguuacccagaauggaacgucuagcgcuugcaagcggcgcuccgacaagucauuuuucagucgacugaacuggcucacucauuuaaaauuuaaguauccagcacugaaugugaccaugcccaacaaugagaaauucgauaaacuuuacaucuggggcguccaccauccuggcacagacaacgaucagauuagcuuguaugcccaggcuucugggcguaucacuguguccaccaagagaucacaacagacaguaauuccaaacaucggaagcaggccccggguucgcgacgugccuaguagaauaucuauuuacuggaccaucgucaagccaggugacauucugcuaaucaauuccacgggcaaccucaucgccccgaggggguacuuuaagauucggagcggaaaaucgucuauaaugcgcuccgaugcgcccaucggcaaguguaauucagagugcauuacuccuaacgguaguaucccaaaugacaaacccuuccagaacgugaaucgaauaacauauggggcauguccuagauacgugaagcagaacacccugaaacuugccacuggaaugaggaaugucccagaaaagcaaacacggggcauuuuuggcgcuaucgccggguucaucgagaacggaugggaagguaugguugauggcugguauggguuucgucaccagaauagcgagggaaccggccaggcagcugaccugaaauccacgcaagccgcgauuaaccagaucaaugguaaguugaaccgccucauugggaagaccaaugagaaauuccaccagauagaaaaggaguucucugaaguggagggcagaauccaggaucuggaaaaauacguagaggacacaaagauugauuuauggagcuauaacgccgagcugcucguggcacuugaaaaccaacauacuaucgaccugaccgauucagagaugaauaaauuguuugaaaggacaaagaagcagcuacgggagaacgcugaagacaugggaaauggcugcuucaaaaucuaccacaagugugauaacgccugcauugggaguauacgaaauggaacuuaugaccaugacgucuaccgcgaugaggcucugaacaauagauuucagaucaaagguguggagcucaaguccggcuacaaagacuggauucuguggaucagcuucgccauuucuugcuuucuucuguguguugcauugcucggguucaucaugugggccugccagaagggaaacauaagguguaauaucugcauuuga

SEQ ID NO: 130709 - RNA, 1701 nt, Artificial Sequence; identical to SEQ ID NO: 130645
  derived and/or modified CDS sequence (opt3) from hemagglutinin__InfluenzaA__ACP44247

SEQ ID NO: 130710 - RNA, 1701 nt, Artificial Sequence; identical to SEQ ID NO: 128678
  derived and/or modified CDS sequence (opt3) from hemagglutinin__InfluenzaA__ACP44258

SEQ ID NO: 130711 - RNA, 1701 nt, Artificial Sequence; identical to SEQ ID NO: 128678
  derived and/or modified CDS sequence (opt3) from hemagglutinin__InfluenzaA__ACP44269

SEQ ID NO: 130712 - RNA, 1701 nt, Artificial Sequence; identical to SEQ ID NO: 130704
  derived and/or modified CDS sequence (opt3) from hemagglutinin__InfluenzaA__ACQ44554

SEQ ID NO: 130713 - RNA, 1701 nt, Artificial Sequence; identical to SEQ ID NO: 130704
  derived and/or modified CDS sequence (opt3) from hemagglutinin__InfluenzaA__ACQ44556

SEQ ID NO: 130714 - RNA, 1701 nt, Artificial Sequence; identical to SEQ ID NO: 130704
  derived and/or modified CDS sequence (opt3) from hemagglutinin__InfluenzaA__ACQ45338

SEQ ID NO: 130715 - RNA, 1701 nt, Artificial Sequence
  derived and/or modified CDS sequence (opt3) from hemagglutinin__InfluenzaA__ACQ55359
augaaggccauccuggugguccuccuuuacaccuucgcuacagcaaacgccgacacucugugcauuggcuaucacgcgaauaacagcacggauaccguugacacaguguuggagaagaauguaacugugacccauuccgucaacuuacuggaagauaagcacaaugggaaacuauguaagcucagaggaguggcuccccugcaucuugguaaaugcaacauagccggcuggauccuggggaauccugagugugaaucuuugucaacagcaaguagcugguccuacauuguugagaccccaucuucggacaacggaacuugcuauccgggcgauuuuaucgacuacgaggagcucagggagcagcugucaagcgugaguuccuucgaacgguuugagauuuuccccaagacaucuagcuggccuaaucacgauuccaacaagggugucaccgccgcuuguccacaugcaggggccaaaucauuuuauaagaaucugaucuggcucgugaaaaagggaaacaguuaccccaaauuaagcaagucuuauauaaaugacaagggcaaagaaguacugguucuuuggggcauccaccacccuuccacgucagcugaucaacagagcuuguaccagaacgccgacgcguacguguucgucgggaguucucgcuauuccaagaaauuuaagccagagauugcaauccgacccaaagugcgugaucaggagggaagaaugaauuacuauuggacucugguggaaccuggugacaagauuaccuucgaggccacaggcaaccuagucguuccaagguacgcuuuugccauggaacggaacgcagggagcggaaucauaauuucggauacuccggugcaugacugcaauaccacaugucaaacccccaaaggcgcuaucaacacgucucucccuuuccagaauauucacccaaucacuaucgguaagugccccaaguauguaaaauccacaaagcugcgccuugccaccgggcugagaaacauuccuucaauacagaguaggggauuguuuggcgcgaucgccggcuucauugaagggggauggacugguaugguggacggcugguacggguaucaucaccagaaugaacaaggaagcggcuacgcagcugaucucaaauccacacagaacgccaucgacgagauaaccaauaaggucaacucugugauugagaaaaugaauacgcaguuuaccgcuguugguaaggaguucaaccaccuggaaaagcggaucgaaaauuuaaacaaaaagguggaugacggguuccuggauaucuggacauacaaugccgagcuccuuguccuguuggaaaacgagcgcacucuagacuaucaugauagcaaugugaaaaaccuguacgagaagguacgaucacagcucaaaaacaaugcaaaggaaauuggcaacggauguuuugaguucuaucacaagugcgacaauaccuguauggaaaguguuaaaaacggcacauacgauuauccaaaguacuccgaggaagccaaacugaauagagaggagaucgacggggugaaacuugaaagcacuaggauuuaucaaauacuggcuaucuacucuaccgucgcgucaaguuuggugcucgucgugagccugggagcaauuuccuuuuggaugugcucuaacgguucguuacagugccggaucuguaucuga

SEQ ID NO: 130716 - RNA, 1701 nt, Artificial Sequence; identical to SEQ ID NO: 130704
  derived and/or modified CDS sequence (opt3) from hemagglutinin__InfluenzaA__ACQ55361

SEQ ID NO: 130717 - RNA, 1701 nt, Artificial Sequence
  derived and/or modified CDS sequence (opt3) from hemagglutinin__InfluenzaA__ACQ63223
augaaggccauccuggugguccuccuuuacaccuucgcuacagcaaacgccgacacucugugcauuggcuaucacgcgaauaacagcacggauaccguugacacaguguuggagaaaaauguaacugugacccauuccgucaacuuacuggaagauaagcacaaugggaaacuauguaagcucagaggaguggcuccccugcaucuugguaaaugcaacauagccggcuggauccuggggaauccugagugugaaucuuugucaacagcaaguagcugguccuacauuguugagaccucuucgucagacaacggaacuugcuauccaggcgauuuuaucgacuacgaggagcucagggagcagcugagcaguguguccucuuucgaacgguuugagauuuucccgaagacaagcuccuggcccaaucacgauucaaacaagggugucaccgccgcuuguccucaugcaggggccaaaaguuuuuauaagaaucugaucuggcucgugaaaaagggaaacagcuacccaaaauuaucuaaguccuauauaaaugacaagggcaaagaaguacugguucuuuggggcauccaccaccccucaacgagcgcugaucaacagaguuuguaccagaacgccgacgcguacguguucgucgggacuucucgcuauuccaagaaauuuaagccugagauugcaauccgaccaaaagugcgugaucaggagggaagaaugaauuacuauuggacccugguggaacccggugacaagauuacauucgaggccacuggcaaccuagucguuccuagguacgcuuuugccauggaacggaacgcagggagcggaaucauaauuucggauaccccagugcaugacugcaauacaaccugucaaacgccgaaaggcgcuaucaacacuucucuccccuuccagaauauucacccuaucacaaucgguaagugcccaaaguauguaaaauccaccaagcugcgccuugccacugggcugagaaacgugcccucaauucagaguaggggauuguuuggcgcgauagccggcuucaucgaagggggauggacagguauggucgacggcugguacggguaucaucaccagaaugaacaaggaagcggcuacgcagcugaucucaaauccacccagaacgccauugacgagaucacgaauaaggugaacucuguuauagagaaaaugaauacccaguuuacagcuguggguaaggaguucaaccaccuggaaaagcggauugaaaauuuaaacaaaaaggucgaugacggguuccuggauaucuggacuuacaaugccgagcuccuugugcuguuggaaaacgagcgcacccuagacuaucaugauagcaauguaaagaaccuguacgagaagguucgaucacagcucaaaaacaaugcaaaggaaaucggcaacggauguuuugaguucuaucacaagugcgacaauacauguauggaaagugugaaaaacggcacuuacgauuauccuaaguacuccgaggaagccaaacugaauagagaggagauugacggggucaaacuugaaagcaccaggaucuaucaaauucuggcuauauacucuacaguggcgucaaguuugguccucgugguuagccugggagcaaucuccuuuuggaugugcucuaacgguucguuacagugccggauuuguaucuga

SEQ ID NO: 130718 - RNA, 1701 nt, Artificial Sequence; identical to SEQ ID NO: 130717
  derived and/or modified CDS sequence (opt3) from hemagglutinin__InfluenzaA__ACQ63239

SEQ ID NO: 130719 - RNA, 1701 nt, Artificial Sequence; identical to SEQ ID NO: 130717
  derived and/or modified CDS sequence (opt3) from hemagglutinin__InfluenzaA__ACQ63244

SEQ ID NO: 130720 - RNA, 1701 nt, Artificial Sequence; identical to SEQ ID NO: 130717
  derived and/or modified CDS sequence (opt3) from hemagglutinin__InfluenzaA__ACQ63257

SEQ ID NO: 130721 - RNA, 1701 nt, Artificial Sequence
  derived and/or modified CDS sequence (opt3) from hemagglutinin__InfluenzaA__ACQ65691
augaagaccaucauugcccugagcuacauacucugccuuguguucgcucagaaacugcccggcaacgacaauuccacagcaacuuuguguuuagggcaccaugccgucccuaacggaacgaucguuaagaccauuacaaaugaucaaaucgaggugacuaacgcgaccgaacugguacagucuucaaguacagguggcauuugcgacagcccacaccagauccuagauggggagaauuguacccucauagacgcucugcuuggagauccgcagugcgacggcuuucaaaacaaaaagugggaucuguucguggaaagauccaaagccuauucuaauuguuaccccuaugacgucccugauuacgcaucguugaggucacucguggccagcagugguacucuggaguuuaacaaugaauccuucaacuggacagggguuacccagaauggaacgucuagcuccugcaagcggggcucagacaacagcuuuuucagucgccugaauuggcucacucauuuaaaguuuaaauauccagcucugaacgugaccaugcccaauaacgagaaguucgauaaacuuuacaucuggggcguccaccauccugggacagacaacgaucagauuuuuccauaugcacaggccucuggacgaaucacuguguccaccaagcguucacaacagacaguaauucccaauaucgguagcagaccuaggguucgggacauaccaagucgcauuucuaucuacuggaccauugugaaaccgggcgacaucuugcugaucaacuccacggggaaucuaauugcucccagaggauacuucaagauaaggagcggcaagucgucuaucaugcgguccgaugccccuauugguaaauguaacucagagugcaucacuccaaaugggaguauacccaacgacaagccuuuucagaaugucaaccgcauuacauauggagcguguccacgauacgugaaacagaauacccucaagcuggcaacuggcaugagaaacgugcccgaaaaacaaacaaggggcaucuucggggccaucgcuggauuuauugagaaugguugggaaggcauggucgaugggugguauggauuccggcaccagaacagcgagggcaucggucaggccgcagaccuuaaguccacccaagcugccauuaaucagauaaacgggaaacugaaucguuugaucggcaagacgaacgagaaguuccaccagauugaaaaagaguuuucugaaguugagggacgcauccaggaucucgaaaaguacguggaggacaccaaaaucgaucuguggagcuauaacgcggaguuacugguagcccucgaaaaucaacauacaauugaccuuacugauucagagaugaacaagcuguucgaaagaaccaaaaagcaguugagggagaaugcagaagacaugggcaacgggugcuuuaagauauaccacaaaugugauaaugcuugcaucggaaguauucggaacgguacauaugaccaugacguguaccgagaugaggcccuaaauaaccgcuuccagaucaagggcgucgagcugaaauccggguacaaggacuggauucucuggaucagcuuuacuauaucuugcuuccugcuuuguguggcucuguugggauuuaucaugugggccugccagaaaggcaauauuagauguaacaucugcauuuga

SEQ ID NO: 130722 - RNA, 1701 nt, Artificial Sequence; identical to SEQ ID NO: 130482
  derived and/or modified CDS sequence (opt3) from hemagglutinin__InfluenzaA__ACQ65713

SEQ ID NO: 130723 - RNA, 1701 nt, Artificial Sequence
  derived and/or modified CDS sequence (opt3) from hemagglutinin__InfluenzaA__ACQ65724
augaagaccaucauugcccugagcuacauacucugccuuguguucgcucagaaacugcccggcaacgacaauuccacagcaacuuuguguuuagggcaccaugccgucccuaacggaacgaucguuaagaccauuacaaaugaucaaaucgaggugacuaacgcgaccgaacugguacagucuucaaguacaggugagauuugcgacagcccacaccagauccuagauggcgaaaauuguacccucauagacgcucugcuuggggauccgcagugcgacggauuucaaaacaaaaagugggaucuguucguggagagauccaaagccuauucuaauuguuaccccuaugacgucccugauuacgcaucguugaggucacucguggccagcaguggcacucuggaauuuaacaaugaguccuucaacugggcugguguuacacagaaugggaccucuagcgcaugcauccggcgcuccaacaauucauuuuucagucgacugaacuggcucacgcauuuaaaguuuaaguauccagcccugaaugugacuaugcccaacaacgagcaguucgacaaacuuuacauuuggggaguccaccauccuggcaccgauaaugaccagaucuuuuuguaugcucaagccagcggccguauuacagugucuacuaagagaucccagcagaccguaaucccaaacauagggucaaggccccggguucgcaauauuccuagcagaaucaguauuuacuggacaaucgugaaaccaggagauauccugcuaauuaacucuaccgguaaucucauagcgccgaggggcuacuucaagauccgguccgggaaaagcucgauuaugcgcucugacgcacccaucggaaaguguaacuccgaaugcauaacgccuaauggcucaauuccaaacgacaagcccuuucagaaugucaaccgaaucacuuauggugccuguccuagauacgugaaacaaaauacacugaagcuggcuaccgggaugaggaacgugccagagaaacagacucggggaaucuucggcgccauugcaggcuuuaucgaaaaugggugggagggaauggucgaugguugguauggcuuccgucaccagaacagugaggggcgcggacaagcugccgaccuuaagagcacacaggcggccauugaucagauaaauggcaaauugaacagacucaucgguaagaccaacgaaaaauuccaccagauugagaaggaauuuuccgagguugaagggaggauccaagaccuggagaaguacguggaggauacgaaaaucgacuuauggucuuauaaugcagaacugcucguagcucuugagaaccagcauaccauugaucugacagacagcgaaaugaauaaguuguucgagaaaacuaagaaacagcuacgggaaaacgccgaggauaugggcaauggaugcuuuaagauauaccacaagugugacaacgcuugcaucggcucaauucgaaaugggaccuaugaucaugacguguaccgcgacgaggcccugaacaauagauuccagaucaaaggagucgaacucaagagugguuacaaagauuggauucuguggaucuccuuugcaauaagcugcuuccuucuguguguggccuugcucggcuuuaucaugugggcuugccaaaaggggaacauuagguguaauaucugcauuuga

SEQ ID NO: 130724 - RNA, 1701 nt, Artificial Sequence
  derived and/or modified CDS sequence (opt3) from hemagglutinin__InfluenzaA__ACQ65747
augaagaccaucauugcccugagcuacauacucugccuuguguucgcucagaaacugcccggcaacgacaauuccacagcaacuuuguguuuagggcaccaugccgucccuaacggaacgaucguuaagaccauuacaaaugaucaaaucgaggugacuaacgcgaccgaacugguacagucuucaaguacaggugagauuugcgacagcccacaccagauccuagauggcgaaaauuguacccucauagacgcucugcuuggggauccgcagugcgacggauuucaaaacaaaaagugggaucuguucguggagagauccaaagccuauucuaauuguuaccccuaugacgucccugauuacgcaucguugaggucacucguggccagcaguggcacucuggaauuuaacaaugaguccuucaacuggacagguguuacccagaaugggacgucuagcgcuugcauccggcgcacuaacaauuccuuuuucucacgacugaacuggcucacccauuuaaaguuuaaguauccagcacugaaugugacaaugcccaacaacgagaaauucgacaaacuuuacauuuggggaguccaccauccuggcacugauaaugaccagaucuuuuuguaugcccaggcuaguggccguauuaccgugagcacaaaaagaucucaacagaccguaaucccaaacauaggguccaggccccggguucgcaauauuccuucaagaaucagcauuuacuggacgaucgugaagccaggagauauccugcuaauuaacaguacugguaaucucauagccccgaggggcuacuucaaaauccggucugggaaguccagcauuaugcgcucggacgcgcccaucggaaaguguaacucugaaugcauaacaccuaauggcuccauuccaaacgacaaacccuuucagaaugucaaccgaaucaccuauggugcauguccuagauacgugaagcagaauacucugaaacuugccacagggaugaggaacgugccagagaagcaaacccggggaaucuucggcgcuauugccggcuuuaucgaaaaugggugggagggaaugauggaugguugguauggcuuccgucaccagaacucagaggggauuggacaggcagcugaccugaaaaguacgcaagccgcgauagaucagaucaauggcaaguugaacggucucauugggaaaaccaacgaaaaguuccaccagaucgagaaggaauuuagcgaggucgaaggccgcauccaggaccuggagaaauacguugaggauacaaagauugacuuaugguccuauaaugccgaacugcucguggcacuugagaaccaacauacuauagaucugaccgacucugaaaugaauaaauuguucgagaagacaaagaagcagcuaagagaaaacgcugaggauaugggaaauggcugcuuuaagaucuaccacaaaugugacaacgccugcauugggagcaucaggaauggaacuuaugaucaugacguauaccgggacgaggcucugaacaaucgauuccagauuaaggguguggaacucaaaucaggcuacaaggauuggauccuguggauaaguuuugccaucuccugcuuccuucugugugucgcauugcucggguuuauuaugugggccugccagaaaggaaacauccgcuguaauauuugcaucuga

SEQ ID NO: 130725 - RNA, 1698 nt, Artificial Sequence
  derived and/or modified CDS sequence (opt3) from hemagglutinin__InfluenzaA__ACQ65758
augaaggugaaacugcucguccuucugugcaccuucacagccacuuacgcugacacgaucuguauuggcuaucacgcaaacaauagcaccgauacaguugacacuguguuggagaagaacguaaccgugacacauuccgucaauuuacuggaaaacucucacaaugggaaacuaugccuccugaagggaauagcgccccuucagcuggguaacuguucaguggccggcuggaucuuggggaauccugagugcgaacuccugauuaguaaagagagcugguccuacguuguggaaaagccaaacccggagaauggaaccuguuaucccggccauuuugcugauuacgaggaacugagagagcaacucucuucggucagcucauucgaaagguuugagaucuucccuaaggagaguuccuggccaaaccacacugugacagguguaucugccagcugcucccauaauggggaaucaaguuuuuaucggaacuuacuguggcuuaccgggaaaaauggcuuguaccccaaccugagcaagucuuaugcaaauaacaaaggcaaggagguucuagugcucuggggaguccaccacccuccaaacauuggagaccagaauacgcuguaccauacugaaaacgccuacguguccguggucucaagccacuauagucgcaaauucacccccgagaucgcuaagcgaccuaagguucgugaucaggaagguagaauaaauuacuauuggacacuucuggagccaggcgacacuaucauuuuugaggcaaacgggaauuugaucgccccgagguacgcuuucgcccucucucggggauuuggcuccgguauuaucaacagcaaugcgcccauggauaaaugugacgcaaagugccagaccccucaaggggccauaaacucgucucugccauuccagaaugugcaucccguaacaauuggagaauguccuaaauaugugcgcuccgcuaaguuaagaauggucaccggccugaggaacaucccaucaauucagagucggggccucuuuggggccaucgcaggauucaucgaggguggcuggacggggaugguggauggaugguacggcuaucaccaccagaaugaacaagguagcggguacgcugccgaccagaaauccacucagaacgcgauuaauggcauaacaaacaagguuaauucugugaucgagaaaaugaacacccaguuuacugccgucggaaaggaguucaacaaacuugaacgccgaauggagaaucugaacaagaagguggaugacggcuucauugauaucuggacauacaaugcagaauugcuaguacugcucgagaacgaaagaacccuggacuuucaugacagcaauguuaaaaaccuuuaugagaaggugaaaucacaacugaagaauaacgcuaaggaaauagggaauggaugcuucgaguuuuaccacaaauguaacgaugagugcauggaaagugucaagaaugguacguaugacuaccccaaauauuccgaggaaagcaaguugaacagggagaaaauugauggcgugaagcucgagucuaugggggucuaccagauccuggccaucuauucaaccguggcuaguagcuuaguucugcuagugucccucggagccauuucuuucuggaugugcucgaauggcagccugcagugucggaucugcauuuga

SEQ ID NO: 130726 - RNA, 1701 nt, Artificial Sequence; identical to SEQ ID NO: 130704
  derived and/or modified CDS sequence (opt3) from hemagglutinin__InfluenzaA__ACQ73386

SEQ ID NO: 130727 - RNA, 1701 nt, Artificial Sequence; identical to SEQ ID NO: 130717
  derived and/or modified CDS sequence (opt3) from hemagglutinin__InfluenzaA__ACQ73387

SEQ ID NO: 130728 - RNA, 1701 nt, Artificial Sequence
  derived and/or modified CDS sequence (opt3) from hemagglutinin__InfluenzaA__ACQ73555
augaagaccaucauugcccugagcuacauacucugccuuguguucgcucagaaacugcccggcaacgacaauuccacagcaacuuuguguuuagggcaccaugccgucccuaacggaacgaucguuaagaccauuacaaaugaucaaaucgaggugacuaacgcgaccgaacugguacagucuucaaguacagguggcauuugcgacagcccacaccagauccuagauggggagaauuguacccucauagacgcucugcuuggagauccgcagugcgacggcuuucaaaacaaaaagugggaucuguucguggaaagauccaaagccuauucuaauuguuaccccuaugacgucccugauuacgcaucguugaggucacucguggccagcagugguacucuggaguuuaacaaugaauccuucaacuggacagggguuacccagaauggaacgucuagcgcuugcaagcggcgcuccaacaauucauuuuucagucgacugaacuggcucacucauuuaaaguuuaaauauccagcacugaaugugaccaagcccaacaacgagaaauucgacaaguuguacaucuggggcguccaccauccuggcacagauaaugaccagauuuuucuuuaugcccaggcuagcgggcguaucacugugucuaccaaaagaucccaacagacaguaauuccaaacaucggaucaaggccccggguucgcaauauaccuagcagaauuaguaucuacuggaccauugugaagccaggugauauccugcuaaucaacucuacgggcaaucucauugccccgaggggguacuucaagauacgguccggaaaaagcucgaucaugcgcucugacgcgcccauuggcaaguguaacuccgagugcaucacuccuaaugguucaauaccaaacgacaaacccuuucagaaugucaaccgaauuacauauggggcauguccuagauacgugaagcagaauacccugaaacuugccacuggaaugaggaacgugccagaaaagcaaacacggggcaucuucggcgcuaucgccggguuuauugagaauggaugggaagguauggucgauggcugguauggguuccgucaccagaacagugagggaaucggccaggcagcugaccugaaaagcacccaagccgcgauuaaucagauaaacgguaaguugaaccgccucaucgggaagacgaaugagaaauuccaccagauugaaaaggaguuuuccgaaguugagggcagaauccaggaucuggaaaaauacguggaggacaccaagaucgauuuauggucuuauaacgccgagcugcucguagcacuugaaaaucaacauacaauugaccugacugauagcgagaugaacaaauuguucgaaaggaccaagaagcagcuacgggagaaugcugaagacaugggaaacggcugcuuuaaaauauaccacaagugugauaaugccugcaucgggucaauucgaaacggaacauaugaccaugauguguaccgcgacgaggcucugaauaacagauuccagaucaaaggugucgagcucaagaguggcuacaaagacuggauucuguggaucuccuuugccauaagcugcuuccuucuguguguggcauugcucggguuuaucaugugggccugccagaagggaaauauuagguguaacaucugcauuuga

SEQ ID NO: 130729 - RNA, 1701 nt, Artificial Sequence; identical to SEQ ID NO: 130717
  derived and/or modified CDS sequence (opt3) from hemagglutinin__InfluenzaA__ACQ76294

SEQ ID NO: 130730 - RNA, 1701 nt, Artificial Sequence; identical to SEQ ID NO: 130717
  derived and/or modified CDS sequence (opt3) from hemagglutinin__InfluenzaA__ACQ76314

SEQ ID NO: 130731 - RNA, 1701 nt, Artificial Sequence; identical to SEQ ID NO: 130717
  derived and/or modified CDS sequence (opt3) from hemagglutinin__InfluenzaA__ACQ76317

SEQ ID NO: 130732 - RNA, 1701 nt, Artificial Sequence
  derived and/or modified CDS sequence (opt3) from hemagglutinin__InfluenzaA__ACQ76318
augaaggccauccuggugguccuccuuuacaccuucgcuacagcaaacgccgacacucugugcauuggcuaucacgcgaauaacagcacggauaccguugacacaguguuggagaagaauguaacugugacccauuccgucaacuuacuggaagauaagcacaaugggaaacuauguaagcucagaggaguggcuccccugcaucuugguaaaugcaacauagccggcuggauccuggggaauccugagugugaaucuuugucaacagcaaguagcugguccuacauuguugagaccccaucuucggacaacggaacuugcuauccgggcgauuuuaucgacuacgaggagcucagggagcagcugucaagcgugaguuccuucgaacgguuugagauuuuccccaagacaucuagcuggccuaaucacgauuccaacaagggugucaccgccgcuuguccacaugcaggggccaaaucauuuuauaagaaucugaucuggcucgugaaaaagggaaacaguuaccccaaauuaagcaagucuuauauaaaugacaagggcaaagaaguacugguucuuuggggcauccaccacccuuccacgucagcugaucaacagagcuuguaccagaacgccgacacuuacguguucgucgggaguucucgcuauuccaagaaauuuaagccagagauugcgauccgacccaaagugcgugaucaggagggaagaaugaauuacuauuggacccugguggaaccuggugacaagauuacauucgaggcaacuggcaaccuagucguuccaagguacgccuuugcuauggaacggaacgccgggagcggaaucauaauuucggauaccccggugcaugacugcaauacaaccugucaaacgcccaaaggcgcaaucaacacuucucucccuuuccagaauauucacccaaucacaaucgguaagugccccaaguauguaaaauccaccaagcugcgccuugcuacugggcugagaaacauuccuucaauacagaguaggggauuguuuggcgccaucgcgggcuucauugaagggggauggacagguaugguggacggcugguacggguaucaucaccagaaugaacaaggaagcggcuacgccgcagaucucaaauccacccagaacgcuaucgacgagauaacgaauaaggucaacucugugauugagaaaaugaauacccaguuuacagccguugguaaggaguucaaccaccuggaaaagcggaucgaaaauuuaaacaaaaagguggaugacggguuccuggauaucuggacuuacaaugcugagcuccuuguccuguuggaaaacgagcgcacccuagacuaucaugauagcaaugugaaaaaccuguacgagaagguacgaucacagcucaaaaacaaugccaaggaaauuggcaacggauguuuugaguucuaucacaagugcgacaauacauguauggaaaguguuaaaaacggcacuuacgauuauccaaaguacuccgaggaagcaaaacugaauagagaggagaucgacggggugaaacuugaaagcaccaggauuuaucaaauacuggccaucuacucuacagucgcuucaaguuuggugcucgucgugagccugggagcgauuuccuuuuggaugugcucuaacgguucguuacagugccggaucuguaucuga

SEQ ID NO: 130733 - RNA, 1701 nt, Artificial Sequence; identical to SEQ ID NO: 130704
  derived and/or modified CDS sequence (opt3) from hemagglutinin__InfluenzaA__ACQ76326

SEQ ID NO: 130734 - RNA, 1701 nt, Artificial Sequence; identical to SEQ ID NO: 130704
  derived and/or modified CDS sequence (opt3) from hemagglutinin__InfluenzaA__ACQ76336

SEQ ID NO: 130735 - RNA, 1701 nt, Artificial Sequence; identical to SEQ ID NO: 130704
  derived and/or modified CDS sequence (opt3) from hemagglutinin__InfluenzaA__ACQ76347

SEQ ID NO: 130736 - RNA, 1701 nt, Artificial Sequence; identical to SEQ ID NO: 130717
  derived and/or modified CDS sequence (opt3) from hemagglutinin__InfluenzaA__ACQ76365

SEQ ID NO: 130737 - RNA, 1701 nt, Artificial Sequence; identical to SEQ ID NO: 130717
  derived and/or modified CDS sequence (opt3) from hemagglutinin__InfluenzaA__ACQ76370

SEQ ID NO: 130738 - RNA, 1701 nt, Artificial Sequence; identical to SEQ ID NO: 130704
  derived and/or modified CDS sequence (opt3) from hemagglutinin__InfluenzaA__ACQ76376

SEQ ID NO: 130739 - RNA, 1701 nt, Artificial Sequence
  derived and/or modified CDS sequence (opt3) from hemagglutinin__InfluenzaA__ACQ76383
augaaggccauccuggugguccuccuuuacaccuucgcuacagcaaacgccgacacucugugcauuggcuaucacgcgaauaacagcacggauaccguugacacaguguuggagaagaauguaacugugacccauuccgucaacuuacuggaagauaagcacaaugggaaacuauguaagcucagaggaguggcuccccugcaucuugguaaaugcaacauagccggcuggauccuggggaauccugagugugaaucuuugucaacagcaaguagcugguccuacauuguugagaccucuucgucagacaacggaacuugcuauccaggcgauuuuaucgacuacgaggagcucagggagcagcugagcaguguguccucuuucgaacgguuugagauuuucccgaagacaagcuccuggcccaaucacgauucaaacaaggguaucaccgccgcuuguccucaugcaggggccaaaaguuuuuauaagaaucugauauggcucgucaaaaagggaaacagcuacccaaaauuaucuaaguccuauaucaaugacaagggcaaagaagugcugguacuuuggggcauucaccaccccucaacgagcgcugaucaacagaguuuguaccagaacgccgacgcguacguuuucguggggucuucccgcuauagcaagaaauuuaagccugagaucgcaauucgaccaaaaguccgugaucaggagggaagaaugaauuacuauuggacucugguggaacccggugacaagaucaccuucgaggccacaggcaaccuaguggucccuagguacgcuuuugccauggaacggaacgcagggucgggaauaauuaucucugauacuccaguucaugacugcaauaccacaugucaaaccccgaaaggcgcuauuaacacgucccuccccuuccagaauauccacccuaucacuauugguaagugcccaaaguaugugaaaucaacaaagcugcgccuugccaccgggcugagaaacguacccaguauacagagcaggggauuguuuggcgcgaucgccggcuucauugaagggggauggacugguaugguggacggcugguacggguaucaucaccagaaugaacaaggauccggcuacgcagcugaucucaaaucuacacagaacgccaucgacgagauaaccaauaaggucaacagcgugauugagaaaaugaauacgcaguuuaccgcuguugguaaggaguucaaccaccuggaaaagcggaucgaaaauuuaaacaaaaagguggaugacggguuccuggauaucuggacauacaaugccgagcuccuuguccuguuggaaaacgagcgcacucuagacuaucaugauucaaaugugaaaaaccuguacgagaagguacgaagucagcucaaaaacaaugcaaaggaaauuggcaacggauguuuugaguucuaucacaagugcgacaauaccuguauggaauccguuaaaaacggcacauacgauuauccuaaguacagcgaggaagccaaacugaauagagaggagaucgacggggugaaacuugaaucuacuaggauuuaucaaauacuggcuaucuacucaaccgucgcgaguagcuuggugcucgucgugucccugggagcaauuucuuuuuggaugugcucgaacgguagcuuacagugccggaucuguaucuga

SEQ ID NO: 130740 - RNA, 1701 nt, Artificial Sequence; identical to SEQ ID NO: 130717
  derived and/or modified CDS sequence (opt3) from hemagglutinin__InfluenzaA__ACQ76389

SEQ ID NO: 130741 - RNA, 1701 nt, Artificial Sequence; identical to SEQ ID NO: 130704
  derived and/or modified CDS sequence (opt3) from hemagglutinin__InfluenzaA__ACQ76401

SEQ ID NO: 130742 - RNA, 1701 nt, Artificial Sequence; identical to SEQ ID NO: 130717
  derived and/or modified CDS sequence (opt3) from hemagglutinin__InfluenzaA__ACQ76405

SEQ ID NO: 130743 - RNA, 1701 nt, Artificial Sequence
  derived and/or modified CDS sequence (opt3) from hemagglutinin__InfluenzaA__ACQ76408
augaaggccauccugguggucaugcucuacaccuucgcuacagcaaacgccgacacucuuugcauuggcuaucacgcgaauaacagcacggauaccguugacacagugcuggagaaaaauguaacugugacccauuccgucaacuuguuagaagauaagcacaaugggaaacuguguaagcuaagaggaguggcuccccuccaucuggguaaaugcaacauagccggcuggauccuugggaauccugagugugaaucucugucaacagcaaguagcugguccuacauuguugagaccucuucgucagacaacggaacuugcuauccaggcgauuuuaucgacuacgaagaguugagggagcagcucagcaguguguccucuuucgaacgguuugagauuuucccgaagacaagcuccuggcccaaucacgauucaaacaagggugucaccgccgcuuguccucaugcaggggccaaaaguuuuuauaagaaucugaucuggcuggugaaaaagggaaacagcuacccaaaacucucuaaguccuauauaaaugacaagggcaaagaaguauuaguucuguggggcauccaccaccccucaacgagcgcugaucaacagagucuuuaccagaacgccgacgcguacguguucgucgggucuucccgcuauagcaagaaauuuaagccugagauugcaauccgaccaaaagugcgugaucaggagggaagaaugaauuacuauuggacuuugguggaacccggugacaagauuaccuucgaggccacaggcaaccuggucguuccuagguacgcuuuugccauggaacggaacgcagggucgggaaucauaauuucugauacuccagugcaugacugcaauaccacaugucaaaccccgaaaggcgcuaucaacacgucccuacccuuccagaauauucacccuaucacuaucgguaagugcccaaaguauguaaaaucaacaaagcuccgccuggccaccgggcuuagaaacgugcccaguauucagagcaggggacuguuuggcgcgauagccggcuucaucgaagggggauggacugguauggucgacggcugguacggguaucaucaccagaaugaacaaggauccggcuacgcagcugauuugaaaucuacacagaacgccauugacgagaucaccaauaaggugaacagcguuauagagaaaaugaauacgcaguuuaccgcuguggguaaggaguucaaccaccucgagaagcggauugaaaaucugaacaaaaaggucgaugacggguucuuagauaucuggacauacaaugccgagcugcucgugcuucuggaaaacgagcgcacuuuggacuaucaugauucaaauguuaaaaaccuauacgagaagguacgaagucagcugaaaaacaaugcaaaggaaaucggcaacggauguuuugaguucuaucacaagugcgacaauaccuguauggaauccgugaaaaacggcacauacgauuauccuaaguacagcgaggaagccaaacucaauagagaggagauugacggggucaagcuggaaucuacuaggaucuaucaaauucuugcuauauacucaaccguggcgaguagccuggucuuggugguuucccucggagcaaucucuuuuuggaugugcucgaacgguagccugcagugccggauuuguaucuga

SEQ ID NO: 130744 - RNA, 1701 nt, Artificial Sequence
  derived and/or modified CDS sequence (opt3) from hemagglutinin__InfluenzaA__ACQ77601
augaagaccaucauugcccugagcuacauacucugccuugcuuucgcacagaaacugcccggcaacgacaauuccacagccacuuuguguuuagggcaccaugcggugccuaacggaacgcuggucaagaccaucacaaaugaucaaauugagguuacuaacgcuaccgagcuagugcagucuucaaguacagguagaaucugcgacagcccacaccagauucucgauggcgaaaauuguacccugaucgacgcccuucugggggauccgcauugcgacggauuucagaacaaagaaugggauuuguucguagagagguccaaggcauauucugacuguuaccccuaugaugugccugacuacgccucgcuccggucacuggucgcuagcaguggcacucuggaauuuaauaacgaguccuucaauuggacagguguggcacaaaacgggaccucuagcgccugcaaacgccgauccauaaagucauuuuucagucgucucaauugguuacaccagcuggagaacagauauccagcucccaauguuacgaugccuaacaaugauaaguuugacaaacuuuacaucuggggagugcaucacccaagcacugauucugaccagauuuccgucuaugcccaggcgucaggcagggugaccguaagcacaaagcggagucaacagacuguuauccccaacauuggcucucgcccuugggugagagggaucuccagcaggauaucgauuuacuggaccaucgucaaaccaggagacauuuugcugaucaacucuacagguaaucuaaucgcaccgcggggcuacuucaagauucgcuccgggaaaucaaguauaaugcgaagcgaugcccccaucggaaaguguaacuccgaaugcauuaccccuaauggcucuaucccaaacgacaagcccuuucagaaugugaacagaauaacguauggugcuuguccuagguacgugaaacagaauacucucaagcuggccacagggaugcggaacgucccagagaaacaaacccguggaauuuucggcgcaaucgcuggcuuuaucgaaaaugggugggagggaaugauggaugguugguauggcuuccgccaccagaacagcgaggggacuggacaggccgcggaccuuaagucaacacaagccgcaauuaaucagaucaacggcaaacugaauaaguugauugagaaaaccaacgaaaaguuucaucagauagaaaaggaguucagugaaguugaggguagaauccaggaucucgagaaauacguggaagacacgaagauugaucugugguccuauaaugcugaguuacugguagcccucgaaaaccaacacaccaucgaccuuacagauagcgagaugaacaaacuguucgaaaggacucggaagcaguugcgagagaaugcugaggacauggggaacggcugcuuuaaaaucuaccauaagugugauaaugccugcauuggaucuauacgcaacggcaccuaugaccacgacguguacagagaugaagcacuaaauaacagguuccagaucaagggggucgagcugaaaucaggauacaaggacuggauucucuggaucaguuuugccauuagcugcuuccugcuuugugugguucuguuggguuuuaucaugugggcuugccagaaaggcaauauacgguguaacaucugcauuuga

SEQ ID NO: 130745 - RNA, 1701 nt, Artificial Sequence
  derived and/or modified CDS sequence (opt3) from hemagglutinin__InfluenzaA__ACQ83310
augaaggccauccuggugguccuccuuuacaccuucgcuacagcaaacgccgacacucugugcauuggcuaucacgcgaauaacagcacggauaccguugacacaguguuggagaaaaauguaacugugacccauuccgucaacuuacuggaagauaagcacaaugggaaacuauguaagcucagaggaguggcuccccugcaucuugguaaaugcaacauagccggcuggauccuggggaauccugagugugaaucuuugucaacagcaaguagcugguccuacauuguugagaccucuucgucagacaacggaacuugcuauccaggcgauuuuaucgacuacgaggagcucagggagcagcugagcaguauguccucuuucgaacgguuugagauuuucccgaagacaagcuccuggcccaaucacgauucaaacaagggugugaccgccgcuuguccucaugcaggggccaaaaguuuuuauaagaaucugaucuggcucgucaaaaagggaaacagcuacccaaaauuaucuaaguccuauauaaaugacaagggcaaagaagugcugguacuuuggggcauccaccaccccucaacgagcgcugaucaacagaguuuguaccagaacgccgacgcguacguuuucguggggucuucccgcuauagcaagaaacugaagccugagauugcaauccgaccaaaaguccgugaucaggagggaagaaugaauuacuauuggacucuaguggaacccggugacaagauuaccuuugaggccacaggcaaccucguggucccuagguacgcuuucgccauggaacggaacgcagggucgggaaucauaauuucugauacuccaguucaugacugcaauaccacaugucaaaccccgaaaggcgcuaucaacacgucccugcccuuucagaauauucacccuaucacuaucgguaagugcccaaaguaugugaaaucaacaaaacuucgccuggccaccggguugagaaacguacccaguauucagagcaggggacucuucggcgcgauagccggcuuuaucgaagggggauggacugguaugguggacggcugguacggguaucaucaccagaaugaacaaggauccggcuacgcagcugaucugaagucuacacagaacgccauugacgagaucaccaauaaggucaacagcgugauagagaaaaugaauacgcaguucaccgcuguugguaaggaauuuaaccacuuagagaagcggauugaaaaucugaacaaaaagguggaugacggguuccucgauaucuggacauacaaugccgagcuucuggucuugcuagaaaacgagcgcacucuggacuaucaugauucaaaugugaaaaaccucuacgagaagguacgaagucagcugaaaaacaaugcaaaggaaaucggcaacggauguuucgaguuuuaucacaagugcgacaauaccuguauggaauccguuaaaaacggcacauacgauuauccuaaguacagcgaggaagccaaacuuaauagagaggagauugacggggugaagcuggaaucuacuaggaucuaucaaauuuuggcuauauacucaaccgucgcgaguagccucgugcuggucguguccuuaggagcaaucucuuucuggaugugcucgaacgguagccugcagugccggauuuguaucuga

SEQ ID NO: 130746 - RNA, 1701 nt, Artificial Sequence; identical to SEQ ID NO: 130704
  derived and/or modified CDS sequence (opt3) from hemagglutinin__InfluenzaA__ACQ84451

SEQ ID NO: 130747 - RNA, 1701 nt, Artificial Sequence; identical to SEQ ID NO: 130704
  derived and/or modified CDS sequence (opt3) from hemagglutinin__InfluenzaA__ACQ84457

SEQ ID NO: 130748 - RNA, 1701 nt, Artificial Sequence
  derived and/or modified CDS sequence (opt3) from hemagglutinin__InfluenzaA__ACQ84477
augaaggccauccugcucgugcuucuguacaccuucacagcugcaaacgccgacacuuugugcauuggcuaucacgcgaauaacagcacggauaccgucgacacaguuuuagagaagaaugugacuguaacccauuccgugaaccugcuagaagauagacacaaugggaagcucuguaaacugaggggagucgcuccccuucaucuggguaagugcaacauagccggcugguugcucgggaauccugagugugaacugcuguuuacagcaucuucauggaguuacaucguggagaccagcaacuccgacaauggaacuugcuauccaggcgauuucauuaacuacgaagaacuccgggagcaguuaucuucgguuucuagcuuugaacgcuucgagaucuuuccgaaagccaguuccuggcccgaccacgaaacaaaucgaggugugaccgcugcauguccuuaugccggggcuaacucuuucuaccguaaucugauuuggcuugucaagaagggaaacagcuauccaaaauuguccaagucauacgugaauaacaaagagaaggagguacugguucuauggggcauccaucaucccccuacgaguacugaucaacagagccucuaccagaacgccgacgcguauguguuugucggcucauccaaauacaauaagaaguucaaaccagaaauagcaaccagacccaaggugagggggcaggccggacggaugaacuauuacuggacacugguggagccuggugauacuaucaccuuugaagcuacaggcaaucuugucguuccacgcuaugccuucgcaaugaaaagagggucaggaagcggcauuaucauuagugacaccccggugcacgauugcaacacgacuugucaaacacccaagggugcuaucaauaccucucugccuuuucagaacauacacccaguaacuauuggggagugccccaaauacgugaaguccacaaaauugaggauggccaccggacuccggaauaucccuagcauucagucgcgcggccuguucggcgcgaucgccggguuuaucgaaggagguuggacgggcaugauugacgggugguauggauaccaccaucagaacgagcaaggcucugguuacgcagcugaucagaaguccacccagaaugccauagacgggaucacaaacaaggucaauucagugauugagaaaaugaacacucaguucaccgcuguuggcaaggaguucaaucacuuagagaaacgaaucgaaaaccugaauaagaaaguggacgauggauuucucgacgucuggacauauaacgccgagcuucugguguugcuagaaaacgagagaacucuggauuaccacgacaguaauguaaagaaccucuaugagaagguuaggagccaacugaaaaauaacgcaaaggaaauaggcaauggguguuucgaguuuuaccauaaaugcgaugacaccuguauggaauccgugaagaacggaacauaugauuacccaaaauauucugaggaaagcaaacuuaaucgggaggagauugacggugucaagcuggaaucaacccguaucuaccagaucuuggccauuuacaguacuguggcuuccagccucguccuguuagugucucugggcgcgaucucauucuggaugugcaguaacgggagccuacagugccgcauuuguauauga

SEQ ID NO: 130749 - RNA, 1701 nt, Artificial Sequence
  derived and/or modified CDS sequence (opt3) from hemagglutinin__InfluenzaA__ACQ89900
augaaggccauccuggugguccuccuuuacaccuucgcuacagcaaacgccgacacucugugcauuggcuaucacgcgaauaacagcacggauaccguugacacaguguuggagaagaauguaacugugacccauuccgucaacuuacuggaagauaagcacaaugggaaacuauguaagcucagaggaguggcuccccugcaucuugguaaaugcaacauagccggcuggauccuggggaauccugagugugaaucuuugucaacagcaaguagcugguccuacauuguugagaccucuucgucagacaacggaacuugcuauccaggcgauuuuaucgacuacgaggagcucagggagcagcugagcaguguguccucuuucgaacgguuugagauuuucccgaagacaagcuccuggcccaaucacgauucaaacaagggugucaccgccgcuuguccucaugcaggggccaaaaguuuuuauaagaaucugaucuggcucgugaaaaagggaaacagcuacccaaaauuaucuaaguccuauauaaaugacaagggcaaagaaguacugguucuuuggggcauccaccaccccucaacgagcgcugaucaacagaguuuguaccagaacgccgacgcguacguguucgucgggucuucccgcuauagcaagaaauuuaagccugagauugcaauccgaccaaaagugcgugaucaggagggaagaaugaauuacuauuggacucugguggaacccggugacaagauuaccuucgaggccacaggcaaccuagucguuccuagguacgcuuuugccauggaacggaacgcagggucgggaaucauaauuucugauacuccagugcaugacugcaauaccacaugucaaaccccgaaaggcgcuaucaacacgucccuccccuuccagaauauucacccuaucacuaucgguaagugcccaaaguauguaaaaucaacaaagcugcgccuugccaccgggcugagaaacgugcccaguauucagagcaggggauuguuuggcgcgauagccggcuucaucgaagggggauggacugguauggucgacggcugguacggguaucaucaccagaaugaacaaggauccggcuacgcagcugaucucaaaucuacacagaacgccauugacgagaucaccaauaaggugaacagcguuguggagaaaaugaauacgcaguuuaccgcugucgguaaggaguucaaccaccuggaaaagcggauagaaaauuuaaacaaaaagguggaugacggguuccuggauauuuggacauacaaugccgagcuccuuguacuguuggaaaacgagcgcacucuagacuaucaugauucaaauguuaaaaaccuguacgagaaggugcgaagucagcucaaaaacaaugcaaaggaaaucggcaacggauguuuugaguucuaucacaagugcgacaauaccuguauggaauccgucaaaaacggcacauacgauuauccuaaguacagcgaggaagccaaacugaauagagaggagaucgacggggugaaacuugaaucuacuaggauuuaucaaauccuggcuauuuacucaaccgucgcgaguagcuuggugcucguugugucccugggagcaauaucuuuuuggaugugcucgaacgguagcuuacagugccggaucuguauuuga

SEQ ID NO: 130750 - RNA, 1701 nt, Artificial Sequence; identical to SEQ ID NO: 130717
  derived and/or modified CDS sequence (opt3) from hemagglutinin__InfluenzaA__ACQ89902

SEQ ID NO: 130751 - RNA, 1701 nt, Artificial Sequence
  derived and/or modified CDS sequence (opt3) from hemagglutinin__InfluenzaA__ACQ89904
augaaggccauccuggugguccuccuuuacaccuucgcuacagcaaacgccgacacucugugcauuggcuaucacgcgaauaacagcacggauaccguugacacaguguuggagaaaaauguaacugugacccauuccgucaacuuacuggaagauaagcacaaugggaaacuauguaagcucagaggaguggcuccccugcaucuugguaaaugcaacauagccggcuggauccuggggaauccugagugugaaucuuugucaacagcaaguagcugguccuacauuguugagaccucuucgucagacaagggaacuugcuauccaggcgauuuuaucgacuacgaggagcucagggagcagcugagcaguguguccucuuucgaacgguuugagauuuucccgaagacaagcuccuggcccaaccacgauucaaauaaaggugucaccgccgcuuguccucaugcaggggccaagaguuuuuauaaaaaccugaucuggcucgugaagaaaggaaauagcuacccaaaguuaucuaaguccuauauaaacgacaaaggcaaggaaguacugguucuuuggggcauccaccaccccucaacgagcgcugaucaacagaguuuguaccagaaugccgacgcguacguguucgucgggacuucucgcuauuccaaaaaguuuaaaccugagauugcaauccgaccaaaggugcgugaucaggagggaagaaugaacuacuauuggacccugguggaacccggugacaaaauuacauucgaggccacuggcaaucuagucguuccuagguacgcuuuugccauggaacggaacgcagggagcggaaucauaauuucggauaccccagugcaugacugcaacacaaccugucaaacgccgaagggcgcuaucaauacuucucuccccuuccagaacauucacccuaucacaaucgguaagugcccaaaauauguaaaguccaccaaacugcgccuugccacugggcugagaaaugugcccucaauucagaguaggggauuguuuggcgcgauagccggcuucaucgaagggggauggacagguauggucgacggcugguacggguaucaucaccagaacgaacaaggaagcggcuacgcagcugaucucaaguccacccagaaugccauugacgagaucacgaacaaaguuaauucugugauagagaagaugaacacccaguuuacagcuguggguaaggaguucaaucaccuggaaaaacggauugaaaacuuaaauaagaaagucgaugacggguuccuggauaucuggacuuacaacgccgagcuccuugugcuguuggaaaaugagcgcacccuagacuaucaugauagcaacguaaagaaucuguacgagaaaguucgaucacagcucaagaacaacgcaaaggaaaucggcaauggauguuuugaguucuaucacaaaugcgacaacacauguauggaaagugugaagaauggcacuuacgauuauccuaaauacuccgaggaagccaagcugaacagagaggagauugacggggucaaacuugaaagcaccaggaucuaucaaauucuggcuauauacucuacaguggcgucaaguuugguccucgugguuagccugggagcaaucuccuuuuggaugugcucuaaugguucguuacagugccggauuuguaucuga

SEQ ID NO: 130752 - RNA, 1701 nt, Artificial Sequence; identical to SEQ ID NO: 130749
  derived and/or modified CDS sequence (opt3) from hemagglutinin__InfluenzaA__ACQ89905

SEQ ID NO: 130753 - RNA, 1701 nt, Artificial Sequence; identical to SEQ ID NO: 130704
  derived and/or modified CDS sequence (opt3) from hemagglutinin__InfluenzaA__ACQ99607

SEQ ID NO: 130754 - RNA, 1701 nt, Artificial Sequence; identical to SEQ ID NO: 130704
  derived and/or modified CDS sequence (opt3) from hemagglutinin__InfluenzaA__ACQ99608

SEQ ID NO: 130755 - RNA, 1701 nt, Artificial Sequence; identical to SEQ ID NO: 130704
  derived and/or modified CDS sequence (opt3) from hemagglutinin__InfluenzaA__ACQ99609

SEQ ID NO: 130756 - RNA, 1701 nt, Artificial Sequence; identical to SEQ ID NO: 130704
  derived and/or modified CDS sequence (opt3) from hemagglutinin__InfluenzaA__ACQ99611

SEQ ID NO: 130757 - RNA, 1701 nt, Artificial Sequence
  derived and/or modified CDS sequence (opt3) from hemagglutinin__InfluenzaA__ACQ99614
augaaggccauccuggugguccuccuuuacaccuucgcuacagcaaacgccgacacucugugcauuggcuaucacgcgaauaacagcacggauaccguugacacaguguuggagaagaauguaacugugacccauuccgucaacuuacuggaagauaagcacaaugggaaacuauguaagcucagaggaguggcuccccugcaucuugguaaaugcaacauagccggcuggauccuggggaauccugagugugaaucuuugucaacagcaaguagcugguccuacauuguugagaccucuucgucagacaacggaacuugcuauccaggcgauuuuaucgacuacgaggagcucagggagcagcugagcaguguguccucuuucgaacgguuugagauuuucccgaagacaagcuccuggcccaaucacgauucaaacaagggugucaccgccgcuuguccucaugcaggggccaaaaguuuuuauaagaaucugaucuggcucgugaaaaagggaaacagcuacccaaaauuaucuaaguccuauauaaaugacaagggcaaagaaguacugguucuuuggggcauccaccaccccucaacgagcgcugaucaacagaguuuguaccagaacgccgacgcguacguguucgucgggucuucccgcuauagcaagaaauuuaagccugagauugcaauccgaccaaaagugcgugaucaggagggaagaaugaauuacuauuggacucugguggaacccggugacaagauuaccuucgaggccacaggcaaccuagucguuccuagguacgcuuuugccauggaacggaacgcagggucgggaaucauaauuucugauacuccagugcaugacugcaauaccacaugucaaaccccgaaaggcgcuaucaacacgucccuccccuuccagaauauucacccuaucacuaucgguaagugcccaaaguauguaaaaucaacaaagcugcgccuugccaccgggcugagaaacgugcccaguauucagagcaggggauuguuuggcgcgauagccggcuucaucgaagggggauggacugguauggucgacggcugguacggguaucaucaccagaaugaacaaggauccggcuacgcagcugaucucaaaucuacacagaacgccauugacgagaucaccaauaaggugaacagcguuauagagaaaaugaauacgcaguuuaccgcuguggguaaggaguucaaccaccuggaaaagcggauugaaaauuuaaacaaaaaggucgaugacggguuccuggauaucuggacauacaaugccgagcuccuuauccuguuggaaaacgagcgcacucuagacuaucaugauucaaaugugaaaaaccuguacgagaagguacgaagucagcucaaaaacaaugcaaaggaaauuggcaacggauguuuugaguucuaucacaagugcgacaauaccuguauggaauccguuaaaaacggcacauacgauuauccuaaguacagcgaggaagccaaacugaauagagaggagaucgacggggugaaacuugaaucuacuaggauuuaucaaauacuggcuaucuacucaaccgucgcgaguagcuuggugcucgucgugucccugggagcaauuucuuuuuggaugugcucgaacgguagcuuacagugccggaucuguaucuga

SEQ ID NO: 130758 - RNA, 1701 nt, Artificial Sequence; identical to SEQ ID NO: 130757
  derived and/or modified CDS sequence (opt3) from hemagglutinin__InfluenzaA__ACQ99616

SEQ ID NO: 130759 - RNA, 1701 nt, Artificial Sequence; identical to SEQ ID NO: 130704
  derived and/or modified CDS sequence (opt3) from hemagglutinin__InfluenzaA__ACQ99617

SEQ ID NO: 130760 - RNA, 1701 nt, Artificial Sequence; identical to SEQ ID NO: 130704
  derived and/or modified CDS sequence (opt3) from hemagglutinin__InfluenzaA__ACQ99618

SEQ ID NO: 130761 - RNA, 1701 nt, Artificial Sequence; identical to SEQ ID NO: 130704
  derived and/or modified CDS sequence (opt3) from hemagglutinin__InfluenzaA__ACQ99619

SEQ ID NO: 130762 - RNA, 1701 nt, Artificial Sequence; identical to SEQ ID NO: 130704
  derived and/or modified CDS sequence (opt3) from hemagglutinin__InfluenzaA__ACQ99620

SEQ ID NO: 130763 - RNA, 1701 nt, Artificial Sequence; identical to SEQ ID NO: 130757
  derived and/or modified CDS sequence (opt3) from hemagglutinin__InfluenzaA__ACQ99621

SEQ ID NO: 130764 - RNA, 1701 nt, Artificial Sequence; identical to SEQ ID NO: 130704
  derived and/or modified CDS sequence (opt3) from hemagglutinin__InfluenzaA__ACQ99622

SEQ ID NO: 130765 - RNA, 1701 nt, Artificial Sequence
  derived and/or modified CDS sequence (opt3) from hemagglutinin__InfluenzaA__ACR01014
augaaggccauccuggugguccuccuuuacaccuucgcuacagcaaacgccgacacucugugcauuggcuaucacgcgaauaacagcacggauaccguugacacaguguuggagaaaaauguaacugugacccauuccgucaacuuacuggaagauaagcacaaugggaaacuauguaagcucagaggaguggcuccccugcaucuugguaaaugcaacauagccggcuggauccuggggaauccugagugugaaucuuugucaacagcaaguagcugguccuacauuguugagaccucuucgucagacaacggaacuugcuauccaggcgauuuuaucgacuacgaggagcucagggagcagcugagcaguguguccucuuucgaacgguuugagauuuucccgaagacaagcuccuggcccaaucacgauucaaacaagggugucaccgccgcuuguccucaugcaggggccaaaaguuuuuauaagaaucugaucuggcucgugaaaaagggaaacagcuacccaaaauuaucuaaguccuauauaaaugacaagggcaaagaaguacugguucuuuggggcauccaccaccccucaacgagcgcugaucaacagaguuuguaccagaacgccgacgcguacguguucgucgggucuucccgcuauagcaagaaauuuaagccugagauugcaauccgaccaaaagugcgugaucaggagggaagaaugaauuacuauuggacucugguggaacccggugacaagauuaccuucgaggccacaggcaaccuagucguuccuagguacgcuuuugccauggaacggaacgcagggucgggaaucauaauuucugauacuccagugcaugacugcaauaccacaugucaaaccccgaaaggcgcuaucaacacgucccuccccuuccagaauauucacccuaucacuaucgguaagugcccaaaguauguaaaaucaacaaagcugcgccuugccaccgggcugagaaacgugcccaguauucagagcaggggauuguuuggcgcgauagccggcuucaucgaagggggauggacugguauggucgacggcugguacggguaucaucaccagaaugaacaaggauccggcuacgcagcugaucucaaaucuacacagaacgccauugacgagaucaccaauaaggugaacagcguuauagagaaaaugaauacgcaguuuaccgcuguggguaaggaguucaaccaccuggaaaagcggauggaaaauuuaaacaaaaaggucgaugacggguuccuggauauuuggacauacaaugccgagcuccuugugcuguuggaaaacgagcgcacucuagacuaucaugauucaaauguaaagaaccuguacgagaagguucgaagucagcucaaaaacaaugcaaaggaaaucggcaacggauguuuugaguucuaucacaagugcgacaauaccuguauggaauccgugaaaaacggcacauacgauuauccuaaguacagcgaggaagccaaacugaauagagaggagaucgacggggucaaacuugaaucuacuaggauuuaucaaauccuggcuauuuacucaaccguggcgaguagcuugguccucgugguuucccugggagcaauaucuuuuuggaugugcucgaacgguagcuuacagugccggaucuguauuuga

SEQ ID NO: 130766 - RNA, 1701 nt, Artificial Sequence; identical to SEQ ID NO: 130717
  derived and/or modified CDS sequence (opt3) from hemagglutinin__InfluenzaA__ACR08419

SEQ ID NO: 130767 - RNA, 1701 nt, Artificial Sequence
  derived and/or modified CDS sequence (opt3) from hemagglutinin__InfluenzaA__ACR08429
augaaggccauccuggugguccuccuuuacaccuucgcuacagcaaacgccgacacucugugcauuggcuaucacgcgaauaacagcacggauaccguugacacaguguuggagaaaaauguaacugugacccauuccgucaacuuacuggaagauaagcacaaugggaaacuauguaagcucagaggaguggcuccccugcaucuugguaaaugcaacauagccggcuggauccuggggaauccugagugugaaucuuugucaacagcaaguagcugguccuacauuguugagaccucuucgucagacaacggaacuugcuauccaggcgauuuuaucgacuacgaggagcucagggagcagcugagcaguguguccucuuucgaacgguuugagauuuucccgaagacaagcuccuggcccaaucacgauucaaacaagggugucaccgccgcuuguccucaugcaggggccaaaaguuuuuauaagaaucugaucuggcucgugaaaaagggaaacagcuacccaaaauuaucuaaguccuauauaaaugacaagggcaaagaaguacugguucuuuggggcauccaccaccccucaacgagcgcugaucaacagaguuuguaccagaacgccgacgcguacguguucgucgggacuucucgcuauuccaagaaauuuaagccugagauugcaauccgaccaaaagugcgugaucaggagggaagaaugaauuacuauuggacccugguggaacccggugacaagauuacauucgaggccacuggcaaccuagucguuccuagguacgcuuuugccauggaacggaacaccgggagcggaaucauaauuucggauacaccagugcaugacugcaauaccacgugucaaacuccgaaaggcgcaaucaacacaucucuccccuuccagaauauucacccuaucaccaucgguaagugcccaaaguauguaaaauccacuaagcugcgccuugcuacagggcugagaaacgugcccucaauucagaguaggggauuguuuggcgccauagcgggcuucaucgaagggggauggaccgguauggucgacggcugguacggguaucaucaccagaaugaacaaggaagcggcuacgccgcagaucucaaauccacgcagaacgcuauugacgagaucaccaauaaggugaacucuguuauagagaaaaugaauacacaguuuacugccguggguaaggaguucaaccaccuggaaaagcggauugaaaauuuaaacaaaaaggucgaugacggguuccuggauaucuggaccuacaaugcugagcuccuugugcuguuggaaaacgagcgcacacuagacuaucaugauagcaauguaaagaaccuguacgagaagguucgaucacagcucaaaaacaaugccaaggaaaucggcaacggauguuuugaguucuaucacaagugcgacaauacuuguauggaaagugugaaaaacggcaccuacgauuauccuaaguacuccgaggaagcaaaacugaauagagaggagauugacggggucaaacuugaaagcacaaggaucuaucaaauucuggccauauacucuaccguggcuucaaguuugguccucgugguuagccugggagcgaucuccuuuuggaugugcucuaacgguucguuacagugccggauuuguaucuga

SEQ ID NO: 130768 - RNA, 1701 nt, Artificial Sequence; identical to SEQ ID NO: 130717
  derived and/or modified CDS sequence (opt3) from hemagglutinin__InfluenzaA__ACR08439

SEQ ID NO: 130769 - RNA, 1701 nt, Artificial Sequence; identical to SEQ ID NO: 130717
  derived and/or modified CDS sequence (opt3) from hemagglutinin__InfluenzaA__ACR08449

SEQ ID NO: 130770 - RNA, 1701 nt, Artificial Sequence
  derived and/or modified CDS sequence (opt3) from hemagglutinin__InfluenzaA__ACR08459
augaaggccauccuggugguccuccuuuacaccuucgcuacagcaaacgccgacacucugugcauuggcuaucacgcgaauaacagcacggauaccguugacacaguguuggagaaaaauguaacugugacccauuccgucaacuuacuggaagauaagcacaaugggaaacuauguaagcucagaggaguggcuccccugcaucuugguaaaugcaacauagccggcuggauccuggggaauccugagugugaaucuuugucaacagcaaguagcugguccuacauuguugagaccucuucgucagacaacggaacuugcuauccaggcgauuuuaucgacuacgaggagcucagggagcagcugagcaguguguccucuuucgaacgguuugagauuuucccgaagacaagcuccuggcccaaucacgauucaaacaagggugucaccgccgcuuguccucaugcaggggccaaaaguuuuuauaagaaucugaucuggcucgugaaaaagggaaacagcuacccaaaauuaucuaaguccuauauaaaugacaagggcaaagaaguacugguucuuuggggcauccaccaccccucaacgagcgcugaucaacagaguuuguaccagaacgccgacgcguacguguucgucgggucuucccgcuauagcaagaaauuuaagccugagauugcaauccgaccaaaagugcgugaucaggagggaagaaugaauuacuauuggacucugguggaacccggugacaagauuaccuucgaggccacaggcaaccuagucguuccuagguacgcuuuugccauggaacggaacgcagggucgggaaucauaauuucugauacuccagugcaugacugcgacaccacaugucaaaccccgaaaggcgcuaucaauacgucccuccccuuccagaacauucacccuaucacuaucgguaagugcccaaaguauguaaaaucaacaaagcugcgccuugccaccgggcugagaaaugugcccaguauucagagcaggggauuguuuggcgcgauagccggcuucaucgaagggggauggacugguauggucgauggcugguacggguaucaucaccagaacgaacaaggauccggcuacgcagcugaccucaaaucuacacagaaugccauugaugagaucaccaacaaggugaauagcguuauagagaaaaugaacacgcaguuuaccgcuguggguaaggaguucaaucaccuggaaaagcggauugaaaacuuaaauaaaaaggucgacgauggguuccuggacaucuggacauacaacgccgagcuccuugugcuguuggaaaaugagcgcacucuagauuaucaugacucaaacguaaagaaucuguacgagaagguucgaagucagcucaaaaacaacgcaaaggaaaucggcaauggauguuuugaguucuaucacaagugcgauaacaccuguauggaauccgugaaaaauggcacauacgacuauccuaaguacagcgaggaagccaaacugaacagagaggagauugauggggucaaacuugaaucuacuaggaucuaucaaauucuggcuauauacucaaccguggcgaguagcuugguccucgugguuucccugggagcaaucucuuuuuggaugugcucgaaugguagcuuacagugccggauuuguaucuga

SEQ ID NO: 130771 - RNA, 1701 nt, Artificial Sequence; identical to SEQ ID NO: 130704
  derived and/or modified CDS sequence (opt3) from hemagglutinin__InfluenzaA__ACR08528

SEQ ID NO: 130772 - RNA, 1701 nt, Artificial Sequence; identical to SEQ ID NO: 130704
  derived and/or modified CDS sequence (opt3) from hemagglutinin__InfluenzaA__ACR08530

SEQ ID NO: 130773 - RNA, 1701 nt, Artificial Sequence; identical to SEQ ID NO: 130770
  derived and/or modified CDS sequence (opt3) from hemagglutinin__InfluenzaA__ACR08531

SEQ ID NO: 130774 - RNA, 1701 nt, Artificial Sequence; identical to SEQ ID NO: 130717
  derived and/or modified CDS sequence (opt3) from hemagglutinin__InfluenzaA__ACR08533

SEQ ID NO: 130775 - RNA, 1701 nt, Artificial Sequence; identical to SEQ ID NO: 130770
  derived and/or modified CDS sequence (opt3) from hemagglutinin__InfluenzaA__ACR08535

SEQ ID NO: 130776 - RNA, 1701 nt, Artificial Sequence; identical to SEQ ID NO: 130717
  derived and/or modified CDS sequence (opt3) from hemagglutinin__InfluenzaA__ACR08536

SEQ ID NO: 130777 - RNA, 1701 nt, Artificial Sequence; identical to SEQ ID NO: 130770
  derived and/or modified CDS sequence (opt3) from hemagglutinin__InfluenzaA__ACR08537

SEQ ID NO: 130778 - RNA, 1701 nt, Artificial Sequence; identical to SEQ ID NO: 130770
  derived and/or modified CDS sequence (opt3) from hemagglutinin__InfluenzaA__ACR08538

SEQ ID NO: 130779 - RNA, 1701 nt, Artificial Sequence; identical to SEQ ID NO: 130717
  derived and/or modified CDS sequence (opt3) from hemagglutinin__InfluenzaA__ACR08539

SEQ ID NO: 130780 - RNA, 1701 nt, Artificial Sequence; identical to SEQ ID NO: 130717
  derived and/or modified CDS sequence (opt3) from hemagglutinin__InfluenzaA__ACR08540

SEQ ID NO: 130781 - RNA, 1701 nt, Artificial Sequence; identical to SEQ ID NO: 130704
  derived and/or modified CDS sequence (opt3) from hemagglutinin__InfluenzaA__ACR08542

SEQ ID NO: 130782 - RNA, 1701 nt, Artificial Sequence; identical to SEQ ID NO: 130704
  derived and/or modified CDS sequence (opt3) from hemagglutinin__InfluenzaA__ACR08543

SEQ ID NO: 130783 - RNA, 1701 nt, Artificial Sequence; identical to SEQ ID NO: 130743
  derived and/or modified CDS sequence (opt3) from hemagglutinin__InfluenzaA__ACR08544

SEQ ID NO: 130784 - RNA, 1701 nt, Artificial Sequence; identical to SEQ ID NO: 130770
  derived and/or modified CDS sequence (opt3) from hemagglutinin__InfluenzaA__ACR08545

SEQ ID NO: 130785 - RNA, 1701 nt, Artificial Sequence; identical to SEQ ID NO: 130704
  derived and/or modified CDS sequence (opt3) from hemagglutinin__InfluenzaA__ACR08546

SEQ ID NO: 130786 - RNA, 1701 nt, Artificial Sequence; identical to SEQ ID NO: 130717
  derived and/or modified CDS sequence (opt3) from hemagglutinin__InfluenzaA__ACR08547

SEQ ID NO: 130787 - RNA, 1701 nt, Artificial Sequence; identical to SEQ ID NO: 130770
  derived and/or modified CDS sequence (opt3) from hemagglutinin__InfluenzaA__ACR08548

SEQ ID NO: 130788 - RNA, 1701 nt, Artificial Sequence; identical to SEQ ID NO: 130717
  derived and/or modified CDS sequence (opt3) from hemagglutinin__InfluenzaA__ACR08549

SEQ ID NO: 130789 - RNA, 1701 nt, Artificial Sequence; identical to SEQ ID NO: 130717
  derived and/or modified CDS sequence (opt3) from hemagglutinin__InfluenzaA__ACR08550

SEQ ID NO: 130790 - RNA, 1701 nt, Artificial Sequence; identical to SEQ ID NO: 130717
  derived and/or modified CDS sequence (opt3) from hemagglutinin__InfluenzaA__ACR08551

SEQ ID NO: 130791 - RNA, 1701 nt, Artificial Sequence; identical to SEQ ID NO: 130704
  derived and/or modified CDS sequence (opt3) from hemagglutinin__InfluenzaA__ACR08552

SEQ ID NO: 130792 - RNA, 1701 nt, Artificial Sequence; identical to SEQ ID NO: 130743
  derived and/or modified CDS sequence (opt3) from hemagglutinin__InfluenzaA__ACR08553

SEQ ID NO: 130793 - RNA, 1701 nt, Artificial Sequence; identical to SEQ ID NO: 130743
  derived and/or modified CDS sequence (opt3) from hemagglutinin__InfluenzaA__ACR08554

SEQ ID NO: 130794 - RNA, 1701 nt, Artificial Sequence; identical to SEQ ID NO: 130704
  derived and/or modified CDS sequence (opt3) from hemagglutinin__InfluenzaA__ACR09365

SEQ ID NO: 130795 - RNA, 1701 nt, Artificial Sequence; identical to SEQ ID NO: 130704
  derived and/or modified CDS sequence (opt3) from hemagglutinin__InfluenzaA__ACR09366

SEQ ID NO: 130796 - RNA, 1701 nt, Artificial Sequence; identical to SEQ ID NO: 130704
  derived and/or modified CDS sequence (opt3) from hemagglutinin__InfluenzaA__ACR09367

SEQ ID NO: 130797 - RNA, 1701 nt, Artificial Sequence; identical to SEQ ID NO: 130704
  derived and/or modified CDS sequence (opt3) from hemagglutinin__InfluenzaA__ACR09368

SEQ ID NO: 130798 - RNA, 1701 nt, Artificial Sequence; identical to SEQ ID NO: 130704
  derived and/or modified CDS sequence (opt3) from hemagglutinin__InfluenzaA__ACR09369

SEQ ID NO: 130799 - RNA, 1701 nt, Artificial Sequence; identical to SEQ ID NO: 130704
  derived and/or modified CDS sequence (opt3) from hemagglutinin__InfluenzaA__ACR09370

SEQ ID NO: 130800 - RNA, 1701 nt, Artificial Sequence; identical to SEQ ID NO: 130704
  derived and/or modified CDS sequence (opt3) from hemagglutinin__InfluenzaA__ACR09371

SEQ ID NO: 130801 - RNA, 1701 nt, Artificial Sequence; identical to SEQ ID NO: 130704
  derived and/or modified CDS sequence (opt3) from hemagglutinin__InfluenzaA__ACR09373

SEQ ID NO: 130802 - RNA, 1701 nt, Artificial Sequence; identical to SEQ ID NO: 130704
  derived and/or modified CDS sequence (opt3) from hemagglutinin__InfluenzaA__ACR09374

SEQ ID NO: 130803 - RNA, 1701 nt, Artificial Sequence
  derived and/or modified CDS sequence (opt3) from hemagglutinin__InfluenzaA__ACR09375
augaaggccauccuggugguccuccuuuacaccuucgcuacagcaaacgccgacacucugugcauuggcuaucacgcgaauaacagcacggauaccguugacacaguguuggagaaaaauguaacugugacccauuccgucaacuuacuggaagauaagcacaaugggaaacuauguaagcucagaggaguggcuccccugcaucuugguaaaugcaacauagccggcuggauccuggggaauccugagugugaaucuuugucaacagcaaguagcugguccuacauuguugagaccucuucgucagacaacggaacuugcuauccaggcgauuuuaucgacuacgaagaacucagggagcagcugagcaguguguccucuuucgaacgguuugagauuuucccgaagacaagcuccuggcccaaucacgauucaaacaagggugucaccgccgcuuguccucaugcaggggccaaaaguuuuuauaagaaucugaucuggcucgugaaaaagggaaacagcuacccaaaauuaucuaaguccuauauaaaugacaagggcaaagaaguacugguucuuuggggcauccaccaccccucaacgagcgcugaucaacagaguuuguaccagaacgccgacgcguacguguucgucgggucuucccgcuauagcaagaaauuuaagccugagauugcaauccgaccaaaagugcgugaucaggagggaagaaugaauuacuauuggacucugguggaacccggugacaagauuaccuucgaggccacaggcaaccuagucguuccuagguacgcuuuugccauggagaaaaacgcagggucgggaaucauaauuucugauacuccagugcaugacugcaauaccacaugucaaaccccgaagggcgcuaucaacacgucccuccccuuccagaauauucacccuaucacuaucgguaagugcccaaaauauguaaagucaacaaaacugcggcuugccaccgggcugcgcaacgugcccaguauucagagcagaggauuguuuggcgcgauagccggcuucaucgaagggggauggacugguauggucgacggcugguacggguaucaucaccagaaugaacaaggauccggcuacgcagcugaucucaagucuacacagaacgccauugacgagaucaccaauaaagugaacagcguuauagagaagaugaauacgcaguuuaccgcuguggguaaggaguucaaccaccuggagaaaaggauugaaaauuuaaacaagaaagucgaugacggguuccuggauaucuggacauacaaugccgagcuccuugugcuguuggaaaacgagcggacucuagacuaucaugauucaaauguaaagaaccuguacgagaaaguucgcagucagcucaagaacaaugcaaaggaaaucggcaacggauguuuugaguucuaucacaaaugcgacaauaccuguauggaauccgugaagaacggcacauacgauuauccuaaauacagcgaggaagccaagcugaaucgagaggagauugacggggucaaacuugaaucuacuagaaucuaucaaauucuggcuauauacucaaccguggcgaguagcuugguccucgugguuucccugggagcaaucucuuuuuggaugugcucgaacgguagcuuacagugcaggauuuguaucuga

SEQ ID NO: 130804 - RNA, 1701 nt, Artificial Sequence; identical to SEQ ID NO: 130704
  derived and/or modified CDS sequence (opt3) from hemagglutinin__InfluenzaA__ACR09376

SEQ ID NO: 130805 - RNA, 1701 nt, Artificial Sequence; identical to SEQ ID NO: 130704
  derived and/or modified CDS sequence (opt3) from hemagglutinin__InfluenzaA__ACR09377

SEQ ID NO: 130806 - RNA, 1701 nt, Artificial Sequence; identical to SEQ ID NO: 130704
  derived and/or modified CDS sequence (opt3) from hemagglutinin__InfluenzaA__ACR09395

SEQ ID NO: 130807 - RNA, 1701 nt, Artificial Sequence; identical to SEQ ID NO: 130704
  derived and/or modified CDS sequence (opt3) from hemagglutinin__InfluenzaA__ACR09396

SEQ ID NO: 130808 - RNA, 1701 nt, Artificial Sequence
  derived and/or modified CDS sequence (opt3) from hemagglutinin__InfluenzaA__ACR10186
augaaggccauccuggugguccuccuuuacaccuucgcuacagcaaacgccgacacucugugcauuggcuaucacgcgaauaacagcacggauaccguugacacaguguuggagaagaauguaacugugacccauuccgucaacuuacuggaagauaagcacaaugggaaacuauguaagcucagaggaguggcuccccugcaucuugguaaaugcaacauagccggcuggauccuggggaauccugagugugaaucuuugucaacagcaaguagcugguccuacauuguugagaccucuucgucagacaacggaacuugcuauccaggcgauuuuaucgacuacgaggagcucagggagcagcugagcaguguguccucuuucgaacgguuugagauuuucccgaagacaagcuccuggcccaaucacgauucaaacaagggugucaccgccgcuuguccucaugcaggggccaaaaguuuuuauaagaaucugaucuggcucgugaaaaagggaaacagcuacccaaaauuaucuaaguccuauauaaaugacaagggcaaagaaguacugguucuuuggggcauccaccaccccucaacgagcgcugaucaacagaguuuguaccagaacgccgacgcguacguguucgucgggacuucucgcuauuccaagaaauuuaagccugagauugcaauccgaccaaaagugcgugaucaggagggaagaaugaauuacuauuggacccugguggaacccggugacaagauuacauucgaggccacuggcaaccuagucguuccuagguacgcuuuugccauggaacggaacgcagggagcggaaucauaauuucggauaccccagugcaugacugcaauacaaccugucaaacgccgaaaggcgcuaucaacacuucucuccccuuccagaauauucacccuaucacaaucgguaagugcccaaaguauguaaaauccaccaagcugcgccuugccacugggcugagaaacgugcccucaauucagaguaggggauuguuuggcgcgauagccggcuucaucgaagggggauggacagguauggucgacggcugguacggguaucaucaccagaaugaacaaggaagcggcuacgcagcugaucucaaauccacccagaacgccauugacgagaucacgaauaaggugaacucuguuauagagaaaaugaauacccaguuuacagcuguggguaaggaguucaaccaccuggaaaagcggauugaaaauuuaaacaaaaagaucgaugacggguuccuggauaucuggacuuacaaugccgagcuccuuguccuguuggaaaacgagcgcacccuagacuaucaugauagcaaugugaaaaaccuguacgagaagguacgaucacagcucaaaaacaaugcaaaggaaauuggcaacggauguuuugaguucuaucacaagugcgacaauacauguauggaaaguguuaaaaacggcacuuacgauuauccuaaguacuccgaggaagccaaacugaauagagaggagaucgacggggugaaacuugaaagcaccaggauuuaucaaauacuggcuaucuacucuacagucgcgucaaguuuggugcucgucgugagccugggagcaauuuccuuuuggaugugcucuaacgguucguuacagugccggaucuguaucuga

SEQ ID NO: 130809 - RNA, 1701 nt, Artificial Sequence; identical to SEQ ID NO: 130808
  derived and/or modified CDS sequence (opt3) from hemagglutinin__InfluenzaA__ACR10222

SEQ ID NO: 130810 - RNA, 1701 nt, Artificial Sequence
  derived and/or modified CDS sequence (opt3) from hemagglutinin__InfluenzaA__ACR10223
augaaggccauccuggugguccuccuuuacaccuucacaacugcuaacgcagacacgcugugcauuggcuaucacgccaauaacagcaccgauacaguugacacuguguuggagaaaaauguaaccgugacacauuccgucaacuuacuggaagauaagcacaaugggaaacuauguaagcucagaggaguggcgccccugcaucuugguaaaugcaacauagcuggcuggauccuggggaauccugagugugaaucuuugucaaccgccaguagcugguccuacauuguugagacuucuucgucagacaacggaacaugcuauccaggcgauuuuaucgacuacgaggagcucagggagcagcugagcaguguguccucuuucgaacgguuugagauuuucccgaagaccagcuccuggcccaaucacgauucaaacaagggugucacggcagccuguccucaugcuggggcaaaaaguuuuuauaagaaucugaucuggcucgugaaaaagggaaacagcuacccaaaauuaucuaaguccuauauaaaugacaagggcaaagaaguacugguucuuuggggcauccaccaccccucaacuagcgccgaucaacagaguuuguaccagaacgcugacgccuacguguucgucgggucuucccgcuauagcaagaaauuuaagccugagauugcgauccgaccaaaagugcgugaucaggagggaagaaugaauuacuauuggacccugguggaacccggugacaagauuacauucgaggcaacuggcaaccuagucguuccuagguacgccuuugcuauggaacggaacgccgggucgggaaucauaauuucugauaccccagugcaugacugcaauacaaccugucaaacgccgaaaggcgcaaucaacacuucccuccccuuccagaauauucacccuaucacaaucgguaagugcccaaaguauguaaaaucaaccaagcugcgccuugcuacugggcugagaaacgugcccaguauucagagcaggggauuguuuggcgccauagcgggcuucaucgaagggggauggacagguauggucgacggcugguacggguaucaucaccagaaugaacaaggauccggcuacgccgcagaucucaaaucuacccagaacgcuauugacgagaucacgaauaaggugaacagcguuauagagaaaaugaauacccaguuuacagccguggguaaggaguucaaccaccuggaaaagcggauugaaaauuuaaacaaaaaggucgaugacggguuccuggauaucuggacuuacaaugcugagcuccuugugcuguuggaaaacgagcgcacccuagacuaucaugauucaaauguaaagaaccuguacgagaagguucgaagucagcucaaaaacaaugccaaggaaaucggcaacggauguuuugaguucuaucacaagugcgacaauacauguauggaauccgugaaaaacggcacuuacgauuauccuaaguacagcgaggaagcaaaacugaauagagaggagauugacggggucaaacuugaaucuaccaggaucuaucaaauucuggccauauacucaacaguggcuaguagcuugguccucgugguuucccugggagcgaucucuuuuuggaugugcucgaacgguagcuuacagugccggauuuguaucuga

SEQ ID NO: 130811 - RNA, 1701 nt, Artificial Sequence
  derived and/or modified CDS sequence (opt3) from hemagglutinin__InfluenzaA__ACR15183
augaagaccaucauugcccugagcuacauacucugccuuguguucgcucagaaacugcccggcaacgacaauuccacagcaacuuuguguuuagggcaccaugccgucccuaacggaacgaucguuaagaccauuacaaaugaucaaaucgaggugacuaacgcgaccgaacugguacagucuucaaguacagguggcauuugcgacagcccacaccagauccuagauggggagaauuguacccucauagacgcucugcuuggagauccgcagugcgacggcuuucaaaacaaaaagugggaucuguucguggaaagauccaaagccuauucuaauuguuaccccuaugacgucccugauuacgcaucguugaggucacucguggccagcagugguacucuggaguuuaacaaugaauccuucaacuggacagggguuacccagaauggaacgucuagcgcuugcaagcggggcuccgacaacucauuuuucagucgccugaauuggcucacucauuuaaaguuuaaauauccagcacugaacgugaccaugcccaauaacgagaaguucgauaaacuuuacaucuggggcguccaccauccugggacagacaacgaucagauuuuuccauaugcccaggcuagcggacgaaucacugugucuaccaagcguucccaacagacaguaauucccaauaucgguucaagaccuaggguucggaacauaccaagccgcauuaguaucuacuggaccauugugaaaccgggcgacaucuugcugaucaauucuacggggaaccuaauugcccccagaggauacuucaagauaagguccggcaagagcucgaucaugcggucugacgcgccuauugguaaauguaauuccgagugcaucacuccaaacgggucaauacccaaugauaagccuuuucagaacgucaaucgcauuacauauggagcauguccacgauacgugaaacagaacacccucaagcuggccacuggcaugagaaaugugcccgaaaaacaaacaaggggcaucuucggggcuaucgccggauuuauugagaacgguugggaaggcauggucgacgggugguauggauuccggcaccagaauagugagggcaucggucaggcagcugaucuuaagagcacccaagccgcgauuaaccagauaaaugggaaacugaaccguuugaucggcaagacgaacgagaaguuccaccagauugaaaaagaguuuuccgaaguugagggacgcauccaggaccucgaaaaguacguggaggauaccaaaaucgaccuguggucuuauaaugccgaguuacugguagcacucgaaaaccaacauacaauugaucuuacugacagcgagaugaauaagcuguucgaaagaaccaaaaagcaguugagggagaacgcugaagauaugggcaaugggugcuuuaagauauaccacaaaugugacaacgccugcaucggaucaauucggaaugguacauaugaucaugacguguaccgagacgaggcucuaaacaaucgcuuccagaucaagggcgucgagcugaaaaguggguacaaggauuggauucucuggaucuccuuugccauaagcugcuuccugcuuuguguggcacuguugggauuuaucaugugggccugccagaaaggcaacauuagauguaauaucugcauuuga

SEQ ID NO: 130812 - RNA, 1698 nt, Artificial Sequence
  derived and/or modified CDS sequence (opt3) from hemagglutinin__InfluenzaA__ACR15194
augaaggugaaacugcucguccuucugugcaccuucacagccacuuacgcugacacgaucuguauuggcuaucacgcaaacaauagcaccgauacaguugacacuguguuggagaagaacguaaccgugacacauuccgucaauuuacuggaaaacucucacaaugggaaacuaugccuccugaagggaauagcgccccuucagcuggguaacuguucaguggccggcuggaucuuggggaauccugagugcgaacuccugauuaguaaagagagcugguccuacaucguugaaaagccaaacccggagaauggaaccuguuaucccggccauuuugcugauuacgaggaacugagagagcaacucucuucggugagcucauucgaaagguuugagauuuucccuaaggagaguuccuggccaaaccacacugucacaggugugucugccagcugcucccauaauggggaaucaaguuuuuaucggaacuuacuguggcuuaccggcaaaaauggauuguaccccaaccugagcaagucuuaugcaaauaacaaagagaaggaagugcuaguucucuggggcgugcaccacccuccaaacaucgggaaucagaaagcccuguaccauacggagaacgcuuacgucuccguggugucaagccacuauagucgcaaguucacucccgaaauagcaaagcgaccuaaaguccgugaccaggagggaagaaucaauuacuauuggacccuucuggagccaggugauacaauuaucuuugaagccaacggcaauuugauugcuccgagguacgccuucgcgcucucucgggggcugggauccggcaucauaaacagcaaugcacccauggacaagugugaugccaaaugccagacuccucaaggugcuauuaacucgucuuuaccauuucagaauguucaucccgugaccaucggggaguguccuaaguauguacgcuccgccaaacugagaauggugacaggacucaggaacauuccaucaauccagagucggggccuuuucggcgcaaucgcuggguuuauugaaggagguuggaccggcauggucgacgggugguacggauaucaccaccagaaugagcaaggcagcgguuacgccgcggaucagaaguccacgcagaacgccauaaaugggaucacuaacaaaguaaauucuguuauugaaaagaugaacacacaguucaccgcagugggcaaggaguuuaacaaacuggagcgccgaauggaaaauuugaacaagaaagucgacgauggauucaucgacauauggacuuacaaugcugagcuacuggugcuccuggaaaacgagagaacacuugauuuccaugacagcaauguaaagaaccuguaugaaaaaguuaagucacaauugaagaauaacgccaaagagauuggcaauaggugcuuugaguucuaccacaaguguaacgacgaaugcauggagagugugaaaaaugggaccuaugauuaccccaaguauuccgaagagagcaaacucaaccgggagaagaucgacggagucaagcuggaaucuauggguguguaccagaucuuagcuauuuauucaacggucgccaguagccuggugcuacucguuucccugggcgcaaucucuuuuuggaugugcucgaaugggagccuucagugucguauuugcauauga

SEQ ID NO: 130813 - RNA, 1698 nt, Artificial Sequence; identical to SEQ ID NO: 128918
  derived and/or modified CDS sequence (opt3) from hemagglutinin__InfluenzaA__ACR15216

SEQ ID NO: 130814 - RNA, 1701 nt, Artificial Sequence
  derived and/or modified CDS sequence (opt3) from hemagglutinin__InfluenzaA__ACR15227
augaagaccaucauugcccugagcuacauacucugccuuguguucgcucagaaacugcccggcaacgacaauuccacagcaacuuuguguuuagggcaccaugccgucccuaacggaacgaucguuaagaccauuacaaaugaucaaaucgaggugacuaacgcgaccgaacugguacagucuucaaguacagguggcauuugcgacagcccacaccagauccuagauggggagaauuguacccucauagacgcucugcuuggagauccgcagugcgacggcuuucaaaacaaaaagugggaucuguucguggaaagauccaaagccuauucuaauuguuaccccuaugacgucccugauuacgcaucguugaggucacucguggccagcagugguacucuggaguuuaacaaugaauccuucaacuggacagggguuacccagaauggaacgucuagcgcuugccagcggcgcuccaacaagucauuuuucagucgacugaauuggcucacucauuuaaaguuuaaauauccagcacugaacgugaccaugcccaauaacgagaaguucgacaaacuuuacaucuggggcguccaccauccuggcacagauaacgaccagauuagcuuguaugcccaaacuucugggcguaucaccguguccacaaagagaucacagcagaccguaauuccaaauaucggaagcaggccccggguucgcgaugugccuaguagaauaucuauuuacuggacgaucgucaaaccaggugacauucugcuaaucaacuccacuggcaaucucaucgcuccgaggggguacuuuaagauucggagcggaaagucgucuauaaugcgcuccgacgcccccaucggcaaauguaacucagagugcauuacaccuaaugguaguaucccaaacgauaagcccuuccagaaugugaaccgaauaaccuauggggcguguccuagauacgugaaacaaaauacucugaaacuugcaacaggaaugaggaacgucccagaacggcagacccguggcauuuuuggcgccaucgcuggguucaucgagaauggaugggaagguaugauggacggcugguauggguuucgccaccagaacagcgagggaacgggccaagccgcagaucugaaguccacccaggcugccauuaaucagaucaacgguaaguugaauagacucauugggaaaacaaacgagaaguuccaccagauagaaaaggaguucucugaaguugagggcaggauccaagaccuggaaaaauacguggaggauacuaagauugacuuauggagcuauaacgcggagcugcucguagcccuugaaaaucagcauaccaucgaucugacagacucagagaugaacaaauuguuugaacggacuaagaaacagcuacgagagaaugcagaagauaugggaaacggcugcuucaagaucuaccacaagugugacaaugcuugcauugggaguauacgcaacggaaccuaugaucaugacguguacagagacgaggcccugaauaacagguuucagaucaaaggugucgagcucaaguccggcuacaaagauuggauucuguggaucagcuucgcuauuucuugcuuucuucuguguguggccuugcucggguucaucaugugggcaugccaaaagggaaauauacgguguaacaucugcauuuga

SEQ ID NO: 130815 - RNA, 1698 nt, Artificial Sequence
  derived and/or modified CDS sequence (opt3) from hemagglutinin__InfluenzaA__ACR15238
augaaggugaaacugcucguccuucugugcaccuucacagccacuuacgcugacacgaucuguauuggcuaucacgcaaacaauagcaccgauacaguugacacuguguuggagaagaacguaaccgugacacauuccgucaauuuacuggaaaacucucacaaugggaaacuaugccuccugaagggaauagcgccccuucagcuggguaacuguucaguggccggcuggaucuuggggaauccugagugcgaacuccugauuaguaaagagagcugguccuacaucguugaaaagccaaacccggagaauggaaccuguuaucccggccauuuugcugauuacgaggaacugagagagcaacucucuucggugagcucauucgaaagguuugagauuuucccuaaggagaguuccuggccaaaccacacugucacaggugugucugccagcugcucccauaauggggaaucaaguuuuuaucggaacuuacuguggcuuaccggcaaaaauggauuguaccccaaccugagcaagucuuaugcaaauaacaaagagaaggaaguucuaguacucuggggcgugcaccacccuccaaacaucgggguccagaaagcccuguaccauacggagaaugcuuacguguccguggucucaagccacuauagucgcaaguucacucccgaaauagcaaagcgaccuaaaguucgugaccaggagggaagaaucaacuacuauuggacccuucuggagccaggugauacaauuaucuuugaagccaauggcaacuugauugcuccgagguacgccuucgcgcucucucggggguuuggauccggcaucauaaauagcaacgcacccauggacaagugugaugccaaaugccagacuccucaaggugcuauuaauucgucucugccauuccagaacgugcaucccguaaccaucggggaguguccuaaguaugugcgcuccgccaaauuaagaauggucacaggacugaggaauauuccaucaauccagagucggggccucuuuggcgcaaucgcuggguucauugaaggagguuggaccggcaugguggacgggugguacggauaucagcaccaaaacgagcagggcagcgguuacgccgcggaucagaaguccacgcagaaugccauaaacgggaucacuaauaaaguuaacucugugauugaaaagaugaauacacaauuuaccgcagucggcaaggaguucaacaaacuugagcgccgaauggaaaaccugaauaagaaaguggacgauggauucaucgacauauggacuuacaacgcugaguugcuaguacugcucgaaaaugagagaacacuggauuuucacgacagcaacguuaagaaucuuuaugaaaaagugaagucacagcugaagaacaaugccaaagagauuggcaacgggugcuucgaguuuuaccauaaguguaaugacgaaugcauggagagugucaaaaacggaaccuaugauuaccccaaguauuccgaagagagcaaauugaauagggagaagaucgacggugugaagcucgaaucuaugggcgucuaccagauccuggcuauuuauucaacgguggccaguagcuuaguucugcuagugucccucggggcaaucucuuucuggaugugcucgaacggaagccugcaaugucggauuugcauauga

SEQ ID NO: 130816 - RNA, 1701 nt, Artificial Sequence
  derived and/or modified CDS sequence (opt3) from hemagglutinin__InfluenzaA__ACR15249
augaagaccaucauugcccugagcuacauacucugccuuguguucgcucagaaacugcccggcaacgacaauuccacagcaacuuuguguuuagggcaccaugccgucccuaacggaacgaucguuaagaccauuacaaaugaucaaaucgaggugacuaacgcgaccgaacugguacagucuucaaguacaggugagauuugcgacagcccacaccagauccuagauggcgaaaauuguacccucauagacgcucugcuuggggauccgcagugcgacggauuucaaaacaaaaagugggaucuguucguggagagauccaaagccuauucuaauuguuaccccuaugacgucccugauuacgcaucguugaggucacucguggccagcaguggcacucuggaauuuaacaaugaguccuucaacuggacagguguuacccagaaugggacgucuagcgcuugcauccggcgcuccaacaauucauuuuucagucgacugaacuggcucacucauagcaaguuuaaguauccagcauuaaaugugaccaugcccaacaacgagaaauucgacaagcuguacauuuggggaguccaccauccuggcacagauaaugaccagaucuuucuuuaugcccaggcuucuggccguauuacuguguccaccaaaagaucacaacagacaguaaucccaaacauagggagcaggccccggguucgcaauauuccuaguagaaucucuauuuacuggaccaucgugaagccaggagauaucuugcugauuaacuccacggguaaucuaauagccccgaggggcuacuucaaaauccggagcgggaagucgucuauuaugcgcuccgacgcgcccaucggaaaguguaacucagaaugcauaacuccuaauggcaguauuccaaacgacaaacccuuucagaaugucaaccgaaucacauauggugcauguccuagauacgugaagcagaauacccucaaacuggccacugggaugaggaacgugccagagaagcaaacacggggaaucuucggcgcuauugccggcuuuaucgaaaaugggugggagggaauggucgaugguugguauggcuuccgucaccagaacagcgaggggauuggacaggcagcugaccuuaaauccacccaagccgcgauagaucagaucaauggcaagcugaaccgcuugauugguaaaacgaacgaaaaguuccaccagaucgagaaggaauuuucugagguugaagggagaauccaggaccucgagaaauacguggaggauaccaagauugaccuguggagcuauaaugccgaauuacugguagcacucgagaaccaacauacaauagaucuuacugacucagaaaugaauaaacuguucgagaagaccaaaaagcaguugagggaaaacgcugaggauaugggcaauggaugcuuuaagaucuaccacaaaugugacaacgccugcauuggcaguauccggaaugggacauaugaucaugacguguaccgagacgaggcucuaaacaaucgcuuccagauuaagggagucgaacugaaauccgguuacaaggauuggauccucuggaucagcuuugccauaucuugcuuccugcuuuguguggcacuguugggcuuuauuaugugggccugccagaaagggaacaucagauguaauauuugcaucuga

SEQ ID NO: 130817 - RNA, 1701 nt, Artificial Sequence
  derived and/or modified CDS sequence (opt3) from hemagglutinin__InfluenzaA__ACR15282
augaagaccaucauugcccugagcuacauacucugccuuguguucgcucagaaacugcccggcaacgacaauuccacagcaacuuuguguuuagggcaccaugccgucccuaacggaacgaucguuaagaccauuaugaaugaucaaaucgaggugacaaacgcgacugaacugguacagucuucaaguaccggugagauuugcgacagcccacaccagauccuagauggcgaaaauuguacacucauagacgcucugcuuggggauccgcagugcgacggauuucaaaacaaaaagugggaucuguucguggagagauccaaagccuauucuaauuguuaccccuaugacgucccugauuacgcaucguugaggucacucguggccagcaguggcacccuggaauuuaacaaugaguccuucaacuggacugguguuacacagaaugggaccucuagcgcuugcauccggcgcuccaacaauucauuuuucagucgacugaacuggcucacgcauagcaaguuuaaguauccagcauuaaaugugacuaugcccaacaacgagaaauucgacaagcuguacauuuggggaguccaccauccuggcaccgauaaugaccagaucuuucuuuaugcccaggcuucuggccguauuacaguguccacuaaaagaucacaacagaccguaaucccaaacauagggagcaggccccggguucgcaauauuccuaguagaaucucuauuuacuggacaaucgugaagccaggagauaucuugcugauuaacuccaccgguaaucuaauagccccgaggggcuacuucaaaauccggagcgggaagucgucuauuaugcgcuccgacgcgcccaucggaaaguguaacucagaaugcauaacgccuaauggcaguauuccaaacgacaaacccuuucagaaugucaaccgaaucacuuauggugcauguccuagauacgugaagcagaauacacucaaacuggccaccgggaugaggaacgugccagagaagcaaacucggggaaucuucggcgcuauugccggcuuuaucgaaaaugggugggagggaauggucgaugguugguauggcuuccgucaccagaacagcgaggggauuggacaggcagcugaccuuaaauccacacaagccgcgauagaucagaucaauggcaagcugaaccgcuugauugguaaaaccaacgaaaaguuccaccagaucgagaaggaauuuucugagguugaagggagaauccaggaccucgagaaauacguggaggauacgaagauugaccuguggagcuauaaugccgaauuacugguagcacucgagaaccaacauaccauagaucuuacagacucagaaaugaauaaacuguucgagaagacuaaaaagcaguugagggaaaacgcugaggauaugggcaauggaugcuuuaagaucuaccacaaaugugacaacgccugcauuggcaguauccggaaugggaccuaugaucaugacguguaccgagacgaggcucuaaacaaucgcuuccagauuaagggagucgaacugaaauccgguuacaaggauuggauccucuggaucagcuuugccauaucuugcuuccugcuuuguguggcacuguugggcuuuauuaugugggccugccagaaagggaacaucagauguaauauuugcaucuga

SEQ ID NO: 130818 - RNA, 1701 nt, Artificial Sequence
  derived and/or modified CDS sequence (opt3) from hemagglutinin__InfluenzaA__ACR15293
augaagaccaucauugcccugagcuacauacucugccuuguguucgcucagaaacugcccggcaacgacaauuccacagcaacuuuguguuuagggcaccaugccgucccuaacggaacgaucguuaagaccauuacaaaugaucaaaucgaggugacuaacgcgaccgaacugguacagucuucaaguacagguggcauuugcgacagcccacaccagauccuagauggggagaauuguacccucauagacgcucugcuuggagauccgcagugcgacggcuuucaaaacaaaaagugggaucuguucguggaaagauccaaagccuauucuaauuguuaccccuaugacgucccugauuacgcaucguugaggucacucaucgccagcagugguacucuggaguuuaacaaugaaaacuucaauuggacaggggugacccagaacggaacguccucugcuugcaagcggggcagcgacaauuccuuuuucucacgccugaacuggcucacucauuuaaaguuuaaauauccagcacugaagguuaccaugcccaauaacgagaaauucgauaaacuuuacauuuggggcgugcaccauccugggacagacaacgaucagaucuuuuuguaugcccaggcuaguggacgaauuacugucagcaccaagcguucucaacagacagugaucccaaauauagguuccagacccaggguacggaacauuccuucacgcaucagcauuuacuggaccaucguuaagccaggcgacauccugcuaauuaauaguacggggaaccucauagccccgagaggauacuucaagaucaggucuggcaaauccagcauuaugcggucggacgcgcccaucgguaaguguaauucugagugcauaacuccuaacggguccauuccaaaugauaaacccuuucagaacgugaaucgcaucacauauggagcauguccucgauacgucaagcagaacacccugaaacuugccacuggcaugagaaaugugccagaaaagcaaacaaggggcaucuucggggcuauugccggauuuaucgagaacgguugggaaggcaugguggacgggugguauggauuccggcaccaaaauucagagggcauuggucaggcagcugaucugaaaaguacccaggccgcgauaaaccagaucaaugggaaguugaaccgucucauuggcaagacgaacgagaaauuccaccagaucgaaaaggaguuuagcgaagucgagggacgcauccaggaccuggaaaaauacguugaggauaccaagauugacuuaugguccuauaaugccgagcugcucguggcacuugaaaaccaacauacaauagaucugacugacucugagaugaauaaauuguucgaaagaaccaagaagcagcuaagggagaacgcugaagauaugggcaaugggugcuuuaaaaucuaccacaagugugacaacgccugcauuggaagcauccggaaugguacauaugaucaugacguauaccgagacgaggcucugaacaaucgcuuccagauuaaaggcguggagcucaagucaggguacaaagauuggauccuguggauaaguuuugccaucuccugcuuccuucugugugucgcauugcucggauuuauuaugugggccugccagaagggcaacaucagauguaauauuugcaucuga

SEQ ID NO: 130819 - RNA, 1698 nt, Artificial Sequence
  derived and/or modified CDS sequence (opt3) from hemagglutinin__InfluenzaA__ACR15304
augaaggccaaacugcucgugcuucugugcaccuucacagcuacuuacgcagacacgaucuguauuggcuaucacgccaacaauagcaccgauacagucgacacuguuuuggagaagaacgugaccguaacacauuccgugaauuuacuggaagauucucacaacgggaaacuaugccuccugaagggaauagcgccccuucagcuggguaauuguucagucgcuggcuggaucuuggggaacccugagugcgaacuccugauuaguaaagagagcugguccuacaucguggaaaccccaaauccggagaacggaacuuguuaucccggcuacuuugccgacuaugaggaacugagagagcaacucucuucgguuagcucauucgaaagguuugagauuuucccuaaggagaguuccuggccaaaucauacagugaccggugucucugcaagcugcucccacaacgggaagucaaguuuuuaccggaauuuacuguggcuuacgggcaaaaacggauuguaucccaaucugagcaagucuuacgccaacaauaaagaaaaggaggugcuaguacucuggggcguucaucacccuccaaacacugggaaccagcgcgcucuguaccacaccgaaaaugcauauguguccgucgugucaagccauuacagucgacguuucacacccgagaucgccaaaagaccuaaggugagggaucaggaaggacggauaaacuauuacuggacucuucuggagccaggugacaccaucauuuuugaggcuaauggcaacuugaucgccccgugguaugcguucgcacucucucgcggguuuggauccggcauuaucacaagcaaugcccccauggaugaaugugacgcuaagugccagaccccucaaggugccauaaacucgucucugccauuccagaauguccaccccguuacgauuggggaguguccuaaauacgugagauccgcaaaguuaaggaugguaacuggacugcggaacaucccaucaauucagagucgcggccucuuuggcgcuaucgccggguucaucgaaggagguuggacaggcaugguggaugggugguauggauaccaucaccagaaugagcaaggcagcgguuacgcggccgaccagaaauccacccagaacgcaauuaaugggauaacuaacaaggucaauucugugaucgaaaagaugaacacacaguuuaccgcuguuggcaaagaguucaaucgacuugagagaaggauggaaaaccugaacaaaaagguggaugacggauucuuggauauuuggacguauaaugccgagcuacugguccuccuggaaaacgagcggacccuugacuuucacgacagcaaugugaagaaccuguacgaaaaaguaaagucacaauugaaaaauaacgcuaaggagaucggcaaugggugcuucgaguuuuaucauaaauguaacaaugaaugcauggagaguguuaagaacggaacauacgauuaucccaaguacuccgaagagagcaaacucaaucgugagaagauagacggugugaaacuggaaucuaugggcgucuaucagauuuuagccaucuacucaacuguggcaaguagccugguccuacucgugucccugggggccaucucuuucuggaugugcucgaacggaagccuucagugucgcauuugcaucuga

SEQ ID NO: 130820 - RNA, 1698 nt, Artificial Sequence
  derived and/or modified CDS sequence (opt3) from hemagglutinin__InfluenzaA__ACR15315
augaaggccaaacugcucgugcuucugugcaccuucacagcuacuuacgcagacacgaucuguauuggcuaucacgccaacaauagcaccgauacagucgacacuguuuuggagaagaacgugaccguaacacauuccgugaauuuacuggaagauucucacaacgggaaacuaugccuccugaagggaauagcgccccuucagcuggguaauuguucagucgcuggcuggaucuuggggaacccugagugcgaacuccugauuaguaaagagagcugguccuacaucguggaaaccccaaauccggagaacggaacuuguuaucccggcuacuuugccgacuaugaggaacugagagagcaacucucuucgguuagcucauucgaaagguuugagauuuucccuaaggguaguuccuggccaaaucauacagugaccggggucucugcaagcugcucccacaacggaaagucaaguuuuuaccggaauuuacuguggcuuacgggcaaaaacggcuuguaucccaaucugagcaugucuuacgugaacaauaaggagaaagaaguacuuguucucuggggagugcaucacccuccaaacauccgcgaucagcgagcccuguaccacacugagaacgcuuaugucuccguggugucaagccauuacagucguagauucacccccgaaauagcaaagaggccuaaaguccgggaccaggaggggcgcaucaauuauuacuggacacuucuggaaccaggugauacuauuaucuuugaggccaacggcaauuugauugcuccgugguaugccuucgcgcucucuagaggguuuggauccggcaucauaaccagcaacgcacccaugggugagugugacgccaagugccagacaccucaaggggcuauuaauucgucucugccauuccagaacguucaccccgugaccaucggagaauguccuaaguacguaagguccgccaaauuacggauggugacgggccugcgcaauauuccaucaauccagagucgaggccucuuuggggcaaucgcuggauucauugaggguggcuggacugggauggucgauggaugguauggcuaccaucaccagaacgaacaagguagcggguacgccgcggaccagaaguccacacagaaugccauaaacggcaucaccaauaaagugaacucuguuauugagaagaugaauacucaguuuacagcagugggaaaagaguucaacaagcuagaaagaaggauggagaaucugaacaaaaaggucgaugacggcuucuuggauaucuggaccuauaacgcugaacuacuggugcuccuggagaaugaacggacgcuugacuuucacgacagcaacguaaagaaucuguacgagaaaguuaagucacaauugaaaaacaaugccaaggaaauagggaacggaugcuucgaguuuuaucauaaauguaauaacgagugcauggaaagugugaagaaugguaccuacgauuaucccaaguacuccgaggaaagcaaacucaaccgugagaagauugacggcgucaaacuggagucuauggggguguaucagaucuuagcuaucuacucaacagucgccaguagccuggugcuacucguuucccugggagcaauuucuuucuggaugugcucgaauggcagccuucagugucgcaucugcauuuga

SEQ ID NO: 130821 - RNA, 1698 nt, Artificial Sequence
  derived and/or modified CDS sequence (opt3) from hemagglutinin__InfluenzaA__ACR15326
augaaggccaaacugcucgugcuucugugcaccuucacagcuacuuacgcagacacgaucuguauuggcuaucacgccaacaauagcaccgauacagucgacacuguuuuggagaagaacgugaccguaacacauuccgugaauuuacuggaagauucucacaacgggaaacuaugccuccugaagggaauagcgccccuucagcuggguaauuguucagucgcuggcuggaucuuggggaacccugagugcgaacuccugauuaguaaagagagcugguccuacaucguggaaaccccaaauccggagaacggaacuuguuaucccggcuacuuugccgacuaugaggaacugagagagcaacucucuucgguuucaucuuucgaaagguuugagauuuucccuaaggguaguuccuggccaaaucauacagugaccggggucucugcaagcugcucccacaacggaaagucaaguuuuuaccggaauuuacuguggcuuacgggcaaaaacggcuuguaucccaaucugagcaugucuuacgugaacaauaaggagaaagaaguacuuguucucuggggagugcaucacccuccaaacaucgggaaccagcgcgcccuguaccacacugagaaugcuuaugucuccguggugucaagccauuacagucgacguuucacccccgaaauagcaaagagaccuaaagucagggaucaggagggucggaucaacuauuacuggacacuucuggaaccaggcgacacuauuaucuuugaggccaaugggaacuugauugcuccgugguaugccuucgcgcucucucgcggauuuggcuccgguaucauaaccagcaaugcacccaugggggagugugaugaaaagugccagacaccucaaggagccauuaacucgucucugccauuccagaauguucaccccgugaccaucggcgaguguccuaaguacguaagauccgcuaaauuaaggauggugacgggccugcggaacauuccaucaauccagagucgcgggcucuuuggagccaucgcagguuucauugaaggcggguggacuggaauggucgacggcugguaugguuaccaucaccagaaugagcaagggagcggcuacgcugccgaucagaaguccacacagaacgcgauaaauggaaucaccaacaaagugaauagcguuauugaaaagaugaacacucaguuuacagccgugggcaaagaguucaauaagcuagagcgaagaauggaaaaccugaacaaaaaggucgacgauggguucuuggacaucuggaccuauaaugcagagcuacuggugcuccuggaaaacgagaggacgcuugauuuucacgacagcaauguaaagaaccuguacgaaaaaguuaagucacaauugaaaaauaacgcuaaggagauaggaaaugguugcuucgaguuuuaucauaaauguaacaaugaaugcauggagagugugaagaacggcaccuacgacuaucccaaguacuccgaagagagcaaacucaaucgggagaagauugauggggucaaacuggaaucuaugggaguguaucagaucuuagccaucuacucaacagucgcuaguagccuggugcuacucguuucccugggcgccauuucuuucuggaugugcucgaacgguagccuucagugucguaucugcauuuga

SEQ ID NO: 130822 - RNA, 1698 nt, Artificial Sequence
  derived and/or modified CDS sequence (opt3) from hemagglutinin__InfluenzaA__ACR15359
augaaggugaaacugcucguccuucugugcaccuucacagccacuuacgcugacacgaucuguauuggcuaucacgcaaacaauagcaccgauacaguugacacuguguuggagaagaacguaaccgugacacauuccgucaauuuacuggaaaacucucacaaugggaaacuaugccuccugaagggaauagcgccccuucagcuggguaacuguucaguggccggcuggaucuuggggaauccugagugcggacuccugauuaguaaagaaagcugguccuacaucguugagaagccaaacccggaaaauggcaccuguuaucccggucauuuugcugauuacgaggagcugagagaacaacucucuucggugagcucauucgagagguuugaaauuuucccuaaggagaguuccuggccaaaccacacugucacaggggugucugccagcugcucccauaauggagagucaaguuuuuaucggaacuuacuguggcuuaccggcaaaaauggcuuguaccccaaccugagcaagucuuaugcaaauaacaaagaaaaggagguucuaguacucuggggagugcaccacccuccaaacaucggggaccagaaagcccuguaccauacggaaaaugcuuacgucuccguggugucaagccacuauagucgcaaguucacucccgagauagcaaagcgaccuaaaguccgugaucaggaagguagaaucaacuacuauuggacccuucuggagccaggcgacacaauuaucuuugaggccaaugggaacuugauugcuccgagguacgccuucgcgcucucucggggauuuggcuccgguaucauaaauagcaacgcacccauggauaagugugacgccaaaugccagacuccucaaggggcuauuaauucgucucugccauuccagaacguucaucccgugaccaucggagaauguccuaaguauguacgcuccgccaaauuaagaauggugacaggccugaggaauauuccaucaauccagagucggggccucuuuggggcaaucgcuggauucauugaggguggcuggaccgggauggucgauggaugguacggcuaucaccaccagaacgaacaagguagcggguacgccgcggaccagaaguccacgcagaaugccauaaacggcaucacuaauaaagugaacucuguuauugagaagaugaauacacaguuuaccgcagugggaaaggaguucaacaaacuugaacgccgaauggagaaccugaauaagaaagucgaugacggcuucaucgauauauggacuuacaacgcugaauugcuagugcugcucgagaaugaaagaacacuggacuuucaugacagcaacguaaagaaucuuuaugagaaaguuaagucacaacugaagaacaaugccaaagaaauugggaacggaugcuucgaguuuuaccacaaguguaaugaugagugcauggaaagugugaaaaacgguaccuaugacuaccccaaguauuccgaggaaagcaaauugaauagggagaagaucgauggcgucaagcucgagucuauggggguguaccagauccuggcuauuuauucaacggucgccaguagcuuagugcugcuaguuucccucggagcaaucucuuucuggaugugcucgaacggcagccugcagugucggauuugcauauga

SEQ ID NO: 130823 - RNA, 1698 nt, Artificial Sequence
  derived and/or modified CDS sequence (opt3) from hemagglutinin__InfluenzaA__ACR15370
augaaggugaaacugcucguccuucugugcaccuugacagccacuuacgcugacacgaucuguauuggcuaucacgcaaacaauagcaccgauacaguugacacuguguuagagaagaacguaaccgugacacauuccgucaaucugcuagaaaacucucacaaugggaaacucugccugcuuaagggaauagcgccccugcaguuggguaacuguucaguggccggcuggauccucgggaauccugagugcgaacugcugauuaguaaagagagcugguccuacaucguugaaaagccaaacccggagaauggaaccuguuaucccggccauuucgcugauuacgaggaacucagagagcaauuaucuucggugagcucauuugaaagguucgagauuuuuccuaaggagaguuccuggccaaaccacacugucacaggugugucugccagcugcucccauaauggggaaucaaguuucuaucggaaccugcuuugguugaccggcaaaaauggacuguaccccaaccuaagcaagucuuaugcaaauaacaaagagaaggaaguacucguucuguggggcgugcaccacccuccaaacaucggggaccagaaagcccuuuaccauacggagaaugcuuacgucuccguggugucaagccacuauagucgcaaguuuacucccgaaauagcaaagcgaccuaaaguccgugaucaggagggaagaaucaacuacuauuggacccuguuggagccaggugacacaauuaucuucgaagccaauggcaaccucauugcuccgagguacgccuuugcgcugucucggggguucggauccggcaucauaaauagcaacgcacccauggauaagugugacgccaaaugccagacuccucaaggugcuauuaauucgucuuuaccauuucagaacguucaucccgugaccaucggggaguguccuaaguauguacgcuccgccaaacugagaauggugacaggacucaggaauauuccaucaauccagagucggggccuuuucggcgcaaucgcuggguuuauugaaggagguuggaccggcauggucgaugggugguacggauaucaccaccagaacgagcaaggcagcgguuacgccgcggaccagaaguccacgcagaaugccauaaacgggaucacuaauaaagugaacucuguuauugaaaagaugaauacacaguucaccgcagugggcaaggaguuuaacaaacuggagcgccgaauggaaaacuugaauaagaaagucgaugacggauucaucgauauauggacuuacaacgcugagcuacuggugcuccuggaaaaugagagaacacuugacuuccaugacagcaacguaaagaaucuguaugaaaaaguuaagucacaauugaagaacaaugccaaagagauuggcaacgggugcuuugaguucuaccacaaguguaaugaugaaugcauggagagugugaaaaacggaaccuaugacuaccccaaguauuccgaagagagcaaacucaauagggagaagaucgauggugucaagcuggaaucuaugggcguguaccagaucuuagcuauuuauucaacggucgccaguagccugauccuacucgugucccugggggcaauuucuuuuuggaugugcucgaacggaagccuucagugucggauaugcaucuga

SEQ ID NO: 130824 - RNA, 1701 nt, Artificial Sequence; identical to SEQ ID NO: 130349
  derived and/or modified CDS sequence (opt3) from hemagglutinin__InfluenzaA__ACR15381

SEQ ID NO: 130825 - RNA, 1701 nt, Artificial Sequence; identical to SEQ ID NO: 130356
  derived and/or modified CDS sequence (opt3) from hemagglutinin__InfluenzaA__ACR15392

SEQ ID NO: 130826 - RNA, 1701 nt, Artificial Sequence; identical to SEQ ID NO: 129976
  derived and/or modified CDS sequence (opt3) from hemagglutinin__InfluenzaA__ACR15403

SEQ ID NO: 130827 - RNA, 1701 nt, Artificial Sequence; identical to SEQ ID NO: 129976
  derived and/or modified CDS sequence (opt3) from hemagglutinin__InfluenzaA__ACR15414

SEQ ID NO: 130828 - RNA, 1698 nt, Artificial Sequence; identical to SEQ ID NO: 130822
  derived and/or modified CDS sequence (opt3) from hemagglutinin__InfluenzaA__ACR15425

SEQ ID NO: 130829 - RNA, 1698 nt, Artificial Sequence
  derived and/or modified CDS sequence (opt3) from hemagglutinin__InfluenzaA__ACR15436
augaaggugaaacugcucguccuucugugcaccuucacagccacuuacgcugacacgaucuguauuggcuaucacgcaaacaauagcaccgauacaguugacacuguguuggagaagaacguaaccgugacacauuccgucaauuuacuggaaaacucucacaaugggaaacuaugccuccugaagggaauagcgccccuucagcuggguaacuguucaguggccggcuggaucuuggggaauccugagugcgaacuccugauuaguaaagagagcugguccuacaucguugaaaagccaaacccggagaauggaaccuguuaucccggccauuuugcugauuacgaggaacugagagagcaacucucuucggugagcucauucgaaagguuugagauuuucccuaaggagaguuccuggccaaaccacacugucacaggugugucugccagcugcucccauaauggggaaucaaguuuuuaucggaacuuacuguggcuuaccgggaaaaauggcuuguaccccaaccugagcaagucuuaugcaaauaacaaaggcaaggaggugcuaguucucuggggagugcaccacccuccaaacaucggagaccagaauacgcuguaccauacugaaaacgccuacgucuccguggugucaagccacuauagucgcaaauucacccccgagauagcuaagcgaccuaagguccgugaucaggaagguagaaucaauuacuauuggacacuucuggagccaggcgacacuauuaucuuugaggcaaacgggaauuugauugccccgagguacgcuuucgcccucucucggggauuuggcuccgguaucauaaacagcaaugcgcccauggauaaaugugacgcaaagugccagaccccucaaggggccauuaacucgucucugccauuccagaauguucaucccgugacaaucggagaauguccuaaauauguacgcuccgcuaaguuaagaauggugaccggccugaggaacauuccaucaauccagagucggggccucuuuggggccaucgcaggauucauugaggguggcuggacggggauggucgauggaugguacggcuaucaccaccagaaugaacaagguagcggguacgcugccgaccagaaauccacucagaacgcgauaaauggcaucacaaacaagguaaauucuguuauugagaaaaugaacacccaguuuacugccgugggaaaggaguucaacaaacuugaacgccgaauggagaaucugaacaaaaaggucgaugacggcuucaucgauauauggacauacaaugcagaauugcuagugcugcucgagaacgaaagaacccuggacuuucaugacagcaauguaaagaaccuuuaugagaagguuaaaucacaacugaagaauaacgcuaaggaaauugggaauggaugcuucgaguuuuaccacaaauguaacgaugagugcauggaaagugugaagaaugguacguaugacuaccccaaauauuccgaggaaagcaaguugaacagggagaaaaucgauggcgucaagcucgagucuauggggguguaccagauccuggccauuuauucaaccgucgcuaguagcuuagugcugcuaguuucccucggagccaucucuuucuggaugugcucgaauggcagccugcagugucggauuugcauauga

SEQ ID NO: 130830 - RNA, 1698 nt, Artificial Sequence
  derived and/or modified CDS sequence (opt3) from hemagglutinin__InfluenzaA__ACR15458
augaaggugaaacugcucguccuucugugcaccuucacagccacuuacgcugacacgaucuguauuggcuaucacgcaaacaauagcaccgauacaguugacacuguguuggagaagaacguaaccgugacacauuccgucaauuuacuggaaaacucucacaaugggaaacuaugccuccugaagggaauagcgccccuucagcuggguaacuguucaguggccggcuggaucuuggggaauccugagugcgaacuccugauuaguaaagagagcugguccuacaucguugaaaacccaaauccggagaacggaaccuguuaucccggccauuuugcugauuacgaggaacugagagagcaacucucuucggugagcucauucgaaagguuugagauuuucccuaaggagaguuccuggccaaaucacacugucacaggugugucugccagcugcucccauaacggggaaucaaguuuuuaucggaauuuacuguggcuuaccggaaagaacggcuuguaccccaaucugagcaaaucuuaugcaaacaacaaggagaaagaagugcuaguucucuggggcgugcaccacccuccaaauaucggggaccagaaggcccuguaccauacggagaacgcuuacgucuccguggugucaagccacuauagucgcaaauucacucccgaaauagcaaagcgaccuaagguccgugaucaggagggaagaaucaauuacuauuggacccuucuggagccaggugacacaauuaucuuugaagccaacggcaauuugauugcuccgagguacgccuucgcgcucucucggggguuuggauccggcaucauaaacagcaaugcacccauggauaaaugugacgccaagugccagacuccucaaggugcuauuaacucgucucugccauuccagaauguucaucccgugaccaucggggaguguccuaaauauguacgcuccgccaaguuaagaauggugacaggacugaggaacauuccaucaauccagagucggggccucuuuggcgcaaucgcuggguucauugaaggagguuggaccggcauggucgaugggugguacggauaucaccaccagaaugagcaaggcagcgguuacgccgcggaccagaaauccacgcagaacgccauaaaugggaucacuaacaagguaaauucuguuauugaaaagaugaacacacaguuuaccgcagugggcaaggaguucaacaaacuugagcgccgaauggaaaaucugaacaaaaaggucgaugacggauucaucgauauauggacuuacaaugcugaguugcuagugcugcucgaaaacgagagaacacuggacuuucaugacagcaauguuaaaaaccuuuaugaaaagguaaaaucacaacugaagaauaacgccaaggagauuggcaaugggugcuucgaguuuuaccacaaauguaacgaugaaugcauggagagugugaagaauggaaccuaugacuaccccaaauauuccgaagagagcaaguugaacagggagaaaaucgauggugucaagcucgaaucuaugggcguguaccagauccuggcuauuuauucaacggucgccaguagcuuagugcugcuaguuucccucggggcaaucucuuucuggaugugcucgaauggaagccugcagugucggauuugcauauga

SEQ ID NO: 130831 - RNA, 1698 nt, Artificial Sequence
  derived and/or modified CDS sequence (opt3) from hemagglutinin__InfluenzaA__ACR15469
augaaggugaaacugcucguccuucugugcaccuucacagccacuuacgcugacacgaucuguauuggcuaucacgcaaacaauagcaccgauacaguugacacuguguuggagaagaacguaaccgugacacauuccgucaauuuacuggaagauucucacaacgggaaacuaugccuccugaagggaauagcgccccuucagcuggguaauuguucaguggccggcuggaucuuggggaacccugagugcgaacuccugauuaguaaagagagcugguccuacaucguugaaaagccagacccggagaauggaaccuguuaucccggccauuuugcugauuacgaggaacugagagagcaacucucuucggugagcucauucgaaagguuugagauuuucccuaaggagaguuccuggccaaaccacacugucacaggugugucugccagcugcucccauaauggggaaucaaguuuuuaucggaacuuacuguggcuuaccggcaaaaauggauuguaccccaaccugagcaagucuuaugcaaauaacaaagagaaggaagugcuaguucucuggggcgugcaccacccuccaaauaucggggaccagaacacgcuguaccauacugagaacgccuacgucuccguggugucaagccacuauagucgcaaauucacccccgaaauagcuaagcgaccuaagguccgugaucaggagggaagaaucaauuacuauuggacacuucuggagccaggugacacuauuaucuuugaagcaaacggcaauuugauugccccgagguacgcuuucgcccucucucggggguuuggauccggcaucauaaacagcaaugcgcccauggauaaaugugacgcaaagugccagaccccucaaggugccauuaacucgucucugccauuccagaauguucaucccgugacaaucggggaguguccuaaauauguacgcuccgcuaaguuaagaauggugaccggacugaggaacauuccaucaauccagagucggggccucuuuggcgccaucgcaggguucauugaaggagguuggacgggcauggucgaugggugguacggauaucaccaccagaaugagcaaggcagcgguuacgcugccgaccagaaauccacucagaacgcgauaaaugggaucacaaacaagguaaauucuguuauugaaaagaugaacacccaguuuacugccgugggcaaggaguucaauaaacuugagcgccgaauggaaaaccugaacaaaaaggucgaugacggauucaucgacauauggacauacaaugcagaguugcuagugcugcucgaaaacgagagaacccuggauuuucaugacagcaauguuaaaaaccuuuaugaaaagguaaaaucacaacugaagaauaacgcuaaggagauuggcaaugggugcuucgaguuuuaccacaaauguaacgaugaaugcauggagagugugaagaauggaacguaugacuaccccaaauauuccgaagagagcaaguugaacagggagaaaaucgauggugucaagcucgaaucuaugggcguguaccagauccuggccauuuauucaaccgucgcuaguagcuuagugcugcuaguuucccucggggccaucucuuucuggaugugcucgaauggaagccugcagugucggauuugcauauga

SEQ ID NO: 130832 - RNA, 1698 nt, Artificial Sequence; identical to SEQ ID NO: 130829
  derived and/or modified CDS sequence (opt3) from hemagglutinin__InfluenzaA__ACR15480

SEQ ID NO: 130833 - RNA, 1698 nt, Artificial Sequence
  derived and/or modified CDS sequence (opt3) from hemagglutinin__InfluenzaA__ACR15491
augaaggugaaacugcucguccuucugugcaccuucacagccacuuacgcugacacgaucuguauuggcuaucacgcaaacaauagcaccgauacaguugacacuguguuggagaagaacguaaccgugacacauuccgucaauuuacuggaaaacucucacaaugggaaacuaugccuccugaagggaauagcgccccuucagcuggguaacuguucaguggccggcuggaucuuggggaauccugagugcgaacuccugauuaguaaagagagcugguccuacaucguugaaaagccaaacccggagaauggaaccuguuaucccggccauuuugcugauuacgaggaacugagagagcaacucucuucggugagcucauucgaaagguuugagauuuucccuaaggagaguuccuggccaaaccacacugucacaggugugucugccagcugcucccauaauggggaaucaaguuuuuaucggaacuuacuguggcuuaccggacgcaauggcuuguaccccaaccugagcaaaucuuaugcaaauaacaaggagaaagaaguucuaguacucuggggcgugcaccacccuccaaacaucgucgaccagaagacgcuguaccgaacugagaaugccuacguguccguggucucaagccauuauagucguaaauucacccccgaaauagcuaagagaccuaagguuagggaucaggaggggcggaucaacuacuauuggacacuucuggagccaggagacacuauuaucuuugaagcaaaugguaacuugauugccccgcgcuacgcuuucgcccucucuagaggcuuuggguccggaaucauaaauagcaacgcgcccauggauaaaugugacgcaaagugccagaccccucaaggcgccauuaauucgucucugccauuccagaacgugcaccccguaacaaucggugaguguccuaaauaugugagguccgcuaaguuacggauggucaccgggcugcgcaauauuccaucaauccagagucgaggacucuuuggcgccaucgcaggcuucauugaagggggauggacggguaugguggauggcugguacggguaucaucaccagaacgagcaaggaagcggcuacgcugccgaccagaaauccacucagaaugcgauaaacgguaucacaaauaagguuaacucugugauugaaaagaugaauacccaguuuacugccgucgggaaggaguucaacaaacuugagagaaggauggaaaaccugaauaaaaagguggaugacggcuucaucgauauauggacauacaacgcagaguugcuaguacugcucgaaaaugagcggacccuggacuuucacgacagcaacguuaaaaaucuuuaugaaaaggugaaaucacaacugaagaacaaugcuaaggagauuggaaacggcugcuucgaguuuuaccauaaauguaaugaugaaugcauggagagugucaagaacgggacguaugacuaccccaaauauuccgaagagagcaaguugaaucgugagaaaaucgauggaaucaagcucgaaucuauggguguguaccagauucuggccaucuauucaaccgucgcuaguagcuuagugcugcuaguuucccucggcgccauuucuuucuggaugugcucgaacgggagccugcagugucgcauaugcaucuga

SEQ ID NO: 130834 - RNA, 1698 nt, Artificial Sequence
  derived and/or modified CDS sequence (opt3) from hemagglutinin__InfluenzaA__ACR15502
augaaggugaaacugcucguccuucugugcaccuucacagccacuuacgcugacacgaucuguauuggcuaucacgcaaacaaugccaccgauacaguugacacuguguuggagaagaacguaaccgugacacauagcgucaauuuacuggaaaacucccacaaugggaaacuaugccuccugaagggaauagcgccccuucagcuggguaacuguucuguggcuggcuggaucuuggggaauccugagugcgaacuccugauuucaaaagagaguuggagcuacaucguugaaaagccaaacccggagaauggaaccuguuaucccggccauuuugccgauuacgaggaacugagagagcaacucuccucugugucgucauucgaaagguuugagauuuucccuaaggagagcaguuggccaaaccacacugucacagguguguccgcaucuugcagccauaauggggaauccucauuuuaucggaacuuacuguggcuuaccgggaaaaauggcuuguaccccaaccugaguaagagcuaugccaauaacaaaggcaaggaggugcuaguucucuggggagugcaccacccuccaaacaucggagaccagaauacgcuguaccauacugaaaacgcuuacgucucugugguguccucacacuauagccgcaaauucacccccgagauagcaaagcgaccuaagguccgugaucaggaagguagaaucaauuacuauuggacacuucuggagccaggcgacacuauuaucuuugaggccaacgggaauuugauugcuccgagguacgccuucgcgcucagucggggauuuggcucugguaucauaaacuccaaugcacccauggauaaaugugacgccaagugccagaccccucaaggggcuauuaacagcucgcugccauuccagaauguucaucccgugacaaucggagaauguccuaaauauguacgcucugccaaguuaagaauggugaccggccugaggaacauuccauccauccagucacggggccucuuuggggcaaucgcuggauucauugaggguggcuggacggggauggucgauggaugguacggcuaucaccaccagaaugaacaagguaguggguacgccgcggaccagaaaagcacucagaacgccauaaauggcaucacaaacaagguaaauuccguuauugagaaaaugaacacccaguuuacugcagugggaaaggaguucaacaaacuugaacgccgaauggagaaucugaacaaaaaggucgaugacggcuucaucgauauauggacauacaaugcugaauugcuagugcugcucgagaacgaaagaacccuggacuuucaugacucuaauguaaagaaccuuuaugagaagguuaaaagccaacugaagaauaacgccaaggaaauugggaauggaugcuucgaguuuuaccacaaauguaacgaugagugcauggaaucagugaagaaugguacguaugacuaccccaaauauagugaggaauccaaguugaacagggagaaaaucgauggcgucaagcucgagagcauggggguguaccagauccuggcuauuuauucuaccgucgccucaaguuuagugcugcuaguuagccucggagcaaucuccuucuggaugugcucuaauggcucgcugcagugucggauuugcauauga

SEQ ID NO: 130835 - RNA, 1698 nt, Artificial Sequence; identical to SEQ ID NO: 130691
  derived and/or modified CDS sequence (opt3) from hemagglutinin__InfluenzaA__ACR15513

SEQ ID NO: 130836 - RNA, 1701 nt, Artificial Sequence
  derived and/or modified CDS sequence (opt3) from hemagglutinin__InfluenzaA__ACR15524
augaagaccaucauugcccugagcuacauacucugccuuguguucgcucagaaacugcccggcaacgacaauuccacagcaacuuuguguuuagggcaccaugccgucccuaacggaacgaucguuaagaccauuacaaaugaucaaaucgaggugacuaacgcgaccgaacugguacagucuucaaguacagguggcauuugcgacagcccacaccagauccuagauggggagaauuguacccucauagacgcucugcuuggagauccgcagugcgacggcuuucaaaacaaaaagugggaucuguucguggaaagauccaaagccuauucuaauuguuaccccuaugacgucccugauuacgcaucguugaggucacucguggccagcagugguacucuggaguuuaacaaugaauccuucaacuggacagggguuacccagaauggaacgucuagcgcuugcaagcggcgcuccaacaagucauuuuucagucgacugaauuggcucacucauuuaaaauuuaaguauccagcacugaacgugaccaugcccaauaacgagaaauucgacaaacuuuacaucuggggcguccaccauccuggcacagauaacgaccagauuagcuuguaugcccaggcuucugggcguaucacuguguccaccaagagaucacaacagacaguaauuccaaauaucggaagcaggccccggguucgcgaugugccuaguagaauaucuauuuacuggaccaucgucaaguccggugacauucugcuaaucaacagcacgggcaaucucaucgccccaaggggguacuuuaagauucggucgggaaaaucuuccauaaugcgcucagacgcgccgaucggcaaguguaacagugagugcauuacucccaaugguagcaucccuaacgauaaaccauuccagaaugugaaccgaauaacauauggggcaugucccagauacgugaagcagaauacccugaaacuugccacuggaaugaggaacgucccugaaaagcaaacacggggcauuuuuggcgcuaucgccggguucaucgagaauggaugggaagguaugguugacggcugguauggguuucgucaccagaacuccgagggaaccggccaggcagcugaucugaaaucuacgcaagccgcgauuaaucagaucaacgguaaguugaaucgccucauugggaagaccaacgagaaauuccaccagauagaaaaggaguucagcgaaguggagggcagaauccaggaccuggaaaaauacguagaggauacaaagauugacuuauggucauauaacgccgagcugcucguggcacuugaaaaucaacauacuaucgaucugaccgacagugagaugaacaaauuguuugaaaggacaaagaagcagcuacgggagaaugcugaagauaugggaaacggcugcuucaaaaucuaccacaagugugacaaugccugcauuggguccauacgaaacggaacuuaugaucaugacgucuaccgcgacgaggcucugaauaacagauuucagaucaaagguguggagcucaagagcggcuacaaagauuggauucuguggaucucuuucgccauuucaugcuuucuucuguguguuguguugcucggguucaucaugugggcaugccagaagggaaauauaagguguaacaucugcauuuga

SEQ ID NO: 130837 - RNA, 1701 nt, Artificial Sequence; identical to SEQ ID NO: 130645
  derived and/or modified CDS sequence (opt3) from hemagglutinin__InfluenzaA__ACR15535

SEQ ID NO: 130838 - RNA, 1701 nt, Artificial Sequence
  derived and/or modified CDS sequence (opt3) from hemagglutinin__InfluenzaA__ACR15546
augaagaccaucauugcccugagcuacauacucugccuuguguucgcucagaaacugcccggcaacgacaauuccacagcaacuuuguguuuagggcaccaugccgucccuaacggaacgaucguuaagaccauuacaaaugaucaaaucgaggugacuaacgcgaccgaacugguacagucuucaaguacagguggcauuugcgacagcccacaccauauccuagauggggagaauuguacccucauagacgcucugcuuggagauccgcagugcgacggcuuucagaacaaaaagugggaucuguucguggaaagauccaaagccuauucuaauuguuaccccuaugacgucccugauuacgcaucguugaggucacucguggccagcagugguacucuggaguuuaacaaugaauccuucaacuggacagggguuacccaaaauggaacgucuagcgcuugcaagcggcgcuccaacaauucauuuuucagucgacugaacuggcucacucacuuaaaguuuaaauauccagcacugaaugugaccaugcccaacaacgagaaguucgacaaacuuuacaucuggggcguccaucacccuggcacagauaaugaccagauuagcuuguaugcccaggcuucugggcguaucacuguguccaccaagagaucacagcaaacaguaauuccaaacaucggaagcaggccccggguucgcgauauaaguucuagaauuuccaucuacuggaccauugugaaaccuggugacauccugcuaaucaauagcacgggcaaccucauugccccaaggggguacuuuaagauacggucgggaaagucuuccaucaugcgcucagacgcgccgauuggcaaauguaauagugagugcaucacucccaacgguagcauaccuaaugauaagccauuccagaacgucaaucgaauuacauauggggcaugucccagauacgugaaacagaacacccugaaacuugccacuggaaugaggaaugugccugaaacacagacccggggcaucuuuggcgcuaucgccggguucauugagaacggaugggaagguauggucgacggcugguauggguuucgucaccaaaauuccgagggaacgggccaggcagcugaucugaagucuacccaggccgcgaucaaccaaauuaaugguaaguugaaccgccucauagggaaaacaaacgagaaguuccaucagaucgaaaaggaguucagcgaaguugagggcaggauucaggaccuggaaaaauacguggaggauacuaagaucgacuuauggucauauaaugccgagcugcucguagcacuugaaaaccagcacaccaucgaucugacagacagugagaugaauaaauuguuugaaagaacuaagaaacaacuacgggagaacgcugaagauaugggaaauggcugcuucaagauuuaccauaagugugacaacgccugcauaggguccauccgaaaugagaccuaugaucacgacguguaccgcgacgaggcucugaacaauagauuucagauuaaaggagucgaacucaagagcgguuacaaagauuggauccuguggauuucuuucgccaucucaugcuuucuucuguguguggcauugcucggcuucauaaugugggccugccagaaggggaacaucagguguaauauuugcaucuga

SEQ ID NO: 130839 - RNA, 1701 nt, Artificial Sequence; identical to SEQ ID NO: 130420
  derived and/or modified CDS sequence (opt3) from hemagglutinin__InfluenzaA__ACR15557

SEQ ID NO: 130840 - RNA, 1701 nt, Artificial Sequence; identical to SEQ ID NO: 128678
  derived and/or modified CDS sequence (opt3) from hemagglutinin__InfluenzaA__ACR15568

SEQ ID NO: 130841 - RNA, 1701 nt, Artificial Sequence
  derived and/or modified CDS sequence (opt3) from hemagglutinin__InfluenzaA__ACR15579
augaagaccaucauugcccugagcuacauacucugccuuguguucgcucagaaacugcccggcaacgacaauuccacagcaacuuuguguuuagggcaccaugccgucccuaacggaacgaucguuaagaccauuacaaaugaucaaaucgaggugacuaacgcgaccgaacugguacagucuucaaguacagguggcauuugcgacagcccacaccagauccuagauggggagaauuguacccucauagacgcucugcuuggagauccgcagugcgacggcuuucaaaacaaaaagugggaucuguucguggaaagauccaaagccuauucuaauuguuaccccuaugacgucccugauuacgcaucguugaggucacucguggccagcagugguacucuggaguuuaacaaugaauccuucaacuggacagggguuacccagaauggaacgucuagcgcuugcaagcggcgcuccaacaauucauuuuucagucgacugaacuggcucacucauuuaaaguuuaaauauccagcacugaaugugaccaugcccaacaacgagaaguucgacaaacuuuacaucuggggcguccaccauccuggcacagauaaugaccagaucuuuuuguaugcccaggcuagcgggcguauuacugugucuaccaagagaucccaacagacaguaauuccaaacaucggaucaaggccccggguucgcaauauaccuagcagaauuaguaucuacuggaccauugugaacccaggugauauccugcuaaucaauucuacgggcaaccucauugccccgaggggguacuucaaaauacgguccggaaagagcucgaucaugcgcucugacgcgcccauuggcaaguguaauuccgagugcaucacuccuaacgguucaauaccaaaugacaaacccuuucagaacgucaaucgaauuacauauggggcauguccuagauacgugaagcagaacacccugaaacuugccacuggaaugaggaaugugccagaaaagcaaacacggggcaucuucggcgcuaucgccggguuuauugagaacggaugggaagguauggucgauggcugguauggguuccgucaccagaauagugagggaaucggccaggcagcugaccugaaaagcacccaagccgcgauuaaccagauaaacgguaaguugaaucgccucaucgggaaaacgaacgagaaguuccaccagauugaaaaggaguuuuccgaaguugagggcagaauccaggaucuggaaaaauacguggaggacaccaagaucgauuuauggucuuauaaugccgagcugcucguagcacuugaaaaccaacauacaauugaccugacugauagcgagaugaauaaauuguucgaaaggaccaagaaacagcuacgggagaacgcugaagacaugggaaauggcugcuuuaagauauaccacaagugugauaacgccugcaucgggucaauucgaaauggaacauaugaccaugauguguaccgcgacgaggcucugaacaauagauuccagaucaaaggugucgagcucaagaguggcuacaaagacuggauucuguggaucuccuuugccauaagcugcuuccuucuguguguggcauugcucggguuuaucaugugggccugccagaagggaaacauuagguguaauaucugcauuuga

SEQ ID NO: 130842 - RNA, 1701 nt, Artificial Sequence
  derived and/or modified CDS sequence (opt3) from hemagglutinin__InfluenzaA__ACR15590
augaagaccaucauugcccugagcuacauacucugccuuguguucacacagaaacugcccggcaacgacaauuccacugcuacguuguguuuagggcaccaugcagucccuaacggaaccaucguuaagacaauuacuaaugaucaaaucgaggugaccaacgccacagaacugguacagucuucaaguaccgguggcauuugcgacagcccacaccagauccuagauggggagaauuguacucucauagacgcgcugcuuggagauccgcagugcgacggcuuucaaaacaaaaagugggaucuguucguggaaagauccaaggcuuauucuaauuguuaccccuaugacgucccugauuacgccucguugaggucacucguggcaagcagugguacacuggaguuuaacaaugaauccuucaacuggaccgggguuacgcagaauggaacuucuagcgccugcaagcggcgcuccaacaauucauuuuucagucgacugaacuggcucacccauuuaaaguuuaaauauccagcucugaaugugacaaugcccaacaacgagaaguucgacaaacuuuacaucuggggcguccaccauccuggcacugauaaugaccagaucuuuuuguaugcacaggccagcgggcguauuaccgugucuacaaagagaucccaacagaccguaauuccaaacaucggaucaaggccccggguucgcaauauaccuagcagaauuaguaucuacuggacgauugugaaaccaggugauauccugcuaaucaacucuacuggcaaucucauugcuccgaggggguacuucaagauacgguccggaaagagcucgaucaugcgcucugacgcccccauuggcaaauguaacuccgagugcaucacaccuaaugguucaauaccaaacgacaagcccuuucagaaugucaaccgaauuaccuauggggcguguccuagauacgugaaacagaauacucugaaacuugcaacaggaaugaggaacgugccagaaaaacaaacccggggcaucuucggcgccaucgcuggguuuauugagaauggaugggaagguauggucgauggcugguauggguuccgucaccagaacagugagggaaucggccaggccgcagaccugaaaagcacgcaagcugccauuaaucagauaaacgguaaauugaaccgccucaucgggaagaccaaugagaaguuccaccagauugaaaaagaguuuuccgaaguugagggcagaauccaggaucuggaaaaguacguggaggacacaaaaaucgauuuauggucuuauaacgcggagcugcucguagcccuugaaaaucaacauacuauugaccugaccgauagcgagaugaacaaguuguucgaaaggacaaagaagcagcuacgggagaaugcagaagacaugggaaacggcugcuuuaagauauaccacaaaugugauaaugcuugcaucgggucaauucgaaacggaacuuaugaccaugauguguaccgcgacgaggcccugaauaacagauuccagaucaagggugucgagcucaaaaguggcuacaaggacuggauucuguggaucuccuuugcuauaagcugcuuccuucuguguguggccuugcucggguuuaucaugugggcaugccagaaaggaaauauuagguguaacaucugcauuuga

SEQ ID NO: 130843 - RNA, 1701 nt, Artificial Sequence; identical to SEQ ID NO: 128678
  derived and/or modified CDS sequence (opt3) from hemagglutinin__InfluenzaA__ACR15601

SEQ ID NO: 130844 - RNA, 1701 nt, Artificial Sequence
  derived and/or modified CDS sequence (opt3) from hemagglutinin__InfluenzaA__ACR18920
augaaggccauccuggugguccuccuuuacaccuucgcuacagcaaacgccgacacucugugcauuggcuaucacgcgaauaacagcacggauaccguugacacaguguuggagaaaaauguaacugugacccauuccgucaacuuacuggaagauaagcacaaugggaaacuauguaagcucagaggaguggcuccccugcaucuugguaaaugcaacauagccggcuggauccuggggaauccugagugugaaucuuugucaacagcaaguagcugguccuacauuguugagaccucuucgucagacaacggaacuugcuauccaggcgauuuuaucgacuacgaggagcucagggagcagcugagcaguguguccucuuucgaacgguuugagauuuucccgaagacaagcuccuggcccaaucacgauucaaacaagggugucaccgccgcuuguccucaugcaggggccaaaaguuuuuauaagaaucugaucuggcucgugaaaaagggaaacagcuacccaaaauuaucuaaguccuauauaaaugacaagggcaaagaaguacugguucuuuggggcauccaccaccccucaacgagcgcugaucaacagaguuuguaccagaacgccgacgcguacguguucgucgggucuucccgcuauagcaagaaauuuaagccugagauugcaauccgaccaaaagugcgugaucaggagggaagaaugaauuacuauuggacucugguggaacccggugacaagauuaccuucgaggccacaggcaaccuagucguuccuagguacgcuuuugccauggaacggaacgcagggucgggaaucauaauuucugauacuccagugcaugacugcaauaccacaugucaaaccccgaaaggcgcuaucaacacgucccuccccuuccagaauauucacccuaucacuaucgguaagugcccaaaguauguaaaaucaacaaagcugcgccuugccaccgggcugagaaacgugcccaguauucagagcaggggauuguuuggcgcgauagccggcuucaucgaagggggauggacugguauggucgacggcugguacggguaucaucaccagaaugaacaaggauccggcuacgcagcugaucucaaaucuacacagaacgccauugacgagaucaccaauaaggugaacagcguuauagagaaaaugaauauucaguuuacggcuguggguaaggaguucaaccaccuggaaaagcggaucgaaaauuuaaacaaaaaggucgaugacggguuccuggauaucuggaccuacaaugccgagcuccuugugcuguuggaaaacgagcgcacacuagacuaucaugauucaaauguaaagaaccuguacgagaagguucgaagucagcucaaaaacaaugcaaaggaaauuggcaacggauguuuugaguucuaucacaagugcgacaauacuuguauggaauccgugaaaaacggcaccuacgauuauccuaaguacagcgaggaagccaaacugaauagagaggagaucgacggggucaaacuugaaucuacaaggauuuaucaaauacuggcuaucuacucaacuguggcgaguagcuugguccucgugguuucccugggagcaauuucuuuuuggaugugcucgaacgguagcuuacagugccggaucuguaucuga

SEQ ID NO: 130845 - RNA, 1701 nt, Artificial Sequence; identical to SEQ ID NO: 130717
  derived and/or modified CDS sequence (opt3) from hemagglutinin__InfluenzaA__ACR18975

SEQ ID NO: 130846 - RNA, 1701 nt, Artificial Sequence; identical to SEQ ID NO: 130704
  derived and/or modified CDS sequence (opt3) from hemagglutinin__InfluenzaA__ACR18976

SEQ ID NO: 130847 - RNA, 1701 nt, Artificial Sequence; identical to SEQ ID NO: 130704
  derived and/or modified CDS sequence (opt3) from hemagglutinin__InfluenzaA__ACR18977

SEQ ID NO: 130848 - RNA, 1701 nt, Artificial Sequence; identical to SEQ ID NO: 130717
  derived and/or modified CDS sequence (opt3) from hemagglutinin__InfluenzaA__ACR18978

SEQ ID NO: 130849 - RNA, 1701 nt, Artificial Sequence; identical to SEQ ID NO: 130704
  derived and/or modified CDS sequence (opt3) from hemagglutinin__InfluenzaA__ACR18979

SEQ ID NO: 130850 - RNA, 1701 nt, Artificial Sequence; identical to SEQ ID NO: 130770
  derived and/or modified CDS sequence (opt3) from hemagglutinin__InfluenzaA__ACR18981

SEQ ID NO: 130851 - RNA, 1701 nt, Artificial Sequence; identical to SEQ ID NO: 130704
  derived and/or modified CDS sequence (opt3) from hemagglutinin__InfluenzaA__ACR18982

SEQ ID NO: 130852 - RNA, 1701 nt, Artificial Sequence; identical to SEQ ID NO: 130717
  derived and/or modified CDS sequence (opt3) from hemagglutinin__InfluenzaA__ACR18988

SEQ ID NO: 130853 - RNA, 1701 nt, Artificial Sequence
  derived and/or modified CDS sequence (opt3) from hemagglutinin__InfluenzaA__ACR18991
augaaggccauccuggugguccuccuuuacaccuucgcuacagcaaacgccgacacucugugcauuggcuaucacgcgaauaacagcacggauaccguugacacaguguuggagaaaaauguaacugugacccauuccgucaacuuacuggaagauaagcacaauagaaaacuauguaagcucaggggaguggcuccccugcaucuuggaaaaugcaacauagccgguuggauccugggcaauccugagugugaaucuuugucaacagcaaguagcugguccuacauuguugagaccucuucgucagacaacgggacuugcuauccaggagauuuuaucgacuacgaagaacuccgggagcagcugagcaguguguccucuuucgaacgcuuugagauuuucccgaagacaagcuccuggcccaaucacgauucaaacaagggcgucaccgccgcuuguccucaugccggugcaaaaaguuuuuauaagaaucugaucuggcucgugaaaaaggggaacagcuacccaaaauuaucuaaguccuauauaaaugacaagggaaaagaaguacugguucuuuggggcauccaccaccccucaacgagcgcugaucaacagaguuuguaccagaacgccgacgcguacguguucgucgggucuucccgauauagcaagaaauuuaagccugagauugcaauccguccaaaagugagagaucaggagggcaggaugaauuacuauuggacucugguggaacccggagacaagauuaccuucgaggccacagguaaccuagucguuccucgguacgcuuuugccauggaacgcaacgcaggcucggggaucauaauuucugauacuccagugcaugacugcaauaccacaugucaaaccccgaaaggagcuaucaacacgucccuccccuuccagaauauucacccuaucacuaucggcaagugcccaaaguauguaaaaucaacaaagcugagacuugccaccggucugaggaacgugcccaguauucagagccggggguuguuuggagcgauagccggcuucaucgagggcggguggacuggaauggucgacgguugguacggcuaucaucaccagaaugaacaaggguccggauacgcagcugaucucaaaucuacacagaacgccauugacgagaucaccaauaaggugaacagcguuauagagaaaaugaauacgcaguuuaccgcugugggcaaggaguucaaccaccuggagaagcgcauugaaaauuuaaacaaaaaggucgaugacgguuuccuggauaucuggacauacaaugccgagcuccuugugcuguuggaaaacgagcgaacucuagacuaucaugauucaaauguaaagaaccuguacgagaagguuagaagucagcucaaaaacaaugcaaaggaaaucgggaacggcuguuuugaguucuaucacaagugcgacaauaccuguauggaauccgugaaaaacggaacauacgauuauccuaaguacagcgaggaagccaaacugaauagggaggagauugacggcgucaaacuugaaucuacucggaucuaucaaauucuggcuauauacucaaccguggcgaguagcuugguccucgugguuucccugggggcaaucucuuuuuggaugugcucgaacgggagcuuacagugccguauuuguaucuga

SEQ ID NO: 130854 - RNA, 1701 nt, Artificial Sequence; identical to SEQ ID NO: 130704
  derived and/or modified CDS sequence (opt3) from hemagglutinin__InfluenzaA__ACR18993

SEQ ID NO: 130855 - RNA, 1701 nt, Artificial Sequence; identical to SEQ ID NO: 130743
  derived and/or modified CDS sequence (opt3) from hemagglutinin__InfluenzaA__ACR18995

SEQ ID NO: 130856 - RNA, 1701 nt, Artificial Sequence; identical to SEQ ID NO: 130765
  derived and/or modified CDS sequence (opt3) from hemagglutinin__InfluenzaA__ACR23302

SEQ ID NO: 130857 - RNA, 1701 nt, Artificial Sequence; identical to SEQ ID NO: 130717
  derived and/or modified CDS sequence (opt3) from hemagglutinin__InfluenzaA__ACR33743

SEQ ID NO: 130858 - RNA, 1701 nt, Artificial Sequence; identical to SEQ ID NO: 130704
  derived and/or modified CDS sequence (opt3) from hemagglutinin__InfluenzaA__ACR38821

SEQ ID NO: 130859 - RNA, 1701 nt, Artificial Sequence; identical to SEQ ID NO: 130704
  derived and/or modified CDS sequence (opt3) from hemagglutinin__InfluenzaA__ACR38822

SEQ ID NO: 130860 - RNA, 1701 nt, Artificial Sequence; identical to SEQ ID NO: 130704
  derived and/or modified CDS sequence (opt3) from hemagglutinin__InfluenzaA__ACR38823

SEQ ID NO: 130861 - RNA, 1701 nt, Artificial Sequence; identical to SEQ ID NO: 130770
  derived and/or modified CDS sequence (opt3) from hemagglutinin__InfluenzaA__ACR38824

SEQ ID NO: 130862 - RNA, 1701 nt, Artificial Sequence
  derived and/or modified CDS sequence (opt3) from hemagglutinin__InfluenzaA__ACR38825
augaaggccauccuggugguccuccuuuacaccuucgcuacagcaaacgccgacacucugugcauuggcuaucacgcgaauaacagcacggauaccguugacacaguguuggagaagaauguaacugugacccauuccgucaacuuacuggaagauaagcacaaugggaaacuauguaagcucagaggaguggcuccccugcaucuugguaaaugcaacauagccggcuggauccuggggaauccugagugugaaucuuugucaacagcaaguagcugguccuacauuguugagaccucuucgucagacaacggaacuugcuauccaggcgauuuuaucgacuacgaagaacucagggagcagcugagcaguguguccucuuucgaacgguuugagauuuucccgaagacaagcuccuggcccaaucacgauucaaacaagggugucaccgccgcuuguccucaugcaggggccaaaaguuuuuauaagaaucugaucuggcucgugaaaaagggaaacagcuacccaaaauuaucuaaguccuauauaaaugacaagggcaaagaaguacugguucuuuggggcauccaccaccccucaacgagcgcugaucaacagaguuuguaccagaacgccgacgcguacguguucgucgggacuucucgcuauuccaagaaauuuaagccugagauugcaauccgaccaaaagugcguggacaggaggguagaaugaauuacuauuggacccugguggaacccggcgauaagauuacauucgaggccacugggaaccuagucguuccuagguacgcuuuugccauggaacggaacgcaggaagcggcaucauaauuucggacaccccagugcaugauugcaauacaaccugucaaacgccgaaaggugcuaucaacacuucucuccccuuccagaauauucacccuaucacaaucgggaagugcccaaaguauguaaaauccaccaagcugcgccuugccacuggacugagaaacgugcccucaauucagaguaggggcuuguuuggcgcgauagccggguucaucgagggagguuggacaggcauggucgacgggugguacggauaucaucaccagaaugaacaaggcagcgguuacgcagcugaccucaaauccacccagaacgccauugaugagaucacgaauaaggugaacucuguuauagagaaaaugaauacccaguuuacagcuguggggaaggaguucaaccaccuggagaagcggauugaaaauuuaaacaaaaagaucgacgauggcuuccuggacaucuggacuuacaaugccgagcuccuuguccuguuggaaaacgagcgcacccuagauuaucaugacagcaaugugaaaaaccuguacgagaagguacgaucacagcucaaaaacaaugcaaaggaaauuggaaacggcuguuuugaguucuaucacaagugcgauaauacauguauggaaaguguuaaaaacgggacuuacgacuauccuaaguacuccgaggaagccaaacugaauagagaggagaucgauggagugaaacuugaaagcaccaggauuuaucaaauacuggcuaucuacucuacagucgcgucaaguuuggugcucgucgugagccugggugcaauuuccuuuuggaugugcucuaacggcucguuacagugccggaucuguaucuga

SEQ ID NO: 130863 - RNA, 1701 nt, Artificial Sequence; identical to SEQ ID NO: 130717
  derived and/or modified CDS sequence (opt3) from hemagglutinin__InfluenzaA__ACR38826

SEQ ID NO: 130864 - RNA, 1701 nt, Artificial Sequence; identical to SEQ ID NO: 130704
  derived and/or modified CDS sequence (opt3) from hemagglutinin__InfluenzaA__ACR38827

SEQ ID NO: 130865 - RNA, 1701 nt, Artificial Sequence; identical to SEQ ID NO: 130770
  derived and/or modified CDS sequence (opt3) from hemagglutinin__InfluenzaA__ACR38828

SEQ ID NO: 130866 - RNA, 1701 nt, Artificial Sequence; identical to SEQ ID NO: 130704
  derived and/or modified CDS sequence (opt3) from hemagglutinin__InfluenzaA__ACR38829

SEQ ID NO: 130867 - RNA, 1701 nt, Artificial Sequence; identical to SEQ ID NO: 130743
  derived and/or modified CDS sequence (opt3) from hemagglutinin__InfluenzaA__ACR38830

SEQ ID NO: 130868 - RNA, 1701 nt, Artificial Sequence; identical to SEQ ID NO: 130717
  derived and/or modified CDS sequence (opt3) from hemagglutinin__InfluenzaA__ACR39354

SEQ ID NO: 130869 - RNA, 1701 nt, Artificial Sequence; identical to SEQ ID NO: 130717
  derived and/or modified CDS sequence (opt3) from hemagglutinin__InfluenzaA__ACR39393

SEQ ID NO: 130870 - RNA, 1701 nt, Artificial Sequence; identical to SEQ ID NO: 130717
  derived and/or modified CDS sequence (opt3) from hemagglutinin__InfluenzaA__ACR39403

SEQ ID NO: 130871 - RNA, 1701 nt, Artificial Sequence; identical to SEQ ID NO: 130717
  derived and/or modified CDS sequence (opt3) from hemagglutinin__InfluenzaA__ACR39413

SEQ ID NO: 130872 - RNA, 1701 nt, Artificial Sequence; identical to SEQ ID NO: 130717
  derived and/or modified CDS sequence (opt3) from hemagglutinin__InfluenzaA__ACR39423

SEQ ID NO: 130873 - RNA, 1701 nt, Artificial Sequence; identical to SEQ ID NO: 130717
  derived and/or modified CDS sequence (opt3) from hemagglutinin__InfluenzaA__ACR39433

SEQ ID NO: 130874 - RNA, 1701 nt, Artificial Sequence; identical to SEQ ID NO: 130717
  derived and/or modified CDS sequence (opt3) from hemagglutinin__InfluenzaA__ACR39443

SEQ ID NO: 130875 - RNA, 1701 nt, Artificial Sequence
  derived and/or modified CDS sequence (opt3) from hemagglutinin__InfluenzaA__ACR39453
auggaggccauccuggugguccuccuuuacaccuucgcuacagcaaacgccgacacucugugcauuggcuaucacgcgaauaacagcacggauaccguugacacaguguuggaaaagaauguaacugugacccauuccgucaacuuacuggaggauaaacacaaugggaagcuauguaaacucagaggaguggcuccccugcaucuugguaagugcaacauagccggcuggauccuggggaauccugaaugugagucuuugucaacagcaaguagcugguccuacauuguugaaaccucuucgucagacaacggaacuugcuauccaggcgauuuuaucgacuacgaggagcucagggaacagcugagcaguguguccucuuucgagcgguuugaaauuuucccgaaaacaagcuccuggcccaaucacgauucaaacaagggugucaccgccgcuuguccucaugcaggggccaagaguuuuuauaaaaaucugaucuggcucgugaagaaaggaaacagcuacccaaaguuaucuaaauccuauauaaaugacaagggcaaggagguacugguucuuuggggcauccaccaccccucaacgagcgcugaucaacagaguuuguaccagaacgccgacgcguacguguucgucgggacuucucgcuauuccaaaaaguuuaaaccugagauugcaauccgaccaaaggugcgugaucaggaaggaagaaugaauuacuauuggacccugguggagcccggugacaaaauuacauucgaagccacuggcaaccuagucguuccuagguacgcuuuugccauggagcggaacgcagggagcggaaucauaauuucggauaccccagugcaugacugcaauacaaccugucaaacgccgaagggcgcuaucaacacuucucuccccuuccagaauauucacccuaucacaaucgguaaaugcccaaaguauguaaaguccaccaaacugcgccuugccacugggcugagaaacgugcccucaauucagaguaggggauuguuuggcgcgauagccggcuucaucgaagggggauggacagguauggucgacggcugguacggguaucaucaccagaaugagcaaggaagcggcuacgcagcugaucucaaguccacccagaacgccauugacgagaucacgaauaaagugaacucuguuauagaaaagaugaauacccaguuuacagcuguggguaaagaguucaaccaccuggaaaagcggauugagaauuuaaacaagaaagucgaugacggguuccuggauaucuggacuuacaaugccgaacuccuugugcuguuggagaacgagcgcacccuagacuaucaugauagcaauguaaagaaccuguacgaaaaaguucgaucacagcucaagaacaaugcaaaagagaucggcaacggauguuuugaguucuaucacaagugcgacaauacauguauggaaagugugaagaacggcacuuacgauuauccuaaauacuccgaagaggccaagcugaauagagaggaaauugacggggucaaacuugagagcaccaggaucuaucaaauucuggcuauauacucuacaguggcgucaaguuugguccucgugguuagccugggagcaaucuccuuuuggaugugcucuaacgguucguuacagugccggauuuguaucuga

SEQ ID NO: 130876 - RNA, 1701 nt, Artificial Sequence; identical to SEQ ID NO: 130717
  derived and/or modified CDS sequence (opt3) from hemagglutinin__InfluenzaA__ACR39463

SEQ ID NO: 130877 - RNA, 1701 nt, Artificial Sequence; identical to SEQ ID NO: 130717
  derived and/or modified CDS sequence (opt3) from hemagglutinin__InfluenzaA__ACR39473

SEQ ID NO: 130878 - RNA, 1701 nt, Artificial Sequence; identical to SEQ ID NO: 130717
  derived and/or modified CDS sequence (opt3) from hemagglutinin__InfluenzaA__ACR39483

SEQ ID NO: 130879 - RNA, 1701 nt, Artificial Sequence; identical to SEQ ID NO: 130717
  derived and/or modified CDS sequence (opt3) from hemagglutinin__InfluenzaA__ACR39493

SEQ ID NO: 130880 - RNA, 1701 nt, Artificial Sequence; identical to SEQ ID NO: 130717
  derived and/or modified CDS sequence (opt3) from hemagglutinin__InfluenzaA__ACR40288

SEQ ID NO: 130881 - RNA, 1701 nt, Artificial Sequence; identical to SEQ ID NO: 130717
  derived and/or modified CDS sequence (opt3) from hemagglutinin__InfluenzaA__ACR40298

SEQ ID NO: 130882 - RNA, 1701 nt, Artificial Sequence
  derived and/or modified CDS sequence (opt3) from hemagglutinin__InfluenzaA__ACR40308
augaaggccauccuggugguccuccuuuacaccuucgcuacagcaaacgccgacacucugugcauuggcuaucacgcgaauaacagcacggauaccguugacacaguguuggagaaaaauguaacugugacccauuccgucaacuuacuggaagauaagcacaaugggaaacuauguaagcucagaggaguggcuccccugcaucuugguaaaugcaacauagccggcuggauccuggggaauccugagugugaaucuuugucaacagcaaguagcugguccuacauuguugagaccucuucgucagacaacggaacuugcuauccaggcgauuuuaucgacuacgaggagcucagggagcagcugagcaguguguccucuuucgaacgguuugagauuuucccgaagacaagcuccuggcccaaucacgauucaaacaagggugucaccgccgcuuguccucaugcaggggccaaaaguuuuuauaagaaucugaucuggcucgugaaaaagggaaacagcuacccaaaauuaucuaaguccuauauaaaugacaagggcaaagaaguacugguucuuuggggcauccaccaccccucaacgagcgcugaucaacagaguuuguaccagaacgccgacgcguacguguucgucgggucuucccgcuauagcaagaaauuuaagccugagauugcaauccgaccaaaagugcgugaucaggagggaagaaugaauuacuauuggacucugguggaacccggugacaagauuaccuucgaggccacaggcaaccuagucguuccuagguacgcuuuugccauggaacggaacgcagggucgggaaucauaauuucugauacuccagugcaugacugcaauaccacaugucaaaccccgaaaggcgcuaucaacacgucccuccccuuccagaauauuuauccuaucacuaucgguaagugcccaaaguacguaaaaucaacaaagcugcgccuugccaccgggcugagaaacgugcccaguauucagagcaggggauuguuuggcgcgauagccggcuucaucgaagggggauggacugguauggucgacggcugguauggguaccaccaucagaaugaacaaggauccggcuacgcagcugaucucaaaucuacacagaacgccauugacgagaucaccaauaaggugaacagcguuauagagaaaaugaauacgcaguuuaccgcuguggguaaggaguucaaccaccuggaaaagcggauugaaaauuuaaacaaaaaggucgaugacggguuccuggauaucuggacauauaaugccgagcuccuugugcuguuggaaaacgagcgcacucuagacuaccacgauucaaauguaaagaaccuguaugagaagguucgaagucagcucaaaaacaaugcaaaggaaaucggcaacggauguuuugaguucuaccauaagugcgacaauaccuguauggaauccgugaaaaacggcacauaugauuacccuaaguauagcgaggaagccaaacugaauagagaggagauugacggggucaaacuugaaucuacuaggaucuaccaaauucuggcuauauacucaaccguggcgaguagcuugguccucgugguuucccugggagcaaucucuuuuuggaugugcucgaacgguagcuuacagugccggauuuguaucuga

SEQ ID NO: 130883 - RNA, 1701 nt, Artificial Sequence; identical to SEQ ID NO: 130717
  derived and/or modified CDS sequence (opt3) from hemagglutinin__InfluenzaA__ACR40318

SEQ ID NO: 130884 - RNA, 1701 nt, Artificial Sequence; identical to SEQ ID NO: 130717
  derived and/or modified CDS sequence (opt3) from hemagglutinin__InfluenzaA__ACR40328

SEQ ID NO: 130885 - RNA, 1701 nt, Artificial Sequence; identical to SEQ ID NO: 130717
  derived and/or modified CDS sequence (opt3) from hemagglutinin__InfluenzaA__ACR40338

SEQ ID NO: 130886 - RNA, 1701 nt, Artificial Sequence; identical to SEQ ID NO: 130717
  derived and/or modified CDS sequence (opt3) from hemagglutinin__InfluenzaA__ACR40348

SEQ ID NO: 130887 - RNA, 1701 nt, Artificial Sequence; identical to SEQ ID NO: 130717
  derived and/or modified CDS sequence (opt3) from hemagglutinin__InfluenzaA__ACR40358

SEQ ID NO: 130888 - RNA, 1701 nt, Artificial Sequence; identical to SEQ ID NO: 130717
  derived and/or modified CDS sequence (opt3) from hemagglutinin__InfluenzaA__ACR40378

SEQ ID NO: 130889 - RNA, 1701 nt, Artificial Sequence; identical to SEQ ID NO: 130717
  derived and/or modified CDS sequence (opt3) from hemagglutinin__InfluenzaA__ACR40388

SEQ ID NO: 130890 - RNA, 1701 nt, Artificial Sequence; identical to SEQ ID NO: 130704
  derived and/or modified CDS sequence (opt3) from hemagglutinin__InfluenzaA__ACR46986

SEQ ID NO: 130891 - RNA, 1701 nt, Artificial Sequence; identical to SEQ ID NO: 130704
  derived and/or modified CDS sequence (opt3) from hemagglutinin__InfluenzaA__ACR46988

SEQ ID NO: 130892 - RNA, 1701 nt, Artificial Sequence; identical to SEQ ID NO: 130704
  derived and/or modified CDS sequence (opt3) from hemagglutinin__InfluenzaA__ACR46989

SEQ ID NO: 130893 - RNA, 1701 nt, Artificial Sequence; identical to SEQ ID NO: 130704
  derived and/or modified CDS sequence (opt3) from hemagglutinin__InfluenzaA__ACR46990

SEQ ID NO: 130894 - RNA, 1701 nt, Artificial Sequence; identical to SEQ ID NO: 130704
  derived and/or modified CDS sequence (opt3) from hemagglutinin__InfluenzaA__ACR46992

SEQ ID NO: 130895 - RNA, 1701 nt, Artificial Sequence; identical to SEQ ID NO: 130704
  derived and/or modified CDS sequence (opt3) from hemagglutinin__InfluenzaA__ACR46993

SEQ ID NO: 130896 - RNA, 1701 nt, Artificial Sequence; identical to SEQ ID NO: 130704
  derived and/or modified CDS sequence (opt3) from hemagglutinin__InfluenzaA__ACR46994

SEQ ID NO: 130897 - RNA, 1701 nt, Artificial Sequence
  derived and/or modified CDS sequence (opt3) from hemagglutinin__InfluenzaA__ACR47006
augaaggccauccuggugguccuccuuuacaccuucgcuacagcaaacgccgacacucugugcauuggcuaucacgcgaauaacagcacggauaccguugacacaguguuggagaaaaauguaacugugacccauuccgucaacauauuagaagauaagcacaaugggaaacuguguaagcuaagaggaguggcuccccuccaucuggguaaaugcaacaucgccggcuggauucuugggaauccugagugugaaucucugucaacagcaaguagcugguccuacaucguugagaccucuucgucagacaacggaacuugcuauccaggcgauuuuauugacuacgaagaguugagggagcagcucagcaguguguccucuuucgaacgguuugagaucuucccgaagacaagcuccuggcccaaucacgauucaaacaagggugucaccgccgcuuguccucaugcaggggccaaaaguuuuuauaagaaucugauauggcuggugaaaaagggaaacagcuacccaaaacucucuaaguccuauaucaaugacaagggcaaagaaguauuaguucuguggggcauucaccaccccucaacgagcgcugaucaacagagucuuuaccagaacgccgacgcguacguguucgucgggucuucccgcuauagcaagaaauuuaagccugagaucgcaauucgaccaaaagugcgugaucaggagggaagaaugaauuacuauuggacuuugguggaacccggugacaagaucaccuucgaggccacaggcaaccuggucguuccuagguacgcuuuugccauggaacggaacgcagggucgggaauaauuaucucugauacuccagugcaugacugcaauaccacaugucaaaccccgaaaggcgcuauuaacacgucccuacccuuccagaauauccacccuaucacuauugguaagugcccaaaguauguaaaaucaacaaagcuccgccuggccaccgggcuuagaaacgugcccaguauacagagcaggggacuguuuggcgcgaucgccggcuucauugaagggggauggacugguauggucgacggcugguacggguaucaucaccagaaugaacaaggauccggcuacgcagcugauuugaaaucuacacagaacgccaucgacgagauaaccaauaaggugaacagcguuauugagaaaaugaauacgcaguuuaccgcuguggguaaggaguucaaccaccucgagaagcggaucgaaaaucugaacaaaaaggucgaugacggguucuuagauaucuggacauacaaugccgagcugcucgugcuucuggaaaacgagcgcacuuuggacuaucaugauucaaauguuaaaaaccuauacgagaagguacgaagucagcugaaaaacaaugcaaaggaaauuggcaacggauguuuugaguucuaucacaagugcgacaauaccuguauggaauccgugaaaaacggcacauacgauuauccuaaguacagcgaggaagccaaacucaauagagaggagaucgacggggucaagcuggaaucuacuaggauuuaucaaauacuugcuaucuacucaaccguggcgaguagccuggucuuggugguuucccucggagcaauuucuuuuuggaugugcucgaacgguagccugcagugccggaucuguaucuga

SEQ ID NO: 130898 - RNA, 1701 nt, Artificial Sequence; identical to SEQ ID NO: 130717
  derived and/or modified CDS sequence (opt3) from hemagglutinin__InfluenzaA__ACR49281

SEQ ID NO: 130899 - RNA, 1701 nt, Artificial Sequence
  derived and/or modified CDS sequence (opt3) from hemagglutinin__InfluenzaA__ACR49282
augaaggccauccuggugguccuccuuuacaccuucgcuacagcaaacgccgacacucugugcauuggcuaucacgcgaauaacagcacggauaccguugacacaguguuggagaaaaauguaacugugacccauuccgucgauuuacuggaagacaagcacaacgggaaacuauguaagcucagaggaguggcuccccugcaucuugguaaaugcaauauagccggcuggauccuggggaacccugagugugaaucuuugucaacagcaaguagcugguccuacauuguugagaccucuucgucagauaauggaacuugcuauccaggcgacuuuaucgauuacgaggagcucagggagcagcugagcaguguguccucuuucgaacgguuugagauuuucccgaagacaagcuccuggcccaaccacgacucaaauaagggugucaccgccgcuuguccucaugcaggggccaaaaguuuuuauaagaaccugaucuggcucgugaaaaagggaaauagcuacccaaaauuaucuaaguccuauauaaacgauaagggcaaagaaguacugguucuuuggggcauccaccaccccucaacgagcgcugaccaacagaguuuguaccagaaugccgaugcguacguguucgucgggucuucccgcuauagcaagaaauuuaagccugagauugcaauccgaccaaaagugcgugaccaggagggaagaaugaacuacuauuggacucugguggaacccggugauaagauuaccuucgaggccacaggcaaucuagucguuccuagguacgcuuuugccauggaacggaacgcagggucgggaaucauaauuucugacacuccagugcaugacugcaacaccacaugucaaaccccgaaaggcgcuaucaauacgucccuccccuuccagaacauucacccuaucacuaucgguaagugcccaaaguauguaaaaucaacaaagcugcgccuugccaccgggcugagaaaugugcccaguauucagagcaggggauuguuuggcgcgauagccggcuucaucgaagggggauggacugguauggucgauggcugguacggguaucaucaccagaacgaacaaggauccggcuacgcagcugaccucaaaucuacacagaaugccauugaugagaucaccaacaaggugaauagcguuauagagaaaaugaacacgcaguuuaccgcuguggguaaggaguucaaucaccuggaaaagcggauugaaaacuuaaauaaaaaggucgacgauggguuccuggacaucuggacauacaacgccgagcuccuugugcuguuggaaaaugagcgcacucuagauuaucaugacucaaacguaaagaaucuguacgagaagguucgaagucagcucaaaaacaacgcaaaggaaaucggcaauggauguuuugaguucuaucacaagugcgauaacaccuguauggaauccgugaaaaauggcacauacgacuauccuaaguacagcgaggaagccaaacugaacagagaggagauugauggggucaaacuugaaucuacuaggaucuaucaaauucuggcuauauacucaaccguggcgaguagcuugguccucgugguuucccugggagcaaucucuuuuuggaugugcucgaaugguagcuuacagugccggauuuguaucuga

SEQ ID NO: 130900 - RNA, 1701 nt, Artificial Sequence; identical to SEQ ID NO: 130704
  derived and/or modified CDS sequence (opt3) from hemagglutinin__InfluenzaA__ACR49283

SEQ ID NO: 130901 - RNA, 1701 nt, Artificial Sequence; identical to SEQ ID NO: 130704
  derived and/or modified CDS sequence (opt3) from hemagglutinin__InfluenzaA__ACR49288

SEQ ID NO: 130902 - RNA, 1701 nt, Artificial Sequence; identical to SEQ ID NO: 130743
  derived and/or modified CDS sequence (opt3) from hemagglutinin__InfluenzaA__ACR49290

SEQ ID NO: 130903 - RNA, 1701 nt, Artificial Sequence; identical to SEQ ID NO: 130717
  derived and/or modified CDS sequence (opt3) from hemagglutinin__InfluenzaA__ACR49291

SEQ ID NO: 130904 - RNA, 1701 nt, Artificial Sequence; identical to SEQ ID NO: 130743
  derived and/or modified CDS sequence (opt3) from hemagglutinin__InfluenzaA__ACR49293

SEQ ID NO: 130905 - RNA, 1701 nt, Artificial Sequence; identical to SEQ ID NO: 130743
  derived and/or modified CDS sequence (opt3) from hemagglutinin__InfluenzaA__ACR49295

SEQ ID NO: 130906 - RNA, 1701 nt, Artificial Sequence; identical to SEQ ID NO: 130757
  derived and/or modified CDS sequence (opt3) from hemagglutinin__InfluenzaA__ACR50993

SEQ ID NO: 130907 - RNA, 1701 nt, Artificial Sequence; identical to SEQ ID NO: 130717
  derived and/or modified CDS sequence (opt3) from hemagglutinin__InfluenzaA__ACR50995

SEQ ID NO: 130908 - RNA, 1701 nt, Artificial Sequence; identical to SEQ ID NO: 130717
  derived and/or modified CDS sequence (opt3) from hemagglutinin__InfluenzaA__ACR51005

SEQ ID NO: 130909 - RNA, 1701 nt, Artificial Sequence; identical to SEQ ID NO: 130717
  derived and/or modified CDS sequence (opt3) from hemagglutinin__InfluenzaA__ACR51015

SEQ ID NO: 130910 - RNA, 1701 nt, Artificial Sequence; identical to SEQ ID NO: 130717
  derived and/or modified CDS sequence (opt3) from hemagglutinin__InfluenzaA__ACR51025

SEQ ID NO: 130911 - RNA, 1701 nt, Artificial Sequence; identical to SEQ ID NO: 130717
  derived and/or modified CDS sequence (opt3) from hemagglutinin__InfluenzaA__ACR51035

SEQ ID NO: 130912 - RNA, 1701 nt, Artificial Sequence; identical to SEQ ID NO: 130717
  derived and/or modified CDS sequence (opt3) from hemagglutinin__InfluenzaA__ACR51045

SEQ ID NO: 130913 - RNA, 1701 nt, Artificial Sequence; identical to SEQ ID NO: 130717
  derived and/or modified CDS sequence (opt3) from hemagglutinin__InfluenzaA__ACR51055

SEQ ID NO: 130914 - RNA, 1701 nt, Artificial Sequence; identical to SEQ ID NO: 130704
  derived and/or modified CDS sequence (opt3) from hemagglutinin__InfluenzaA__ACR51065

SEQ ID NO: 130915 - RNA, 1701 nt, Artificial Sequence; identical to SEQ ID NO: 130717
  derived and/or modified CDS sequence (opt3) from hemagglutinin__InfluenzaA__ACR52368

SEQ ID NO: 130916 - RNA, 1701 nt, Artificial Sequence; identical to SEQ ID NO: 130717
  derived and/or modified CDS sequence (opt3) from hemagglutinin__InfluenzaA__ACR52378

SEQ ID NO: 130917 - RNA, 1701 nt, Artificial Sequence; identical to SEQ ID NO: 130717
  derived and/or modified CDS sequence (opt3) from hemagglutinin__InfluenzaA__ACR52398

SEQ ID NO: 130918 - RNA, 1701 nt, Artificial Sequence; identical to SEQ ID NO: 130717
  derived and/or modified CDS sequence (opt3) from hemagglutinin__InfluenzaA__ACR52408

SEQ ID NO: 130919 - RNA, 1701 nt, Artificial Sequence; identical to SEQ ID NO: 130717
  derived and/or modified CDS sequence (opt3) from hemagglutinin__InfluenzaA__ACR52418

SEQ ID NO: 130920 - RNA, 1701 nt, Artificial Sequence; identical to SEQ ID NO: 130717
  derived and/or modified CDS sequence (opt3) from hemagglutinin__InfluenzaA__ACR52428

SEQ ID NO: 130921 - RNA, 1701 nt, Artificial Sequence; identical to SEQ ID NO: 130717
  derived and/or modified CDS sequence (opt3) from hemagglutinin__InfluenzaA__ACR52438

SEQ ID NO: 130922 - RNA, 1701 nt, Artificial Sequence; identical to SEQ ID NO: 130717
  derived and/or modified CDS sequence (opt3) from hemagglutinin__InfluenzaA__ACR52448

SEQ ID NO: 130923 - RNA, 1701 nt, Artificial Sequence; identical to SEQ ID NO: 130717
  derived and/or modified CDS sequence (opt3) from hemagglutinin__InfluenzaA__ACR52458

SEQ ID NO: 130924 - RNA, 1701 nt, Artificial Sequence; identical to SEQ ID NO: 130717
  derived and/or modified CDS sequence (opt3) from hemagglutinin__InfluenzaA__ACR52468

SEQ ID NO: 130925 - RNA, 1701 nt, Artificial Sequence; identical to SEQ ID NO: 130717
  derived and/or modified CDS sequence (opt3) from hemagglutinin__InfluenzaA__ACR52478

SEQ ID NO: 130926 - RNA, 1701 nt, Artificial Sequence; identical to SEQ ID NO: 130717
  derived and/or modified CDS sequence (opt3) from hemagglutinin__InfluenzaA__ACR52488

SEQ ID NO: 130927 - RNA, 1701 nt, Artificial Sequence; identical to SEQ ID NO: 130717
  derived and/or modified CDS sequence (opt3) from hemagglutinin__InfluenzaA__ACR54045

SEQ ID NO: 130928 - RNA, 1701 nt, Artificial Sequence
  derived and/or modified CDS sequence (opt3) from hemagglutinin__InfluenzaA__ACR54047
augaaggccauccuggugguccuccuuuacaccuucgcuacagcaaacgccgacacucugugcauuggcuaucacgcgaauaacagcacggauaccguugacacaguguuggagaaaaauguaacugugacccauuccgucaacuuacuggaagauaagcacaaugggaaacuauguaagcucagaggaguggcuccccugcaucuugguaaaugcaacauagccggcuggauccuggggaauccugagugugaaucuuugucaacagcaaguagcugguccuacauuguugagaccucuucgucagacaacggaacuugcuauccaggcgauuuuaucgacuacgaggagcucagggagcagcugagcaguguguccucuuucgaacgguuugagauuuucccgaagacaagcuccuggcccaaucacgauucaaacaagggugucaccgccgcuuguccucaugcaggggccaaaaguuuuuauaagaaucugaucuggcucgugaaaaagggaaacagcuacccaaaauuaucuaaguccuauauaaaugacaagggcaaagaaguacugguucuuuggggcauccaccaccccucaacgagcgcugaucaacagaguuuguaccagaacgccgacgcguacguguucgucgggucuucccgcuauagcaagaaauuuaagccugagauugcaauccgaccaaaagugcgugaucaggagggaagaaugaauuacuauuggacucugguggaacccggugacaagauuaccuucgaggccacaggcaaccuagucguuccuagguacgcuuuugccauggaacggaacgcagggucgggaaucauaauuucugauacuccagugcaugacugcaauaccacaugucaaaccccgaaaggcgcuaucaacacgucccuccccuuccagaauauucacccuaucacuaucgguaagugcccaaaguauguaaaaucaacaaagcugcgccuugccaccgggcugagaaacgugcccaguauucagagcaggggauuguuuggcgcgauagccggcuucaucgaagggggauggacugguauggucgacggcugguacggguaucaucaccagaaugaacaaggauccggcuacgcagcugaucucaaaucuacacagaacgccauugacgagaucaccaauaaggugaacagcguuauagagaaaaugaauacgcaguuuaccgcuguggguaaggaguucaaccaccuggaaaagcggauugaaaauuuaaacaaaaaggucgaugacggguuccuggauaucuggacauacaaugccgagcuccuugugcuguuggaaaacgagcgcacucuagacuaucaugauucaaauguaaagaaccuguacgagaagguucgaagucagcucaaaaacaaugcaaaggaaaucggcaacggauguuuugaguucuaucacaagugcgacaauaccuguauggaauccgugaaaaacggcacauacgauuauccuaaguacagcgaggaagccaaacugaauagagaggagauugacgggaucaaacuugaaucuacuaggauuuaucaaauacuggcuaucuacucaaccgucgcgaguagcuuggugcucgucgugucccugggagcaauuucuuuuuggaugugcucgaacgguagcuuacagugccggaucuguaucuga

SEQ ID NO: 130929 - RNA, 1701 nt, Artificial Sequence
  derived and/or modified CDS sequence (opt3) from hemagglutinin__InfluenzaA__ACR54964
augaaggccauccuggugguccuccuuuacaccuucgcuacagcaaacgccgacacucugugcauuggcuaucacgcgaauaacagcacggauaccguugacacaguguuggagaaaaauguaacugugacccauuccgucaacuuacuggaagauaagcacaaugggaaacuauguaagcucagaggaguggcuccccugcaucuugguaaaugcaacauagccggcuggauccuggggaauccugagugugaaucuuugucaacagcaaguagcugguccuacauuguugagaccucuucgucagacaacggaacuugcuauccaggcgauuuuaucgacuacgaggagcucagggagcagcugagcaguguguccucuuucgaacgguuugagauuuucccgaagacaagcuccuggcccaaucacgauucaaacaagggugucaccgccgcuuguccucaugcaggggccaaaaguuuuuauaagaaucugaucuggcucgugaaaaagggaaacagcuacccaaaauuaucuaaguccuauauaaaugacaagggcaaagaaguacugguucuuuggggcauccaccaccccucaacgagcgcugaucaacagaguuuguaccagaacgccgacgcguacguguucgucgggacuucucgcuauuccaagaaauuuaagccugagauugcaauccgaccaaaagugcgugaucaggagggaagaaugaauuacuauuggacccugguggaacccggugacaagauuacauucgaggccacuggcaaccuagucguuccuagguacgcuuuugccauggaacggaacgcagggagcggaaucauaauuucggauaccccagugcaugacugcaauacaaccugucaaacgccgaaaggcgcuaucaacacuucucuccccuuccagaauauucacccuaucacaaucgguaagugcccaaaguauguaaaauccaccaagcugcgccuugccacugggcugagaaacgugcccucaauucagaguaggggauuguuuggcgcgauagccggcuucaucgaagggggauggacagguauggucgacggcugguacggguaucaucaccagaaugaacaaggaagcggcuacgcagcugaucucaaauccacccagaacgccauugacgagaucacgaauaaggugaacucuguuauagagaaaaugaauacccaguuuauugcuguggguaaggaguucaaccaccuggaaaagcggaucgaaaauuuaaacaaaaaggucgaugacggguuccuggauaucuggacauacaaugccgagcuccuugugcuguuggaaaacgagcgcacucuagacuaucaugauagcaauguaaagaaccuguacgagaagguucgaucacagcucaaaaacaaugcaaaggaaauuggcaacggauguuuugaguucuaucacaagugcgacaauaccuguauggaaagugugaaaaacggcacauacgauuauccuaaguacuccgaggaagccaaacugaauagagaggagaucgacggggucaaacuugaaagcacuaggauuuaucaaauacuggcuaucuacucuaccguggcgucaaguuugguccucgugguuagccugggagcaauuuccuuuuggaugugcucuaacgguucguuacagugccggaucuguaucuga

SEQ ID NO: 130930 - RNA, 1701 nt, Artificial Sequence; identical to SEQ ID NO: 130808
  derived and/or modified CDS sequence (opt3) from hemagglutinin__InfluenzaA__ACR54974

SEQ ID NO: 130931 - RNA, 1701 nt, Artificial Sequence; identical to SEQ ID NO: 130717
  derived and/or modified CDS sequence (opt3) from hemagglutinin__InfluenzaA__ACR54984

SEQ ID NO: 130932 - RNA, 1701 nt, Artificial Sequence; identical to SEQ ID NO: 130704
  derived and/or modified CDS sequence (opt3) from hemagglutinin__InfluenzaA__ACR54994

SEQ ID NO: 130933 - RNA, 1701 nt, Artificial Sequence; identical to SEQ ID NO: 130704
  derived and/or modified CDS sequence (opt3) from hemagglutinin__InfluenzaA__ACR55004

SEQ ID NO: 130934 - RNA, 1701 nt, Artificial Sequence; identical to SEQ ID NO: 130897
  derived and/or modified CDS sequence (opt3) from hemagglutinin__InfluenzaA__ACR56380

SEQ ID NO: 130935 - RNA, 1701 nt, Artificial Sequence; identical to SEQ ID NO: 130770
  derived and/or modified CDS sequence (opt3) from hemagglutinin__InfluenzaA__ACR56390

SEQ ID NO: 130936 - RNA, 1701 nt, Artificial Sequence; identical to SEQ ID NO: 130717
  derived and/or modified CDS sequence (opt3) from hemagglutinin__InfluenzaA__ACR56400

SEQ ID NO: 130937 - RNA, 1701 nt, Artificial Sequence; identical to SEQ ID NO: 130717
  derived and/or modified CDS sequence (opt3) from hemagglutinin__InfluenzaA__ACR56410

SEQ ID NO: 130938 - RNA, 1701 nt, Artificial Sequence; identical to SEQ ID NO: 130717
  derived and/or modified CDS sequence (opt3) from hemagglutinin__InfluenzaA__ACR56420

SEQ ID NO: 130939 - RNA, 1701 nt, Artificial Sequence; identical to SEQ ID NO: 130717
  derived and/or modified CDS sequence (opt3) from hemagglutinin__InfluenzaA__ACR56430

SEQ ID NO: 130940 - RNA, 1701 nt, Artificial Sequence; identical to SEQ ID NO: 130717
  derived and/or modified CDS sequence (opt3) from hemagglutinin__InfluenzaA__ACR56440

SEQ ID NO: 130941 - RNA, 1698 nt, Artificial Sequence
  derived and/or modified CDS sequence (opt3) from hemagglutinin__InfluenzaA__ACR58541
augaaggugaaacugcucguccuucugugcaccuucacagccacuuacgcugacacgaucuguauuggcuaucacgcaaacaauagcaccgauacaguugacacuguguuggagaagaacguaaccgugacacauuccgucaauuuacuggaaaacucucacaaugggaaacuaugccuccugaagggaauagcgccccuucagcuggguaacuguucaguggccggcuggaucuuggggaauccugagugcgaacuccugauuaguaaagagagcugguccuacaucguugaaaagccaaacccggagaauggaaccuguuaucccggccauuuugcugauuacgaggaacugagagagcaacucucuucggugagcucauucgaaagguuugagauuuucccuaaggagaguuccuggccaaaccacacugucacaggugugucugccagcugcucccauaauggggaaucaaguuuuuaucggaacuuacuguggcuuacccgcaaaaauggauuguaccccaaccugagcaagucuuaugcaaauaacaaagagaaggaaguucuaguacucuggggcgugcaccacccuccaaacaucggcgaccagaaagcccuguaccauacggagaaugcuuacgucuccguggugucaagccacuauagucgaaaguucacucccgaaauagcaaagcguccuaaagucagagaucaggaggggaggaucaacuacuauuggacccuucuggagccaggagacacaauuaucuuugaagccaaugguaacuugauugcuccgcgguacgccuucgcgcucucucgcggcuuuggguccggaaucauaaauagcaacgcacccauggauaagugugacgccaaaugccagacuccucaaggcgcuauuaauucgucucugccauuccagaacguucaucccgugaccaucggugaguguccuaaguauguaagauccgccaaauuaaggauggugacagggcugcggaauauuccaucaauccagagucgcggacucuuuggcgcaaucgcuggcuucauugaagggggauggaccgguauggucgauggcugguacggguaucaccaccagaacgagcaaggaagcggcuacgccgcggaccagaaguccacgcagaaugccauaaacgguaucacuaauaaagugaacucuguuauugauaagaugaauacacaguuuaccgcaguggggaaggaguucaacaaacuugaacgaagaauggagaaccugaauaagaaagucgacgauggcuucaucgacauauggacuuacaacgcugaauugcuagugcugcucgagaaugaaaggacacuggacuuucaugauagcaacguaaagaaucuuuaugagaaaguuaagucacaacugaagaacaaugccaaagaaauuggaaacggcugcuucgaguuuuaccacaaguguaaugacgagugcauggaaagugugaaaaacgggaccuaugauuaccccaaguauuccgaggaaagcaaauugaaucgggagaagaucgacggagucaagcucgagucuauggguguguaccagauccuggcuauuuauucaacggucgccaguagcuuagugcugcuaguuucccucggcgcaaucucuuucuggaugugcucgaacgggagccugcagugucguauuugcauauga

SEQ ID NO: 130942 - RNA, 1698 nt, Artificial Sequence; identical to SEQ ID NO: 129962
  derived and/or modified CDS sequence (opt3) from hemagglutinin__InfluenzaA__ACR61655

SEQ ID NO: 130943 - RNA, 1698 nt, Artificial Sequence; identical to SEQ ID NO: 129978
  derived and/or modified CDS sequence (opt3) from hemagglutinin__InfluenzaA__ACR61666

SEQ ID NO: 130944 - RNA, 1701 nt, Artificial Sequence; identical to SEQ ID NO: 130482
  derived and/or modified CDS sequence (opt3) from hemagglutinin__InfluenzaA__ACR61677

SEQ ID NO: 130945 - RNA, 1701 nt, Artificial Sequence; identical to SEQ ID NO: 130482
  derived and/or modified CDS sequence (opt3) from hemagglutinin__InfluenzaA__ACR61688

SEQ ID NO: 130946 - RNA, 1701 nt, Artificial Sequence; identical to SEQ ID NO: 130482
  derived and/or modified CDS sequence (opt3) from hemagglutinin__InfluenzaA__ACR61699

SEQ ID NO: 130947 - RNA, 1701 nt, Artificial Sequence; identical to SEQ ID NO: 130704
  derived and/or modified CDS sequence (opt3) from hemagglutinin__InfluenzaA__ACR67170

SEQ ID NO: 130948 - RNA, 1701 nt, Artificial Sequence; identical to SEQ ID NO: 130743
  derived and/or modified CDS sequence (opt3) from hemagglutinin__InfluenzaA__ACR67171

SEQ ID NO: 130949 - RNA, 1701 nt, Artificial Sequence; identical to SEQ ID NO: 130704
  derived and/or modified CDS sequence (opt3) from hemagglutinin__InfluenzaA__ACR67172

SEQ ID NO: 130950 - RNA, 1701 nt, Artificial Sequence; identical to SEQ ID NO: 130704
  derived and/or modified CDS sequence (opt3) from hemagglutinin__InfluenzaA__ACR67177

SEQ ID NO: 130951 - RNA, 1701 nt, Artificial Sequence; identical to SEQ ID NO: 130704
  derived and/or modified CDS sequence (opt3) from hemagglutinin__InfluenzaA__ACR67181

SEQ ID NO: 130952 - RNA, 1701 nt, Artificial Sequence
  derived and/or modified CDS sequence (opt3) from hemagglutinin__InfluenzaA__ACR67183
augaaggccauccuggugguccuccuuuacaccuucgcuacagcaaacgccgacacucugugcauuggcuaucacgcgaauaacagcacggauaccguugacacaguguuggagaaaaauguaacugugacccauuccgucaacuuacuggaagauaagcacaaugggaaacuauguaagcucagaggaguggcuccccugcaucuugguaaaugcaacauagccggcuggauccuggggaauccugagugugaaucuuugucaacagcaaguagcugguccuacauuguugagaccucuucgucagacaacggaacuugcuauccaggcgauuuuaucgacuacgaggagcucagggagcagcugagcaguguguccucuuucgaacgguuugagauuuucccgaagacaagcuccuggcccaaucacgauucaaacaagggugucaccgccgcuuguccucaugcaggggccaaaaguuuuuauaagaaucugaucuggcucgugaaaaagggaaacagcuacccaaaauuaucuaaguccuauauaaaugacaagggcaaagaaguacugguucuuuggggcauccaccaccccucaacgagcgcugaucaacagaguuuguaccagaacgccgacgcguacguguucgucgggucuucccgcuauagcaagaaauuuaagccugagauugcaauccgaccaaaagugcgugauagagagggaaggaugaauuacuauuggacucugguggaacccggugacaagauuaccuucgaggccacaggcaaccuagucguuccucgguacgcuuuugccauggaacgcaacgcagggucgggaaucauaauuucugauacuccagugcaugacugcaauaccacaugucagaccccgaaaggcgcuaucaacacgucccuccccuuccaaaauauucacccuaucacuaucgguaagugcccaaaguauguaaaaucaacaaagcugagacuugccaccgggcugaggaacgugcccaguauucagagccggggauuguuuggcgcgauagccggcuucaucgaagggggauggacugguauggucgacggcugguacggguaucaucaccagaaugaacagggauccggcuacgcagcugaucucaaaucuacacaaaacgccauugacgagaucaccaauaaggugaacagcguuauagagaaaaugaauacgcaguuuaccgcuguggguaaggaguucaaccaccuggaaaagcgcauugaaaauuuaaacaaaaaggucgaugacggguuccuggauaucuggacauacaaugccgagcuccuugugcuguuggaaaacgagcgaacucuagacuaucaugauucaaauguaaagaaccuguacgagaagguuagaagucagcucaaaaacaaugcaaaggaaaucggcaacggauguuuugaguucuaucacaagugcgacaauaccuguauggaauccgugaaaaacggcacauacgauuauccuaaguacagcgaggaagccaaacugaauagggaggagauugacggggucaaacuugaaucuacucggaucuaucagauucuggcuauauacucaaccguggcgaguagcuugguccucgugguuucccugggagcaaucucuuuuuggaugugcucgaacgguagcuuacaaugccguauuuguaucuga

SEQ ID NO: 130953 - RNA, 1701 nt, Artificial Sequence; identical to SEQ ID NO: 130717
  derived and/or modified CDS sequence (opt3) from hemagglutinin__InfluenzaA__ACR67184

SEQ ID NO: 130954 - RNA, 1701 nt, Artificial Sequence; identical to SEQ ID NO: 130704
  derived and/or modified CDS sequence (opt3) from hemagglutinin__InfluenzaA__ACR67185

SEQ ID NO: 130955 - RNA, 1701 nt, Artificial Sequence; identical to SEQ ID NO: 130897
  derived and/or modified CDS sequence (opt3) from hemagglutinin__InfluenzaA__ACR67186

SEQ ID NO: 130956 - RNA, 1701 nt, Artificial Sequence; identical to SEQ ID NO: 130704
  derived and/or modified CDS sequence (opt3) from hemagglutinin__InfluenzaA__ACR67187

SEQ ID NO: 130957 - RNA, 1701 nt, Artificial Sequence; identical to SEQ ID NO: 130743
  derived and/or modified CDS sequence (opt3) from hemagglutinin__InfluenzaA__ACR67188

SEQ ID NO: 130958 - RNA, 1701 nt, Artificial Sequence; identical to SEQ ID NO: 130743
  derived and/or modified CDS sequence (opt3) from hemagglutinin__InfluenzaA__ACR67189

SEQ ID NO: 130959 - RNA, 1701 nt, Artificial Sequence
  derived and/or modified CDS sequence (opt3) from hemagglutinin__InfluenzaA__ACR67190
auggaggccauccuggugguccuccuuuacaccuucgcuacagcaaacgccgacacucugugcauuggcuaucacgcgaauaacagcacggauaccguugacacaguguuggaaaagaauguaacugugacccauuccgucaacuuacuggaggauaaacacaaugggaagcuauguaaacucagaggaguggcuccccugcaucuugguaagugcaacauagccggcuggauccuggggaauccugaaugugagucuuugucaacagcaaguagcugguccuacauuguugaaaccucuucgucagacaacggaacuugcuauccaggcgauuuuaucgacuacgaggagcucagggaacagcugagcaguguguccucuuucgagcgguuugaaauuuucccgaaaacaagcuccuggcccaaucacgauucaaacaagggugucaccgccgcuuguccucaugcaggggccaagaguuuuuauaaaaaucugaucuggcucgugaagaaaggaaacagcuacccaaaguuaucuaaauccuauauaaaugacaagggcaaggagguacugguucuuuggggcauccaccaccccucaacgagcgcugaucaacagaguuuguaccagaacgccgacgcguacguguucgucgggucuucccgcuauagcaaaaaguuuaaaccugagauugcaauccgaccaaaggugcgugaucaggaaggaagaaugaauuacuauuggacucugguggagcccggugacaaaauuaccuucgaagccacaggcaaccuagucguuccuagguacgcuuuugccauggagcggaacgcagggucgggaaucauaauuucugauacuccagugcaugacugcaauaccacaugucaaaccccgaagggcgcuaucaacacgucccuccccuuccacaauauucauccuaucacuaucgguaaaugcccaaaguauguaaagucaacaaaacugcgccuugccaccgggcugagaaacgugcccaguauucagagcaggggauuguuuggcgcgauagccggcuucaucgaagggggauggacugguauggucgacggcugguacggguaucaccaccagaaugagcagggauccggcuacgcagcugaucucaagucuacacaaaacgccauugacgagaucaccaauaaagugaacagcguuauagaaaagaugaauacgcaguuuaccgcuguggguaaagaguucaaccaucuggaaaagcggauugagaauuuaaacaagaaagucgaugacggguuccuggauaucuggacauacaaugccgaacuccuugugcuguuggagaacgagcgcacucuagacuaucacgauucaaauguaaagaaccuguacgaaaaaguucgaagucagcucaagaacaaugcaaaagagaucggcaacggauguuuugaguucuaucauaagugcgacaauaccuguauggaauccgugaagaacggcacauacgauuauccuaaauacagcgaagaggccaagcugaauagagaggaaauugacggggucaaacuugagucuacuaggaucuaucagauucuggcuauauacucaaccguggcgaguagcuugguccucgugguuucccugggagcaaucucuuuuuggaugugcucgaacgguagcuuacaaugccggauuuguaucuga

SEQ ID NO: 130960 - RNA, 1701 nt, Artificial Sequence; identical to SEQ ID NO: 130704
  derived and/or modified CDS sequence (opt3) from hemagglutinin__InfluenzaA__ACR67192

SEQ ID NO: 130961 - RNA, 1701 nt, Artificial Sequence
  derived and/or modified CDS sequence (opt3) from hemagglutinin__InfluenzaA__ACR67193
augaaggccauccuggugguccuccuuuacaccuucgcuacagcaaacgccgacacucugugcauuggcuaucacgcgaauaacagcacggauaccguugacacaguguuggagaaaaauguaacugugacccauuccgucaacauauuagaagauaagcacaaugggaaacuguguaagcuaagaggaguggcuccccuccaucuggguaaaugcaacaucgccggcuggauucuugggaauccugagugugaaucucugucaacagcaaguagcugguccuacaucguugagaccucuucgucagacaacggaacuugcuauccaggcgauuuuauugacuacgaagaguugagggagcagcucagcaguguguccucuuucgaacgguuugagaucuucccgaagacaagcuccuggcccaaucacgauucaaacaagggugucaccgccgcuuguccucaugcaggggccaaaaguuuuuauaagaaucugauauggcuggugaaaaagggaaacagcuacccaaaacucucuaaguccuauaucaaugacaagggcaaagaaguauuaguucuguggggcauucaccaccccucaacgagcgcugaucaacagagucuuuaccagaacgccgacgcguacguguucgucgggucuucccgcuauagcaagaaauuuaagccugagaucgcaauucgaccaaaagugcgugaucaggagggaagaaugaauuacuauuggacuuugguggaacccggugacaagaucaccuucgaggccacaggcaaccuggucguuccuagguacgcuuuugccauggaacggaacgcagggucgggaauaauuaucucugauacuccagugcaugagugcaauaccacaugucaaaccccgaaaggcgcuauuaacacgucccuacccuuccagaauauccacccuaucacuauugguaagugcccaaaguauguaaaaucaacaaagcuccgccuggccaccgggcuuagaaacgugcccaguauacagagcaggggacuguuuggcgcgaucgccggcuucauugaagggggauggacugguauggucgacggcugguacggguaucaucaccagaaugagcaaggauccggcuacgcagcugacuugaaaucuacacagaacgccaucgaugagauaaccaauaaggugaacagcguuauugaaaagaugaauacgcaguuuaccgcuguggguaaagaguucaaccaccucgaaaagcggaucgagaaucugaacaaaaaggucgacgauggguucuuagacaucuggacauacaaugccgaacugcucgugcuucuggagaacgagcgcacuuuggauuaucaugacucaaauguuaaaaaccuauacgaaaagguacgaagucagcugaaaaacaaugcaaaggagauuggcaacggauguuuugaguucuaucacaagugcgauaauaccuguauggaauccgugaaaaacggcacauacgacuauccuaaguacagcgaagaggccaaacucaauagagaggaaaucgauggggucaagcuggagucuacuaggauuuaucaaauacuugcuaucuacucaaccguggcgaguagccuggucuuggugguuucccucggagcaauuucuuuuuggaugugcucgaacgguagccugcagugccggaucuguaucuga

SEQ ID NO: 130962 - RNA, 1701 nt, Artificial Sequence; identical to SEQ ID NO: 130704
  derived and/or modified CDS sequence (opt3) from hemagglutinin__InfluenzaA__ACR67195

SEQ ID NO: 130963 - RNA, 1701 nt, Artificial Sequence; identical to SEQ ID NO: 130704
  derived and/or modified CDS sequence (opt3) from hemagglutinin__InfluenzaA__ACR67197

SEQ ID NO: 130964 - RNA, 1701 nt, Artificial Sequence; identical to SEQ ID NO: 130961
  derived and/or modified CDS sequence (opt3) from hemagglutinin__InfluenzaA__ACR67198

SEQ ID NO: 130965 - RNA, 1701 nt, Artificial Sequence; identical to SEQ ID NO: 130704
  derived and/or modified CDS sequence (opt3) from hemagglutinin__InfluenzaA__ACR67199

SEQ ID NO: 130966 - RNA, 1701 nt, Artificial Sequence; identical to SEQ ID NO: 130717
  derived and/or modified CDS sequence (opt3) from hemagglutinin__InfluenzaA__ACR67244

SEQ ID NO: 130967 - RNA, 1701 nt, Artificial Sequence
  derived and/or modified CDS sequence (opt3) from hemagglutinin__InfluenzaA__ACR67254
augaaggccauccuggugguccuccuuuacaccuucgcuacagcaaacgccgacacucugugcauuggcuaucacgcgaauaacagcacggauaccguugacacaguguuggagaagaauguaacugugacccauuccgucaacuuacuggaagauaagcacaaugggaaacuauguaagcucagaggaguggcuccccugcaucuugguaaaugcaacauagccggcuggauccuggggaauccugagugugaaucuuugucaacagcaaguagcugguccuacauuguugagaccucuucgucagacaacggaacuugcuauccaggcgauuuuaucgacuacgaggagcucagggagcagcugagcaguguguccucuuucgaacgguuugagauuuucccgaagacaagcuccuggcccaaucacgauucaaacaagggugucaccgccgcuuguccucaugcaggggccaaaaguuuuuauaagaaucugaucuggcucgugaaaaagggaaacagcuacccaaaauuaucuaaguccuauauaaaugacaagggcaaagaaguacugguucuuuggggcauccaccaccccucaacgagcgcugaucaacagaguuuguaccagaacgccgacgcguacguguucgucgggucuucccgcuauagcaagaaauuuaagccugagauugcaauccgaccaaaagugcgugaucaggagggaagaaugaauuacuauuggacucugguggaacccggugacaagauuaccuucgaggccacaggcaaccuagucguuccuagguacgcuuuugccauggaacggaacguggggucgggaaucauaauuucugauacuccaguacaugacugcaauaccacaugucaaaccccgaaaggcgcaaucaacacgucccuccccuuccagaauauucacccuaucacuaucgguaagugcccaaaguaugugaaaucaacaaagcugcgccuugcuaccgggcugagaaacguccccaguauucagagcaggggauuguuuggcgccauagcgggcuucaucgaagggggauggacugguaugguggacggcugguacggguaucaucaccagaaugaacaaggauccggcuacgccgcagaucucaaaucuacacagaacgcuauugacgagaucaccaauaagguuaacagcgugauagagaaaaugaauacgcaguuuaccgccgucgguaaggaguucaaccaccuggaaaagcggauugaaaauuuaaacaaaaagguggaugacggguuccuggauaucuggacauacaaugcugagcuccuuguacuguuggaaaacgagcgcacucuagacuaucaugauucaaauguuaaaaaccuguacgagaaggugcgaagucagcucaaaaacaaugccaaggaaaucggcaacggauguuuugaguucuaucacaagugcgacaauaccuguauggaauccgucaaaaacggcacauacgauuauccuaaguacagcgaggaagcaaaacugaauagagaggagauugacggggugaaacuugaaucuacuaggaucuaucaaauucuggccauauacucaaccgucgcuaguagcuuggugcucguugugucccugggagcgaucucuuuuuggaugugcucgaacgguagcuuacagugccggauuuguaucuga

SEQ ID NO: 130968 - RNA, 1701 nt, Artificial Sequence; identical to SEQ ID NO: 130717
  derived and/or modified CDS sequence (opt3) from hemagglutinin__InfluenzaA__ACR77438

SEQ ID NO: 130969 - RNA, 1701 nt, Artificial Sequence; identical to SEQ ID NO: 130717
  derived and/or modified CDS sequence (opt3) from hemagglutinin__InfluenzaA__ACR77448

SEQ ID NO: 130970 - RNA, 1701 nt, Artificial Sequence
  derived and/or modified CDS sequence (opt3) from hemagglutinin__InfluenzaA__ACR77458
augaaggccauccuggugguccuccuuuacaccuucgcuacagcaaacgccgacacucugugcauuggcuaucacgcgaauaacagcacggauaccguugacacaguguuggagaaaaauguaacugugacccauuccgucaacuuacuggaagauaagcacaaugggaaacuauguaagcucagaggaguggcuccccugcaucuugacaaaugcaacauagccgguuggauccugggcaauccugagugugaaucuuugucaacagcaaguagcugguccuacauuguugagaccucuucgucagauaacgggacuugcuauccaggagacuuuaucgauuacgaagaacucagggagcagcugagcaguguguccucuuucgaacgguuugagauuuucccgaagacaagcuccuggcccaaucacgacucaaacaagggcgucaccgccgcuuguccucaugccggugcaaaaaguuuuuauaagaaucugaucuggcucgugaaaaaggggaacagcuacccaaaauuaucuaaguccuauauaaaugauaagggaaaagaaguacugguucuuuggggcauccaccaccccucaacgagcgcugaccaacagaguuuguaccagaacgccgaugcguacguguucgucggcacuucucgcuauuccaagaaauuuaagccugagauugcaauccgaccaaaagugcgugaccaggaggggagaaugaauuacuauuggacccugguggaacccggagauaagauuacauucgaggccacugguaaccuagucguuccuagguacgcuuuugccauggaacggaacgcaggcagcgggaucauaauuucggacaccccagugcaugacugcaauacaaccugucaaacgccgaaaggagcuaucaacacuucucuccccuuccagaauauucacccuaucacaaucggcaagugcccaaaguauguaaaauccaccaagcugcgccuugccacuggucugagaaacgugcccucaauucagaguaggggguuguuuggagcgauagccggcuucaucgagggcggguggacaggaauggucgaugguugguacggcuaucaucaccagaaugaacaagggagcggauacgcagcugaccucaaauccacccagaacgccauugaugagaucacgaauaaggugaacucuguuauagagaaaaugaauacccaguuuacagcugugggcaaggaguucaaccaccuggagaagcggauugaaaauuuaaacaaaaaggucgacgaugguuuccuggacaucuggacuuacaaugccgagcuccuugugcuguuggaaaacgagcgcacccuagauuaucaugacagcaauguaaagaaccuguacgagaagguucgaucacagcucaaaaacaaugcaaaggaaaucgggaacggcuguuuugaguucuaucacaagugcgauaauacauguauggaaagugugaaaaacggaacuuacgacuauccuaaguacuccgaggaagccaaacugaauagagaggagauugauggcgucaaacuugaaagcaccaggaucuaucaaauucuggcuauauacucuacaguggcgucaaguuugguccucgugguuagccugggggcaaucuccuuuuggaugugcucuaacggaucguuacagugccggauuuguaucuga

SEQ ID NO: 130971 - RNA, 1701 nt, Artificial Sequence; identical to SEQ ID NO: 130717
  derived and/or modified CDS sequence (opt3) from hemagglutinin__InfluenzaA__ACR77468

SEQ ID NO: 130972 - RNA, 1701 nt, Artificial Sequence; identical to SEQ ID NO: 130717
  derived and/or modified CDS sequence (opt3) from hemagglutinin__InfluenzaA__ACR77478

SEQ ID NO: 130973 - RNA, 1701 nt, Artificial Sequence; identical to SEQ ID NO: 130717
  derived and/or modified CDS sequence (opt3) from hemagglutinin__InfluenzaA__ACR77488

SEQ ID NO: 130974 - RNA, 1701 nt, Artificial Sequence; identical to SEQ ID NO: 130717
  derived and/or modified CDS sequence (opt3) from hemagglutinin__InfluenzaA__ACR77498

SEQ ID NO: 130975 - RNA, 1701 nt, Artificial Sequence; identical to SEQ ID NO: 130704
  derived and/or modified CDS sequence (opt3) from hemagglutinin__InfluenzaA__ACR83525

SEQ ID NO: 130976 - RNA, 1701 nt, Artificial Sequence
  derived and/or modified CDS sequence (opt3) from hemagglutinin__InfluenzaA__ACR83538
augaaggccauccuggugguccuccuuuacaccuucgcuacagcaaacgccgacacucugugcauuggcuaucacgcgaauaacagcacggauaccguugacacaguguuggagaaaaauguaacugugacccauuccgucaacuuacuggaagauaagcacaaugggaaacuauguaagcucagaggaguggcuccccugcaucuugguaaaugcaacauagccggcuggauccuggggaauccugagugugaaucuuugucaacagcaaguagcugguccuacauuguugagaccucuucgucagacaacggaacuugcuauccaggcgauuuuaucgacuacgaggagcucagggagcagcugagcaguguguccucuuucgaacgguuugagauuuucccgaagacaagcuccuggcccaaucacgauucaaacaagggugucaccgccgcuuguccucaugcaggggccaaaaguuuuuauaagaaucugaucuggcucgugaaaaagggaaacagcuacccaaaauuaucuaaguccuauauaaaugacaagggcaaagaaguacugguucuuuggggcauccaccaccccucaacgagcgcugaucaacagaguuuguaccagaacgccgacgcguacguguucgucgggacuucucgcuauuccaagaaauuuaagccugagauugcaauccgaccaaaagugcgugaucaggagggaagaaugaauuacuauuggacccugguggaacccggugacaagauuacauucgaggccacuggcaaccuagucguuccuagguacgcuuuugccauggaacggaacgcagggagcggaaucauaauuucggauaccccagugcaugacugcaauacaaccugucaaacgccgaaaggcgcuaucaacacuucucuccccuuccagaauauucacccuaucacaaucgguaagugcccaaaguauguaaaauccaccaagcugcgccuugccacugggcugagaaacgugcccucaauuuugaguaggggacucuuuggcgcgauagccggcuucaucgaagggggauggacagguauggucgacggcugguacggguaucaucaccagaaugaacagggaagcggcuacgcagcugaucugaaauccacccaaaacgccauugacgagaucacgaauaaggugaacucuguuauagagaaaaugaauacccaguuuacagcuguggguaaggaguucaaccacuuagaaaagcggauugaaaaucugaacaaaaaggucgaugacggguuccucgauaucuggacuuacaaugccgagcuucugguguugcuagaaaacgagcgcacccuggacuaucaugauagcaauguuaaaaaccucuacgagaagguacgaucacagcugaaaaacaaugcaaaggaaaucggcaacggauguuuugaguucuaucacaagugcgacaauacauguauggaaagugugaaaaacggcacuuacgauuauccuaaguacuccgaggaagccaaacuuaauagagaggagauugacggggucaagcuggaaagcaccaggaucuaucagauuuuggcuauauacucuacaguggcgucaagucucguccuggugguuagcuuaggagcaaucuccuuuuggaugugcucuaacgguucgcugcaaugccggauuuguaucuga

SEQ ID NO: 130977 - RNA, 1701 nt, Artificial Sequence; identical to SEQ ID NO: 130717
  derived and/or modified CDS sequence (opt3) from hemagglutinin__InfluenzaA__ACS14666

SEQ ID NO: 130978 - RNA, 1701 nt, Artificial Sequence; identical to SEQ ID NO: 130717
  derived and/or modified CDS sequence (opt3) from hemagglutinin__InfluenzaA__ACS14676

SEQ ID NO: 130979 - RNA, 1701 nt, Artificial Sequence; identical to SEQ ID NO: 130717
  derived and/or modified CDS sequence (opt3) from hemagglutinin__InfluenzaA__ACS14686

SEQ ID NO: 130980 - RNA, 1701 nt, Artificial Sequence; identical to SEQ ID NO: 130717
  derived and/or modified CDS sequence (opt3) from hemagglutinin__InfluenzaA__ACS14696

SEQ ID NO: 130981 - RNA, 1701 nt, Artificial Sequence; identical to SEQ ID NO: 130717
  derived and/or modified CDS sequence (opt3) from hemagglutinin__InfluenzaA__ACS14706

SEQ ID NO: 130982 - RNA, 1701 nt, Artificial Sequence; identical to SEQ ID NO: 130717
  derived and/or modified CDS sequence (opt3) from hemagglutinin__InfluenzaA__ACS14716

SEQ ID NO: 130983 - RNA, 1701 nt, Artificial Sequence; identical to SEQ ID NO: 130717
  derived and/or modified CDS sequence (opt3) from hemagglutinin__InfluenzaA__ACS14726

SEQ ID NO: 130984 - RNA, 1701 nt, Artificial Sequence; identical to SEQ ID NO: 130717
  derived and/or modified CDS sequence (opt3) from hemagglutinin__InfluenzaA__ACS14736

SEQ ID NO: 130985 - RNA, 1701 nt, Artificial Sequence; identical to SEQ ID NO: 130897
  derived and/or modified CDS sequence (opt3) from hemagglutinin__InfluenzaA__ACS27189

SEQ ID NO: 130986 - RNA, 1701 nt, Artificial Sequence; identical to SEQ ID NO: 130717
  derived and/or modified CDS sequence (opt3) from hemagglutinin__InfluenzaA__ACS27199

SEQ ID NO: 130987 - RNA, 1701 nt, Artificial Sequence; identical to SEQ ID NO: 130717
  derived and/or modified CDS sequence (opt3) from hemagglutinin__InfluenzaA__ACS27209

SEQ ID NO: 130988 - RNA, 1701 nt, Artificial Sequence; identical to SEQ ID NO: 130770
  derived and/or modified CDS sequence (opt3) from hemagglutinin__InfluenzaA__ACS27219

SEQ ID NO: 130989 - RNA, 1701 nt, Artificial Sequence; identical to SEQ ID NO: 130717
  derived and/or modified CDS sequence (opt3) from hemagglutinin__InfluenzaA__ACS27229

SEQ ID NO: 130990 - RNA, 1701 nt, Artificial Sequence
  derived and/or modified CDS sequence (opt3) from hemagglutinin__InfluenzaA__ACS27239
augaaggccauccuggugguccuccuuuacaccuucgcuacagcaaacgccgacacucugugcauuggcuaucacgcgaauaacagcacggauaccguugacacaguguuggagaagaauguaacugugacccauuccgucaacuuacuggaagauaagcacaaugggaaacuauguaagcucagaggaguggcuccccugcaucuugguaaaugcaacauagccggcuggauccuggggaauccugagugugaaucuuugucaacagcaaguagcugguccuacauuguugagaccucuucgucagacaacggaacuugcuauccaggcgauuuuaucgacuacgaggagcucagggagcagcugagcaguauguccucuuucgaacgguuugagauuuucccgaagacaagcuccuggcccaaucacgauucaaacaagggugugaccgccgcuuguccucaugcaggggccaaaaguuuuuauaagaaucugaucuggcucgucaaaaagggaaacagcuacccaaaauuaucuaaguccuauauaaaugacaagggcaaagaagugcugguacuuuggggcauccaccaccccucaacgagcgcugaucaacagaguuuguaccagaacgccgacgcguacguuuucguggggucuucccgcuauagcaagaaauuuaagccugagauugcaauccgaccaaaaguccgugaucaggagggaagaaugaauuacuauuggacucugguggaacccggugacaagauuaccuucgaggccacaggcaaccuaguggucccuagguacgcuuuugccauggaacggaacgcagggucgggaaucauaauuucugauacuccaguucaugacugcaauaccacaugucaaaccccgaaaggcgcuaucaacacgucccuccccuuccagaauauucacccuaucacuaucgguaagugcccaaaguaugugaaaucaacaaagcugcgccuugccaccgggcugagaaacguacccaguauucagagcaggggauuguuuggcgcgauagccggcuucaucgaagggggauggacugguaugguggacggcugguacggguaucaucaccagaaugaacaaggauccggcuacgcagcugaucucaaaucuacacagaacgccauugacgagaucaccaauaaggucaacagcgugauagagaaaaugaauacgcaguuuaccgcuguugguaaggaguucaaccaccuggaaaagcggauugaaaauuuaaacaaaaagguggaugacggguuccuggauaucuggacauacaaugccgagcuccuuguccuguuggaaaacgagcgcacucuagacuaucaugauucaaaugugaaaaaccuguacgagaagguacgaagucagcucaaaaacaaugcaaaggaaaucggcaacggauguuuugaguucuaucacaagugcgacaauaccuguauggaauccguuaaaaacggcacauacgauuauccuaaguacagcgaggaagccaaacugaauagagaggagauugacggggugaaacuugaaucuacuaggaucuaucaaauucuggcuauauacucaaccgucgcgaguagcuuggugcucgucgugucccugggagcaaucucuuuuuggaugugcucgaacgguagcuuacagugccggauuuguaucuga

SEQ ID NO: 130991 - RNA, 1701 nt, Artificial Sequence; identical to SEQ ID NO: 130717
  derived and/or modified CDS sequence (opt3) from hemagglutinin__InfluenzaA__ACS27249

SEQ ID NO: 130992 - RNA, 1701 nt, Artificial Sequence; identical to SEQ ID NO: 130717
  derived and/or modified CDS sequence (opt3) from hemagglutinin__InfluenzaA__ACS27775

SEQ ID NO: 130993 - RNA, 1701 nt, Artificial Sequence; identical to SEQ ID NO: 130704
  derived and/or modified CDS sequence (opt3) from hemagglutinin__InfluenzaA__ACS34705

SEQ ID NO: 130994 - RNA, 1701 nt, Artificial Sequence; identical to SEQ ID NO: 130704
  derived and/or modified CDS sequence (opt3) from hemagglutinin__InfluenzaA__ACS34966

SEQ ID NO: 130995 - RNA, 1701 nt, Artificial Sequence
  derived and/or modified CDS sequence (opt3) from hemagglutinin__InfluenzaA__ACS34967
augaaggccauccuggugguccuccuuuacaccuucgcuacagcaaacgccgacacucugugcauuggcuaucacgcgaauaacagcacggauaccguugacacaguguuggagaaaaauguaacugugacccauuccgucaacuuacuggaagauaagcacaaugggaaacuauguaagcucagaggaguggcuccccugcaucuugguaaaugcaacauagccggcuggauccuggggaauccugagugugaaucuuugucaacagcaaguagcugguccuacauuguugagaccucuucgucagacaacggaacuugcuauccaggcgauuuuaucgacuacgaggagcucagggagcagcugagcaguguguccucuuucgaacgguuugagauuuucccgaagacaagcuccuggcccaaucacgauucaaacaagggugucaccgccgcuuguccucaugcaggggccaaaaguuuuuauaagaaucugaucuggcucgugaaaaagggaaacagcuacccaaaauuaucuaaguccuauauaaaugacaagggcaaagaaguacugguucuuuggggcauccaccaccccucaacgagcgcugaucaacagaguuuguaccagaacgccgacgcguacguguucgucgggucuucccgcuauagcaagaaauuuaagccugagauugcaauccgaccaaaagugcgugaucaggagggaagaaugaauuacuauuggacucugguggaacccggugacaagauuaccuucgaggccacaggcaaccuagucguuccuagguacgcuuuugccauggaacggaacgcagggucgggaaucauaauuucugauacuccagugcaugacugcaauaccacaugucaaaccccgaaaggcgcuaucaacacgucccuccccuuccagaauauucacccuaucacuaucgguaagugcccaaaguauguaaaaucaacaaagagucgccuggccaccgggcuuagaaacgugcccagcauucaguccaggggacuguuuggcgcgauagccggcuucaucgaagggggauggacugguauggucgacggcugguacggguaucaucaccagaaugaacaaggaucuggcuacgcagcugauuugaaaagcacacagaaggccauugacgagaucaccaacaaaguuaauucagugauagagaagaugaacacgcaguuuaccgcuguggguaaggaguucaaucaccucgaaaaacggauugaaaaccugaauaagaaagucgaugacggguucuuagauaucuggacauacaacgccgagcugcucgugcuucuggaaaaugagcgcacuuuggacuaucaugauaguaacguaaagaaucuauacgagaaaguucgaucccagcugaagaacaacgcaaaggaaaucggcaauggauguuuugaguucuaucacaaaugcgacaacaccuguauggaaagcgugaagaauggcacauacgauuauccuaaauacucugaggaagccaagcucaacagagaggagauugacggggucaaacuggaaucaacuaggaucuaucaaauucuugcuauauacaguaccguggcgagcucccuggucuuggugguuucucucggagcaaucucguuuuggaugugcagcaaugguucccugcagugccggauuuguaucuga

SEQ ID NO: 130996 - RNA, 1701 nt, Artificial Sequence
  derived and/or modified CDS sequence (opt3) from hemagglutinin__InfluenzaA__ACS34968
augaaggccauccuggugguccuccuuuacaccuucgcuacagcaaacgccgacacucugugcauuggcuaucacgcgaauaacagcacggauaccguugacacaguguuggagaaaaauguaacugugacccauuccgucaacuuacuggaagauaagcacaaugggaaacuauguaagcucagaggaguggcuccccugcaucuugguaaaugcaacauagccggcuggauccuggggaauccugagugugaaucuuugucaacagcaaguagcugguccuacauuguugagucuucgucaagcgacaacggaaccugcuauccaggcgauuuuaucgacuacgaggagcucagggagcagcugaguuccgugucuagcuucgaacgguuugagauuuucccgaagacuuccucauggcccaaucacgauaguaacaagggugucacagccgcuuguccucaugcaggggccaagagcuuuuauaagaaucugaucuggcucgugaaaaagggaaacucuuacccaaaauuauccaagucauauauaaaugacaagggcaaagaaguacugguucuuuggggcauccaccaccccagcaccagugcugaucaacagucuuuguaccagaacgccgacgcguacguguucgucggguccagccgcuauucgaagaaauuuaagccugagauugcaauccgaccaaaagugcgugaucaggagggaagaaugaauuacuauuggacgcugguggaacccggugacaagauuaucuucgaggccacuggcaaccuagucguuccuagguacgcuuuugccauggaacggaacgcagggucuggaauaauuaucuccgauaccccagugcaugacugcaauacaacuugucaaaccccgaaaggcgcuauuaacacaucacuccccuuccagaauauccacccuaucaccauugguaagugcccaaaguauguaaaaaguacgaagcugcgccuugccacugggcugagaaacgugcccagcauacaguccaggggauuguuuggcgcgaucgccggcuucauugaagggggauggacagguauggucgacggcugguacggguaucaucaccagaaugaacaaggaucuggcuacgcagcugaucucaaaagcacccagaacgccaucgacgagauaacuaauaaggugaacucaguuauugagaaaaugaauacacaguuuaccgcuguggguaaggaguucaaccaccuggaaaagcggaucgaaaauuuaaacaaaaaggucgaugacggguuccuggauaucuggacguacaaugccgagcuccuugugcuguuggaaaacgagcgcacccuagacuaucaugauaguaauguuaaaaaccuguacgagaagguacgaucccagcucaaaaacaaugcaaaggaaauuggcaacggauguuuugaguucuaucacaagugcgacaauacauguauggaaagcgugaaaaacggcacuuacgauuauccuaaguacucugaggaagccaaacugaauagagaggagaucgacggggucaaacuugaaucaaccaggauuuaucaaauacuggcuaucuacaguacaguggcgagcuccuugguccucgugguuucucugggagcaauuucguuuuggaugugcagcaacgguuccuuacagugccggaucuguaucuga

SEQ ID NO: 130997 - RNA, 1701 nt, Artificial Sequence
  derived and/or modified CDS sequence (opt3) from hemagglutinin__InfluenzaA__ACS36632
augaaggccauccuggugguccuccuuuacaccuucgcuacagcaaacgccgacacucugugcauuggcuaucacgcgaauaacagcacggauaccguugacacaguguuggagaaaaauguaacugugacccauuccgucaacuuacuggaagauaagcacaaugggaaacuauguaagcucagaggaguggcuccccugcaucuugguaaaugcaacauagccggcuggauccuggggaauccugagugugaaucuuugucaacagcaaguagcugguccuacauuguugagaccucuucgucagacaacggaacuugcuauccaggcgauuuuaucgacuacgaggagcucagggagcagcugagcaguguguccucuuucgaacgguuugagauuuucccgaagacaagcuccuggcccaaucacgauucaaacaagggugucaccgccgcuuguccucaugcaggggccaaaaguuuuuauaagaaucugaucuggcucgugaaaaagggaaacagcuacccaaaauuaucuaaguccuauauaaaugacaagggcaaagaaguacugguucuuuggggcauccaccaccccucaacgagcgcugaucaacagaguuuguaccagaacgccgacgcguacguguucgucgggucuucccgcuauagcaagaaauuuaagccugagauugcaauccgaccaaaagugcgugaucaggagggaagaaugaauuacuauuggacucugguggaacccggugacaagauuaccuucgaggccacaggcaaccuagucguuccuagguacgcuuuugccauggaacggaacgcagggucgggaaucauaauuucugauacuccagugcaugacugcaauaccacaugucaaaccccgaaaggcgcuaucaacacgucccuccccuuccagaauauucacccuaucacuaucgguaagugcccaaaguauguaaaaucaacaaagcugcgccuugccaccgggcugagaaacgugcccaguauucagagcaggggauuguuuggcgcgauagccggcuucaucgaagggggauggacugguauggucgacggcugguacggguaucaucaccagaaugaacaaggauccggcuacgcagcugaucucaaaucuacacagaaggccauugacgagaucaccaacaaagugaauagcguuauagagaagaugaacacgcaguuuaccgcuguggguaaggaguucaaucaccuggaaaaacggauugaaaacuuaaauaagaaagucgaugacggguuccuggauaucuggacauacaacgccgagcuccuugugcuguuggaaaaugagcgcacucuagacuaucaugauucaaacguaaagaaucuguacgagaaaguucgaagucagcucaagaacaacgcaaaggaaaucggcaauggauguuuugaguucuaucacaaaugcgacaacaccuguauggaauccgugaagaauggcacauacgauuauccuaaauacagcgaggaagccaagcugaacagagaggagauugacggggucaaacuugaaucuacuaggaucuaucaaauucuggcuauauacucaaccguggcgaguagcuugguccucgugguuucccugggagcaaucucuuuuuggaugugcucgaaugguagcuuacagugccggauuuguaucuga

SEQ ID NO: 130998 - RNA, 1701 nt, Artificial Sequence
  derived and/or modified CDS sequence (opt3) from hemagglutinin__InfluenzaA__ACS36645
augaaggccauccuggugguccuccuuuacaccuucgcuacagcaaacgccgacacucugugcauuggcuaucacgcgaauaacagcacggauaccguugacacaguguuggagaaaaauguaacugugacccauuccgucaacuuacuggaagauaagcacaaugggaaacuauguaagcucagaggaguggcuccccugcaucuugguaaaugcaacauagccggcuggauccuggggaauccugagugugaaucuuugucaacagcaaguagcugguccuacauuguugagaccucuucgucagacaacggaacuugcuauccaggcgauuuuaucgacuacgaggagcucagggagcagcugagcaguguguccucuuucgaacgguuugagauuuucccgaagacaagcuccuggcccaaucacgauucaaacaagggugucaccgccgcuuguccucaugcagggacgaaaaguuuuuauaagaaucugaucuggcucgugaaaaagggaaacagcuacccaaaauuaucuaaguccuauauaaaugacaagggcaaagaaguacugguucuuuggggcauccaccaccccucaacuagcgccgaucaacagaguuuguaccagaacgcugacgccuacguguucgucgggucuucccgcuauagcaagaaauuuaagccugagauugcgauccgaccaaaagugcgugaucaggagggaagaaugaauuacuauuggacccugguggaacccggugacaagauuacauucgaggcaacuggcaaccuagucguuccuagguacgccuuugcuauggaacggaacgccgggucgggaaucauaauuucugauaccccagugcaugacugcaauacaaccugucaaacgccgaaaggcgcaaucaacacuucccuccccuuccagaauauucacccuaucacaaucgguaagugcccaaaguauguaaaaucaaccaagcugcgccuugcuacugggcugagaaacgugcccaguauucagagcaggggauuguuuggcgccauagcgggcuucaucgaagggggauggacagguauggucgacggcugguacggguaucaucaccagaaugaacaaggauccggcuacgccgcagaucucaaaucuacccagaacgcuauugacgagaucacgaauaaggugaacagcguuauagagaaaaugaauacccaguuuacagccguggguaaggaguucaaccaccuggaaaagcggauugaaaauuuaaacaaaaaggucgaugacggguuccuggauaucuggacuuacaaugcugagcuccuugugcuguuggaaaacgagcgcacccuagacuaucaugauucaaauguaaagaaccuguacgagaagguucgaagucagcucaaauccaacgccaaggaaaucggcaauggauguuuugaguucuaucacaagugcgacaacacauguauggaaagcgugaaaaauggcacuuacgauuauccuaaguacucugaggaagcaaaacugaacagagaggagauugacgggaucaaacuugaaucaaccaggauuuaucaaauacuggccaucuacaguacagucgcuagcuccuuggugcucgucgugucucugggagcgauuucguuuuggaugugcagcaaugguuccuuacagugccggaucuguaucuga

SEQ ID NO: 130999 - RNA, 1701 nt, Artificial Sequence
  derived and/or modified CDS sequence (opt3) from hemagglutinin__InfluenzaA__ACS45035
augaaggccauccuggugguccuccuuuacaccuucgcuacagcaaacgccgacacucugugcauuggcuaucacgcgaauaacagcacggauaccguugacacaguguuggagaaaaauguaacugugacccauuccgucaacuuacuggaagauaagcacaaugggaaacuauguaagcucagaggaguggcuccccugcaucuugguaaaugcaacauagccggcuggauccuggggaauccugagugugaaucuuugucaacagcaaguagcugguccuacauuguugagaccccaucuucggacaacggaacuugcuauccgggcgauuuuaucgacuacgaggagcucagggagcagcugucaagcgugaguuccuucgaacgguuugagauuuuccccaagacaucuagcuggccuaaucacgauuccaacaagggugucaccgccgcuuguccacaugcaggggccaaaucauuuuauaagaaucugaucuggcucgugaaaaagggaaacaguuaccccaaauuaagcaagucuuauauaaaugacaagggcaaagaaguacugguucuuuggggcauccaccacccuuccacgucagcugaucaacagagcauuuaccagaacgccgacacuuacguguucgucgggaguucucgcuauuccaagaaauuuaagccagagaucgcgauucgacccaaagugcgugaucaggagggaagaaugaauuacuauuggaccuugguggaaccuggugacaagaucacauucgaggcaacuggcaaccuggucguuccaagguacgccuuugcuauggaacggaacgccgggagcggaauaauuaucucggauaccccggugcaugacugcaauacaaccugucaaacgcccaaaggcgcaauuaacacuucucuaccuuuccagaauauccacccaaucacaauugguaagugccccaaguauguaaaauccaccaagcuccgccuggcuacugggcuuagaaacauaccuucaauccagaguaggggacuguuuggcgccauugcgggcuucaucgaagggggauggacagguaugguggacggcugguacggguaucaucaccagaaugaacaaggaagcggcuacgccgcagauuugaaauccacccagaacgcuauagacgagauuacgaauaaggucaacucugugaucgagaaaaugaauacccaguuuacagccguugguaaggaguucaaccaccucgaaaagcggaucgaaaaucugaacaaaaagguggaugacggguucuuagauauuuggacuuacaaugcugagcugcucguccuucuggaaaacgagcgcaccuuggacuaucaugauagcaaugugaaaaaccuauacgagaagguacgaucacagcugaaaaacaaugccaaggaaaucggcaacggauguuuugaguucuaucacaagugcgacaauacauguauggaaaguguuaaaaacggcacuuacgauuauccaaaguacuccgaggaagcaaaacucaauagagaggagauugacggggugaagcuggaaagcaccaggauauaucaaauccuugccauuuacucuacagucgcuucaagucugguguuggucgugagccucggagcgaucuccuuuuggaugugcucuaacgguucgcugcagugccggaucuguauuuga

SEQ ID NO: 131000 - RNA, 1701 nt, Artificial Sequence; identical to SEQ ID NO: 130717
  derived and/or modified CDS sequence (opt3) from hemagglutinin__InfluenzaA__ACS50084

SEQ ID NO: 131001 - RNA, 1701 nt, Artificial Sequence; identical to SEQ ID NO: 130959
  derived and/or modified CDS sequence (opt3) from hemagglutinin__InfluenzaA__ACS50095

SEQ ID NO: 131002 - RNA, 1701 nt, Artificial Sequence
  derived and/or modified CDS sequence (opt3) from hemagglutinin__InfluenzaA__ACS54258
augaaggccauccuggugguccuccuuuacaccuucgcuacagcaaacgccgacacucugugcauuggcuaucacgcgaauaacagcacggauaccguugacacaguguuggagaaaaauguaacugugacccauuccgucaacuuacuggaagauaagcacaaugggaaacuauguaagcucagaggaguggcuccccugcaucuugguaaaugcaacauagccggcuggauccuggggaauccugagugugaaucuuugucaacagcaaguagcugguccuacauuguugagaccucuucgucagacaacggaacuugcuauccaggcgauuuuaucgacuacgaggagcucagggagcagcugagcaguguguccucuuucgaacgguuugagauuuucccgaagacaagcuccuggcccaaucacgauucaaacaagggugucaccgccgcuuguccucaugcaggggccaaaaguuuuuauaagaaucugaucuggcucgugaaaaagggaaacagcuacccaaaauuaucuaaguccuauauaaaugacaagggcaaagaaguacugguucuuuggggcauccaccaccccucaacgagcgcugaucaacagaguuuguaccagaacgccgacgcguacguguucgucgggacuucucgcuauuccaagaaauuuaagccugagauugcaauccgaccaaaagugcgugaucaggagggaagaaugaauuacuauuggacccugguggaacccggugacaagauuacauucgaggccacuggcaaccuagucguuccuagguacgcuuuugccauggaacggaacgcagggagcggaaucauaauuucggauaccccagugcaugacugcaauacaaccugucaaacgccgaaaggcgcuaucaacacuucucuccccuuccagaauauucacccuaucacaaucgguaagugcccaaaguauguaaaauccaccaagcugcgccuugccacugggcugagaaacgugcccucaauucagaguaggggauuguuuggcgcgauagccggcuucaucgaagggggauggacagguauggucgacggcugguacggguaucaucaccagaaugaacaaggaagcggcuacgcagcugaucucaaauccacccagaacgccauugacgagaucacgaauaaggugaacucuguuauagagaaaaugaauacccaguuuacagcuguggguaaggaguucaaccaccuggaaaagcggauugaaaauuuaaacaaaaaggucgaugacggguuccuggauaucuggacuuacaaugccgagcuccuugugcuguuggaaaacgagcgcacccuagacuaucaugauagcaauguaaagaaccuguacgagaagguucgaucacagcucaaaaacaaugcaaaggaaaucggcaacggauguuuugaguucuaucacaagugcgacaauacauguauggaaagugugaaaaacggcacuuacuauuacccuaaguauuccgaggaagccaaacugaauagagaggagauugauggggucaaacuugaaagcaccaggaucuaccaaauucuggcuauauacucuacaguggcgucaaguuugguccucgugguuagccugggagcaaucuccuuuuggaugugcucuaacgguucguuacagugccggauuuguaucuga

SEQ ID NO: 131003 - RNA, 1701 nt, Artificial Sequence; identical to SEQ ID NO: 130732
  derived and/or modified CDS sequence (opt3) from hemagglutinin__InfluenzaA__ACS54259

SEQ ID NO: 131004 - RNA, 1701 nt, Artificial Sequence; identical to SEQ ID NO: 130704
  derived and/or modified CDS sequence (opt3) from hemagglutinin__InfluenzaA__ACS54260

SEQ ID NO: 131005 - RNA, 1701 nt, Artificial Sequence; identical to SEQ ID NO: 130717
  derived and/or modified CDS sequence (opt3) from hemagglutinin__InfluenzaA__ACS54261

SEQ ID NO: 131006 - RNA, 1701 nt, Artificial Sequence; identical to SEQ ID NO: 130717
  derived and/or modified CDS sequence (opt3) from hemagglutinin__InfluenzaA__ACS54263

SEQ ID NO: 131007 - RNA, 1701 nt, Artificial Sequence; identical to SEQ ID NO: 130717
  derived and/or modified CDS sequence (opt3) from hemagglutinin__InfluenzaA__ACS54301

SEQ ID NO: 131008 - RNA, 1701 nt, Artificial Sequence; identical to SEQ ID NO: 130704
  derived and/or modified CDS sequence (opt3) from hemagglutinin__InfluenzaA__ACS66821

SEQ ID NO: 131009 - RNA, 1701 nt, Artificial Sequence
  derived and/or modified CDS sequence (opt3) from hemagglutinin__InfluenzaA__ACS68822
augaaggccauccuggugguccuccuuuacaccuucgcuacagcaaacgccgacacucugugcauuggcuaucacgcgaauaacagcacggauaccguugacacaguguuggagaagaauguaacugugacccauuccgucaacuuacuggaagauaagcacaaugggaaacuauguaagcucagaggaguggcuccccugcaucuugguaaaugcaacauagccggcuggauccuggggaauccugagugugaaucuuugucaacagcaaguagcugguccuacauuguugagaccucuucgucagacaacggaacuugcuauccaggcgauuuuaucgacuacgaaggucucagggagcagcugagcaguguguccucuuucgagcgguuugaaauuuucccgaagacaagcuccuggcccaaucacgauucaaacaagggggucaccgccgcuuguccucaugcaggagccaaaaguuuuuauaagaaucugaucuggcucgugaaaaagggcaacagcuacccaaaauuaucuaaguccuauauaaaugacaagggcaaagagguacugguucuuugggggauccaccaccccucaacgagcgcugaucaacagaguuuguaccagaacgccgacgcguacguguucgucggaacuucucgcuauuccaagaaauuuaagccugaaauugcaauccgaccaaaagugcgugaucaggaggguagaaugaauuacuauuggacccugguggagcccggcgacaagauuacauucgaagccacugggaaccuagucguuccuagguacgcuuuugccauggagcggaacgcaggaagcggcaucauaauuucggauaccccagugcaugacugcaauacaaccugucaaacgccgaaaggugcuaucaacacuucucuccccuuccagaauauucacccuaucacaaucgggaagugcccaaaguauguaaaauccaccaagcugcgccuugccacuggacugagaaacgugcccucaauucagaguaggggcuuguuuggcgcgauagccggguucaucgaaggagguuggacaggcauggucgacgggugguacggauaucaucaccagaaugagcaaggcagcgguuacgcagcugaucucaaauccacccagaacgccauugacgaaaucacgaauaaggugaacucuguuauagagaaaaugaauacccaguuuacagcuguggggaaggaguucaaccaccuggaaaagcggauugagaauuuaaacaaaaagaucgaugacggcuuccuggauaucuggacuuacaaugccgaacuccuuguccuguuggagaacgaacgcacccuagacuaucaugauagcaaugugaaaaaccuguacgagaagguacgaucacagcucaaaaacaaugcaaaggagauuggaaacggcuguuuugaguucuaucacaagugcgacaauacauguauggaaaguguuaaaaacgggacuuacgauuauccuaaguacuccgaagaggccaaacugaauagagaagagaucgacggagugaaacuugagagcaccaggauuuaucaaauacuggcuaucuacucuacagucgcgucaaguuuggugcucgucgugagccugggugcaauuuccuuuuggaugugcucuaacggcucguuacagugccggaucuguaucuga

SEQ ID NO: 131010 - RNA, 1701 nt, Artificial Sequence; identical to SEQ ID NO: 130717
  derived and/or modified CDS sequence (opt3) from hemagglutinin__InfluenzaA__ACS75821

SEQ ID NO: 131011 - RNA, 1701 nt, Artificial Sequence; identical to SEQ ID NO: 130717
  derived and/or modified CDS sequence (opt3) from hemagglutinin__InfluenzaA__ACS77926

SEQ ID NO: 131012 - RNA, 1701 nt, Artificial Sequence; identical to SEQ ID NO: 130717
  derived and/or modified CDS sequence (opt3) from hemagglutinin__InfluenzaA__ACS77936

SEQ ID NO: 131013 - RNA, 1701 nt, Artificial Sequence; identical to SEQ ID NO: 130810
  derived and/or modified CDS sequence (opt3) from hemagglutinin__InfluenzaA__ACS77946

SEQ ID NO: 131014 - RNA, 1701 nt, Artificial Sequence; identical to SEQ ID NO: 130717
  derived and/or modified CDS sequence (opt3) from hemagglutinin__InfluenzaA__ACS77956

SEQ ID NO: 131015 - RNA, 1701 nt, Artificial Sequence; identical to SEQ ID NO: 130717
  derived and/or modified CDS sequence (opt3) from hemagglutinin__InfluenzaA__ACS77966

SEQ ID NO: 131016 - RNA, 1701 nt, Artificial Sequence; identical to SEQ ID NO: 130717
  derived and/or modified CDS sequence (opt3) from hemagglutinin__InfluenzaA__ACS77976

SEQ ID NO: 131017 - RNA, 1701 nt, Artificial Sequence; identical to SEQ ID NO: 130959
  derived and/or modified CDS sequence (opt3) from hemagglutinin__InfluenzaA__ACS77986

SEQ ID NO: 131018 - RNA, 1701 nt, Artificial Sequence
  derived and/or modified CDS sequence (opt3) from hemagglutinin__InfluenzaA__ACS77996
augaaggccacccuggugguccuccuuuacacauucgcuacugcaaacgccgacacgcugugcaucggcuaucacgcgaauaacagcaccgauacaguugacacuguguuggagaaaaauguaaccgugacacauuccgucaacuuacuggaagauaagcacaaugggaaacuauguaagcucagaggaguggcuccccugcaucuugguaaaugcaacauugccggcuggauacuggggaauccugagugugaaucuuugucaaccgcaaguagcugguccuacaucguugagacuucuucgucagacaacggaacaugcuauccaggcgauuuuauugacuacgaggagcucagggagcagcugagcaguguguccucuuucgaacgguuugagaucuucccgaagaccagcuccuggcccaaucacgauucaaacaagggugucacggccgcuuguccucaugcaggggccaaaaguuuuuauaagaaucugauuuggcucgugaaaaagggaaacagcuacccaaaauuaucuaaguccuauaucaaugacaagggcaaagaaguacugguucuuuggggcauacaccaccccucaacuagcgcugaucaacagaguuuguaccagaacgccgacgcguacguguucgucgggaccucucgcuauuccaagaaauuuaagccugagaucgcaauucgaccaaaagugcgugaucaggagggaagaaugaauuacuauuggacacugguggaacccggugacaagaucacuuucgaggccaccggcaaccuagucguuccuagguacgcuuuugccauggaacggaacgcagggagcggaauuaucauaucggauacaccagugcaugacugcaauaccacgugucaaacuccgaaaggcgcuauuaacacaucucuccccuuccagaauauccacccuauuaccaucgguaagugcccaaaguauguaaaauccacuaagcugcgccuugccacagggcugagaaacgugcccucaauccagaguaggggauuguuuggcgcgauugccggcuucauagaagggggauggaccgguauggucgacggcugguacggguaucaucaccagaaugaacaaggaagcggcuacgcagcugaucucaaauccacgcagaacgccaucgacgagauuaccaauaaggugaacucuguuaucgagaaaaugaauacacaguuuacugcuguggguaaggaguucaaccaccuggaaaagcggauagaaaauuuaaacaaaaaggucgaugacggguuccuggauauuuggaccuacaaugccgagcuccuugugcuguuggaaaacgagcgcacacuagacuaucaugauagcaauguaaagaaccuguacgagaagguucgaucacagcucaaaaacaaugcaaaggaaaucggcaacggauguuuugaguucuaucacaagugcgacaauacuuguauggaaagugugaaaaacggcaccuacgauuauccuaaguacuccgaggaagccaaacugaauagagaggagaucgacggggucaaacuugaaagcacaaggauuuaucaaauccuggcuauuuacucuaccguggcgucaaguuugguccucgugguuagccugggagcaauauccuuuuggaugugcucuaacgguucguuacagugccggaucuguauuuga

SEQ ID NO: 131019 - RNA, 1701 nt, Artificial Sequence; identical to SEQ ID NO: 130717
  derived and/or modified CDS sequence (opt3) from hemagglutinin__InfluenzaA__ACS78006

SEQ ID NO: 131020 - RNA, 1701 nt, Artificial Sequence; identical to SEQ ID NO: 130717
  derived and/or modified CDS sequence (opt3) from hemagglutinin__InfluenzaA__ACS78016

SEQ ID NO: 131021 - RNA, 1701 nt, Artificial Sequence
  derived and/or modified CDS sequence (opt3) from hemagglutinin__InfluenzaA__ACS78026
augaaggccauccuggugguccuccuuuacaccuucgcuacagcaaacgccgacacucugugcauuggcuaucacgcgaauaacagcacggauaccguugacacaguguuggagaaaaauguaacugugacccauuccgucaacuuacuggaagauaagcacaaugggaaacuauguaagcucagaggaguggcuccccugcaucuugguaaaugcaacauagccggcuggauccuggggaauccugagugugaaucuuugucaacagcaaguagcugguccuacauuguugagaccucuucgucagacaacggaacuugcuauccaggcgauuuuaucgacuacgaggagcucagggagcagcugagcaguguguccucuuucgaacgguuugagauuuucccgaagaucagcuccuggcccaaucacgauucaaaccgcggugucacagccgcuuguccucaugcaggggccaagaguuuuuauaaaaaucugauauggcucgugaagaaaggaaacagcuacccaaaguuaaucaaaucuuauauuaaugacaagggcaaggaaguacugguucuuuggggcauccaccaccccuccaccucagcugaucaacagagcuuguaccagaacgccgacgcguacguguucgucgggaguucucgauauuccaaaaaguuuaaaccugagauugcaauccguccaaaggugagagaucaggagggaaggaugaauuacuauuggacgcugguggaacccggugacaaaauaacuuucgaggccaccggcaaccuagucguuccucgguacgcuuuugccauggaacgcaacgcagggagcggaauuaucauuucggauacaccagugcaugacugcaauacuaccugucaaacaccgaagggcgcuaucaacaccucucuccccuuccagaauauccacccuauuacgauagguaaaugcccaaaguauguaaaguccacuaaacugagacuugccacagggcugaggaacgugcccucaauccagagucggggauuguuuggcgcgauugccggcuucaucgaagggggauggaccgguauggucgacggcugguacggguaucaucaccagaaugaacaaggaagcggcuacgcagcugaucucaaguccacucagaacgccauagacgagauuacaaauaaagugaacucuguuaucgagaagaugaauacccaguuuacggcuguggguaaagaguucaaccaccuggaaaagcgcaucgaaaauuuaaacaagaaagucgaugacggguuccuggauauuuggaccuacaaugccgagcuccuugugcuguuggaaaacgagcgaacacuagacuaucaugauagcaauguaaagaaccuguacgagaaaguuagaucacagcucaagaacaaugcaaaagaaaucggcaacggauguuuugaguucuaucacaagugcgacaauacuuguauggaaagugugaagaacggcaccuacgauuauccuaaauacuccgaggaagccaagcugaauagggaggagauugacggggucaaacuugaaagcacacggauauaucaaauccuggcuauuuacucuacuguggcgucaaguuugguccucgugguuagccugggagcaaucuccuuuuggaugugcucuaacgguucguuacagugccguaucuguauuuga

SEQ ID NO: 131022 - RNA, 1701 nt, Artificial Sequence; identical to SEQ ID NO: 130959
  derived and/or modified CDS sequence (opt3) from hemagglutinin__InfluenzaA__ACS78036

SEQ ID NO: 131023 - RNA, 1701 nt, Artificial Sequence; identical to SEQ ID NO: 130959
  derived and/or modified CDS sequence (opt3) from hemagglutinin__InfluenzaA__ACS78046

SEQ ID NO: 131024 - RNA, 1701 nt, Artificial Sequence; identical to SEQ ID NO: 130732
  derived and/or modified CDS sequence (opt3) from hemagglutinin__InfluenzaA__ACS92569

SEQ ID NO: 131025 - RNA, 1701 nt, Artificial Sequence; identical to SEQ ID NO: 130732
  derived and/or modified CDS sequence (opt3) from hemagglutinin__InfluenzaA__ACS92579

SEQ ID NO: 131026 - RNA, 1701 nt, Artificial Sequence; identical to SEQ ID NO: 130717
  derived and/or modified CDS sequence (opt3) from hemagglutinin__InfluenzaA__ACS92589

SEQ ID NO: 131027 - RNA, 1701 nt, Artificial Sequence
  derived and/or modified CDS sequence (opt3) from hemagglutinin__InfluenzaA__ACS92612
augaaggccauccuggugguccuccuuuacaccuucgcuacagcaaacgccgacacucugugcauuggcuaucacgcgaauaacagcacggauaccguugacacaguguuggagaagaauguaacugugacccauuccgucaacuuacuggaagauaagcacaaugggaaacuauguaagcucagaggaguggcuccccugcaucuugguaaaugcaacauagccggcuggauccuggggaauccugagugugaaucuuugucaacagcaaguagcugguccuacauuguugagaccucuucgucagacaacggaacuugcuauccaggcgauuuuaucgacuacgaggagcucagggagcagcugagcaguguguccucuuucgaacgguuugagauuuucccgaagacaagcuccuggcccauccacgauucaaauaagggugucaccgccgcuuguccucaugcaggggccaaaaguuuuuauaagaaccugauauggcucgugaaaaagggaaauagcuacccaaaauuaucuaaguccuauaucaacgacaagggcaaagaaguacugguucuuuggggcauucaccaccccucaacgagcgcugaucaacagaguuuguaccagaaugccgacgcguacguguucgucgggucuucccgcuauagcaagaaauuuaagccugagaucgcaauucgaccaaaagugcgugaucaggagggaagaaugaacuacuauuggacucugguggaacccggugacaagaucaccuucgaggccacaggcaaucuagucguuccuagguacgcuuuugccauggaacggaacgcagggucgggaauaauuaucucugauacuccagugcaugacugcgacaccacaugucaaaccccgaaaggcgcuauuaacacgucccuccccuuccagaauauccacccuaucacuauugguaagugcccaaaguauguaaaaucaacaaagcugcgccuugccaccgggcugagaaacauacccaguauccagagcaggggauuguuuggcgcgauugccggcuucaucgaagggggauggacugguaugguggauggcugguacggguaucaucaccagaaugaacaaggauccggcuacgcagcugaccucaaaucuacacagaacgccauagaugagauuaccaauaaggucaacagcgugaucgagaaaaugaauacgcaguuuaccgcuguugguaaggaguucaaccaccuggaaaagcggaucgaaaauuuaaacaaaaagguggacgauggguuccuggacauuuggacauacaaugccgagcuccuuguccuguuggaaaacgagcgcacucuagauuaucaugacucaaaugugaaaaaccuguacgagaagguacgaagucagcucaaaaauaacgcaaaggaaaucggcaacggauguuuugaguucuaucacaagugcgauaauaccuguauggaauccguuaaaaacggcacauacgacuauccuaaguacagcgaggaagccaaacugaauagagaggagauugauggggugaaacuugaaucuacuaggauauaucaaauccuggcuauuuacucaaccgucgcgaguagcuuggugcucgucgugucccugggagcaaucucuuuuuggaugugcucgaacgguagcuuacagugccggaucuguauuuga

SEQ ID NO: 131028 - RNA, 1701 nt, Artificial Sequence; identical to SEQ ID NO: 130717
  derived and/or modified CDS sequence (opt3) from hemagglutinin__InfluenzaA__ACT10307

SEQ ID NO: 131029 - RNA, 1701 nt, Artificial Sequence; identical to SEQ ID NO: 130717
  derived and/or modified CDS sequence (opt3) from hemagglutinin__InfluenzaA__ACT10314

SEQ ID NO: 131030 - RNA, 1701 nt, Artificial Sequence
  derived and/or modified CDS sequence (opt3) from hemagglutinin__InfluenzaA__ACT11057
augaaggccauccuggugguccuccuuuacaccuucgcuacagcaaacgccgacacucugugcauuggcuaucacgcgaauaacagcacggauaccguugacacaguguuggagaaaaauguaacugugacccauuccgucaacauauuagaagauaagcacaaugggaaacuguguaagcuaagaggaguggcuccccuccaucuggguaaaugcaacaucgccggcuggauucuugggaauccugagugugaaucucugucaacagcaaguagcugguccuacaucguugagaccucuucgucagacaacggaacuugcuauccaggcgauuuuauugacuacgaagaguugagggagcagcucagcaguguguccucuuucgaacgguuugagaucuucccgaagacaagcuccuggcccaaucacgauucaaacaagggugucaccgccgcuuguccucaugcaggggccaaaaguuuuuauaagaaucugauauggcuggugaaaaagggaaacagcuacccaaaacucucuaaguccuauaucaaugacaagggcaaagaaguauuaguucuguggggcauucaccaccccucaacgagcgcugaucaacagagucuuuaccagaacgccgacgcguacguguucgucgggucuucccgcuauagcaagaaauuuaagccugagaucgcaauucgaccaaaagugcgugaucaggagggaagaaugaauuacuauuggacuuugguggaacccggugacaagaucaccuucgaggccacaggcaaccuggucguuccuagguacgcuuuugccauggaacggaacgcagggucgggaauaauuaucucugauacuccagugcaugacugcaauaccacaugucaaaccccgaaaggcgcuauuaacacgucccuacccuuccagaauauccacccuaucacuauugguaagugcccaaaguauguaaaaucaacaaagcuccgccuggccaccgggcuuagaaacgugcccaguauacagagcaggggacuguuuggcgcgaucgccggcuucauugaagggggauggacugguauggucgacggcugguacggguaucaucaccagaaugaacaaggauccggcuacgcagcugauuugaaaucuacacagaacgccaucgacgagauaaccaauaaggugaacagcguuauugagaaaaugaauacgcaguuuaccgcuguggguaaggaguucaaccaccucgagaagcggaucgaaaaucugaacaaaaaggucgaugacggguucuuagauaucuggacauacaaugccgagcugcucgugcuucuggaaaacgagcgcacuuuggacuaucaugauucaaauguuaaaaaccuauacgagaagguacgaagucagcugaaaaacaaugcaaaggaagugggcaacggauguuuugaguucuaucacaagugcgacaauaccuguauggaauccgucaaaaacggcacauacgauuauccuaaguacagcgaggaagccaaacucaauagagaggagauugacggggugaagcuggaaucuacuaggaucuaucaaauucuugcuauauacucaaccgucgcgaguagccugguguugguugugucccucggagcaaucucuuuuuggaugugcucgaacgguagccugcagugccggauuuguaucuga

SEQ ID NO: 131031 - RNA, 1704 nt, Artificial Sequence
  derived and/or modified CDS sequence (opt3) from hemagglutinin__InfluenzaA__ACT15312
auggagaagaucgugcugcuccuugccauugucagcauaguuaaauccgaccagaucugcauuggcuaccacgcuaacaauucuaccgaacaaguggauacaaucauggagaagaacguaacugugacgcaugcacaggacauucuggaaaagacccacaaugggaaauuguguaacuuagauggagucaaaccccugauccuaagagacugcucaguggccgguuggcuccugggcaauccuaugugugaugaguuccuuaacguuccagaauggaguuauauaguggagaagaucaauccggcgaacgaccugugcuaccccgggaauuuuaacgauuaugaggaauugaagcaucuccugagcaggauuaaucacuucgagaaaauccagauuaucccuaagaacuccuggucugaccaugaggcuucgggagucucaagcgccuguccauaccagggccggaguuccuuuuuccgcaaugugguauggcugacuaaaaagaacaaugcauaucccacaauaaaacgaucuuacaacaacaccaaucaagaagaucucuuaguucugugggguauucaccacccuaacgacgccgcugagcagacacgucuuuaucagaauccaaccacuuacaucagcguggggacauccaccuugaaccagagacugguccccaagauugcaacgaggucaaaggugaauggacaaaguggccggauggaauuuuucuggacuauccuaaaaagcaacgaugccaucaauuuugagucuaacggcaauuucauugcuccugaaaacgccuacaagauagugaaaaagggggacuccaccaucaugaaaucagagcucgaauauggaaauugcaacacaaagugucagacuccaauuggugcgaucaauagcaguaugccguuucauaacauacacccccugaccauuggcgagugcccuaaauacgucaagucuaaucgccuuguucuggcaacaggguugagaaacuccccacagggagagaggcggcgcaagaaacgaggccucuucggugccaucgcuggguuuaucgaaggaggcuggcagggcaugguggaugggugguauggauaccaucacagcaacgagcaagguucgggcuaugccgcagacaaggaaucuacccagaaagcuauugacgggguaacgaauaaggugaacuccaucauugauaaaaugaauacucaguucgaggccgucggaagagaauuuaacaaucuggagaggcggauagagaacuuaaauaagaagauggaagacggcuuccuggauguguggacauacaacgcggagcuccuuguucugauggaaaaugagcguaccuuggacuuccacgauucaaacgugaaaaaucuauaugacaagguccgccugcaacucagagauaacgccaaagaacuggguaauggguguuuugaguucuaccauaggugcgacaacgaguguauggaaagugugcggaauggcacuuacgauuauccccaguacagcgaggaagcacgacuuaagcgcgaggagaucuccggaguaaaacuggaaucuauuggcacauaucagaucuugagcaucuacucaaccguugcuaguucccucgcccuggcuauuaugguggccggguuauuucuguggaugugcagcaacggaucucuacagugcagaauauguaucuga

SEQ ID NO: 131032 - RNA, 1704 nt, Artificial Sequence
  derived and/or modified CDS sequence (opt3) from hemagglutinin__InfluenzaA__ACT15314
auggagaagaucgugcugcuccuugccauugucagccugguuaaauccgaccagauaugcaucggcuaccacgcuaacaauucuaccgaacaaguggauacaauuauggagaagaacguaacugugacgcaugcacaggacaucuuggaaaagacccacaaugggaaauuauguaaccuggauggagucaaaccccuaauucucagagacugcucaguggccgguuggcugcuuggcaauccuaugugugaugaguuccugaacguuccagaauggaguuauaucguggagaagauaaauccggcgaacgacuugugcuaccccgggaauuuuaacgauuaugaggaacucaagcaucugcugagcaggaucaaucacuucgagaaaauucagaucauuccuaagaacuccuggucugaccaugaggcuucgggagucucaagcgccuguccauaccagggccggaguuccuuuuuccgcaaugugguauggcucacuaaaaagaacaaugcauaucccacaaucaaacgaucuuacaacaacaccaaucaagaagauuuacugguucuuugggguauacaccacccuaacgacgccgcugagcagacacguuuguaucagaauccaaccacuuacauuagcguggggacauccacccugaaccagaggcuaguccccaagaucacgacuagaucaaaggugaauggacaaaguggccggauggaauuuuucuggaccauucucaaaagcaacgaugcaaucaauuuugagucuaacggcaauuucaucgccccugaaaacgcuuacaagauugugaaaaagggggacuccacaauaaugaaaucagagcuggaauauggaaauugcaacacuaagugucagaccccaaucggugccauuaauagcaguaugccguuucauaacauccacccccuuacaauaggcgagugcccuaaauacgucaagucuaaucgccugguuuuggcgaccgggcucagaaacuccccacagggagagaggcggcgcaagaaacgaggccuguucggugcaauugccggguuuaucgaaggaggcuggcagggcaugguggaugggugguauggauaccaucacagcaacgagcaagguucgggcuaugcugccgacaaggaaucuacgcagaaagcaaucgacgggguaacuaauaaggugaacuccauuaucgauaaaaugaauacacaguucgaggcugucggaagagaauuuaacaauuuagagaggcggauugagaaccugaauaagaagauggaagacggcuuccucgauguguggaccuacaacgccgagcuucugguuuugauggaaaaugagcguacucuagacuuccacgauucaaacgugaaaaaucuguaugacaagguccgccuccaacugagagauaacgcgaaagaacuugguaauggguguuuugaguucuaccauaggugcgacaacgaguguauggaaagugugcggaauggcacauacgauuauccccaguacagcgaggaagcccgacugaagcgcgaggagauauccggaguaaaauuggaaucuaucggcaccuaucagauucucagcaucuacucaacgguugcaaguucccuggcuuuagccaucaugguggcugggcuguuucuauggaugugcagcaacggaucucuccagugcagaauuuguauauga

SEQ ID NO: 131033 - RNA, 1704 nt, Artificial Sequence
  derived and/or modified CDS sequence (opt3) from hemagglutinin__InfluenzaA__ACT15316
auggagaagaucgugcugcuccuugccauugucagccugguuaaauccgaccagauaugcaucggcuaccacgcuaacaauucuaccgaacaaguggauacaauuauggagaagaacguaacugugacgcaugcacaggacaucuuggaaaagacccacaaugggaaauuauguaaccuggauggagucaaaccccuaauucucagagacugcucaguggccgguuggcugcuuggcaauccuaugugugaugaguuccugaacguuccagaauggaguuauaucguggagaagauaaauccggcgaacgacuugugcuaccccgggaauuuuaacgauuaugaggaacucaagcaucugcugagcaggaucaaucacuucgagaaaauucagaucauuccuaagaacuccuggucugaccaugaggcuucgggagucucaagcgccuguccauaccagggccggaguuccuuuuuccgcaaugugguauggcucacuaaaaaggauaacgcauaucccacaaucaaacgaucuuacaauaacaccaaccaagaagacuuacugguucuuugggguauacaccacccuaaugaugccgcugagcagacacguuuguaucagaacccaaccacuuacauuagcguggggacauccacccugaaucagagacuaauccccaagauugcaacgaggucaaaggucaacggacaaaguggccggauggaauuuuucuggacuauccucaaaagcaaugacgccaucaacuuugagucuaauggcaacuucauugcuccugaaaaugccuacaagauagugaaaaagggggauuccaccaucaugaaaucagagcuggaauauggaaacugcaauacaaagugucagacuccaauuggugcgaucaacagcaguaugccguuucauaauauacacccccuuaccauuggcgagugcccuaaauacgugaagucuaaccgccuggucuuggcaacagggcucagaaauuccccacagggagagaggcggcgcaagaaacgaggccuguucggugccaucgcuggguuuaucgaaggaggcuggcagggcaugguugacgggugguauggauaccaucacagcaacgagcaagguucgggcuaugccgcagacaaggaaucuacccagaaagcuauugauggggugacgaacaagguaaauuccaucauugacaaaaugaacacucaguucgaggccgugggaagagaauuuaauaacuuagagaggcggauagagaaucugaacaagaagauggaagauggcuuccucgacgucuggacauacaaugcggagcuucugguguugauggaaaacgagcguacccuagauuuccacgacucaaauguuaaaaaccuguaugauaaggugcgccuccaacugagagacaaugccaaagaacuugguaacggguguuuugaguucuaccauaggugcgauaaugaguguauggaaaguguccggaacggcacuuacgacuauccccaguacagcgaggaagcacgacugaagcgcgaggagaucuccggagugaaauuggaaucuauuggcacauaucagauccucagcaucuacucaaccguagcuaguucccuggccuuagcuauuaugguugccgggcuguuucuauggaugugcagcaauggaucucuccagugcagaauauguaucuga

SEQ ID NO: 131034 - RNA, 1704 nt, Artificial Sequence
  derived and/or modified CDS sequence (opt3) from hemagglutinin__InfluenzaA__ACT15320
auggagaagaucgugcugcuccuugccauugucagccugguuaaauccgaccagauaugcaucggcuaccacgcuaacaauucuaccgaacaaguggauacaauuauggagaagaacguaacugugacgcaugcacaggacaucuuggaaaagacccacaaugggaaauuauguaaccuggauggagucaaaccccuaauucucagagacugcucaguggccgguuggcugcuuggcaauccuaugugugaugaguuccugaacguuccagaauggaguuauaucguggagaagauaaauccggcgaacgacuugugcuaccccgggaauuuuaacgauuaugaggaacucaagcaucugcugagcaggaucaaucacuucgagaaaauucagaucauuccuaagaacuccuggucugaccaugaggcuucgggaaugucaagcgccuguccauaccagggccggaguuccuuuuuccgcaaugucguguggcucacuaaaaaggauaacgcauaucccacaaucaaacgaucuuacaauaacaccaaccaagaagacuuacugguacuuugggguauacaccacccuaaugaugccgcugagcagacacguuuguaucagaacccaaccacuuacauuagcguugggacauccacccugaaucagaggcuagugcccaagaucgcaacgagaucaaaggucaacggacaaaguggccggauggaauuuuucuggacuauucucaaaagcaaugacgccaucaacuuugagucuaauggcaacuucaucgcuccugaaaaugccuacaagauugugaaaaagggggauuccaccauaaugaaaucagagcuggaauauggaaacugcaauacaaagugucagacuccaaucggugcgauuaacagcaguaugccguuucauaauauccacccccuuaccauaggcgagugcccuaaauacgugaagucuaaccgccuggucuuggcaacagggcucagaaauuccccacagggagagaggcggcgcaagaaacgaggccuguucggugccauugcuggguuuaucgaaggaggcuggcagggcaugguugacgggugguauggauaccaucacagcaacgagcaagguucgggcuaugccgcagacaaggaaucuacccagaaagcuaucgauggggugacgaacaagguaaauuccauuaucgacaaaaugaacacucaguucgaggccgugggaagagaauuuaauaacuuagagaggcggauugagaaucugaacaagaagauggaagauggcuuccucgacgucuggacauacaaugcggagcuucugguguugauggaaaacgagcguacccuagauuuccacgacucaaauguuaaaaaccuguaugauaaggugcgccuccaacugagagacaaugccaaagaacuugguaacggguguuuugaguucuaccauaggugcgauaaugaguguauggaaaguguccggaacggcacuuacgacuauccccaguacagcgaggaagcacgacugaagcgcgaggagauauccggagugaaauuggaaucuaucggcacauaucagauucucagcaucuacucaaccguagcuaguucccuggccuuagcuaucaugguugccgggcuguuucuauggaugugcagcaauggaucucuccagugcagaauuuguauauga

SEQ ID NO: 131035 - RNA, 1704 nt, Artificial Sequence
  derived and/or modified CDS sequence (opt3) from hemagglutinin__InfluenzaA__ACT15322
auggagaagaucgugcugcuccuugccauugucagccugguuaaauccgaccagauaugcaucggcuaccacgcuaacaauucuaccgaacaaguggauacaauuauggagaagaacguaacugugacgcaugcacaggacaucuuggaaaagacccacaaugggaaauuauguaaccuggauggagucaaaccccuaauucucagagacugcucaguggccgguuggcugcuuggcaauccuaugugugaugaguuccugaacguuccagaauggaguuauaucguggagaagauaaauccggcgaacgacuugugcuaccccgggaauuuuaacgauuaugaggaacucaagcaucugcugagcaggaucaaucacuucgagaaaauucagaucauuccuaagaacuccuggucugaccaugaggcuucgggagucucaagcgccuguccauaccagggccggaguuccuuuuuccgcaaugugguauggcucacuaaaaaggauaacgcauaucccacaaucaaacgaucuuacaauaacaccaaccaagaagacuuacugguucuuugggguauacaccacccuaaugaugccgcugagcagacacguuuguaucagaacccaaccacuuacauuagcguggggacauccacccugaaucagaggcuaguccccaagaucgcaacgagaucaaaggugaacggacaaaguggccggauggaauuuuucuggacuauucucaaaagcaaugacgccaucaacuuugagucuaauggcaacuucaucgcuccugaaaaugccuacaagauugugaaaaagggggauuccaccauaaugaaaucagagcuggaauauggaaacugcaauacaaagugucagacuccaaucggugcgauuaacagcaguaugccguuucauaauauccacccccuuaccauaggcgagugcccuaaauacgucaagucuaaccgccugguuuuggcaacagggcucagaaauuccccacagggagagaggcggcgcaagaaacgaggccuguucggugccauugcuggguuuaucgaaggaggcuggcagggcaugguggacgggugguauggauaccaucacagcaacgagcaagguucgggcuaugccgcagacaaggaaucuacccagaaagcuaucgaugggguaacgaacaaggucaauuccauuaucgacaaaaugaacacucaguucgaggccgugggaagagaauuuaauaacuuagagucaaggauugagaaucugaacaagaagauggaagauggcuuccucgacguguggacauacaaugcggagcuucugguuuugauggaaaacgagcggacccuagauuuccacgacaguaaugugaaaaaccuguaugauaagguccgucuccaacugcgcgacaaugccaaagaacuugguaacggguguuuugaguucuaccauagaugcgauaaugaguguauggaaagcgugaggaacggcacuuacgacuauccccaguacuccgaggaagcacggcugaagcgagaggagauaucuggaguaaaauuggaaagcaucggcacauaucagauucucucaaucuacaguaccguugcuuccagccuggccuuagcuaucaugguggccgggcuguuucuauggaugugcucuaauggaucacuccagugccgcauuuguauauga

SEQ ID NO: 131036 - RNA, 1704 nt, Artificial Sequence
  derived and/or modified CDS sequence (opt3) from hemagglutinin__InfluenzaA__ACT15326
auggagaagaucgugcugcuccuugccauugucagccugguuaaauccgaccagauaugcaucggcuaccacgcuaacaauucuaccgaacaaguggauacaauuauggagaagaacguaacugugacgcaugcacaggacaucuuggaaaagacccacaaugggaaauuauguaaccuggauggagucaaaccccuaauucucagagacugcucaguggccgguuggcugcuuggcaauccuaugugugaugaguuccugaacguuccagaauggaguuauaucguggagaagauaaauccggcgaacgacuugugcuaccccgggaauuuuaacgauuaugaggaacucaagcaucugcugagcaggaucaaucacuucgagaaaauucagaucauuccuaagaacuccuggucugaccaugaggcuucgggagucucaagcgccuguccauaccagggccggaguuccuuuuuccgcaaugugguauggcucacuaaaaaggauaacgcauaucccacaaucaaacgaucuuacaauaacaccaaccaagaagacuuacugguucuuugggguauacaccacccuaaugaugccgcugagcagacacguuuguaucagaacccaaccacuuacauuagcguggggacauccacccugaaucagagacuaauccccaagauugcaacgaggucaaaggucaacggacaaaguggccggauggaauuuuucuggacuauccucaaaccuaaugacgccaucaacuuugagagcaauggcaacuucauugcuccagaaaaugccuacaagauagugaaaaagggggauucuaccaucaugaaauccgagcuggaauauggaaacugcaauacaaagugucagacuccgauuggugcgaucaacucaagcaugcccuuucauaauauacacccucuuaccauuggcgagugcccaaaauacgugaagaguaaccgccuggucuuggcaacagggcucagaaauucuccccagggagagaggcggcgcaagaaacgaggccuguucggugccaucgcuggguuuaucgaaggaggcuggcagggcaugguugacgggugguauggauaccaucacuccaacgagcaagguagcggcuaugccgcagacaaggaaucgacccagaaagcuauugauggggugacgaacaagguaaauucuaucauugacaaaaugaacacucaguucgaggccgugggaagagaauuuaauaacuuagagaggcggauagagaaucugaacaagaagauggaagauggcuuccucgacgucuggacauacaaugcggagcuucugguguugauggaaaacgagcguacccuagauuuccacgacuccaauguuaaaaaccuguaugauaaggugcgccuccaacugagagacaaugccaaagaacuugguaacggguguuuugaguucuaccauaggugcgauaaugaguguauggaaucaguccggaacggcacuuacgacuauccucaguacagugaggaagcacgacugaagcgcgaggagaucagcggagugaaauuggaauccauuggcacauaucagauccucucuaucuacagcaccguagcuucaagucuggccuuagcuauuaugguugccgggcuguuucuauggaugugcuccaauggaagccuccagugcagaauauguaucuga

SEQ ID NO: 131037 - RNA, 1704 nt, Artificial Sequence
  derived and/or modified CDS sequence (opt3) from hemagglutinin__InfluenzaA__ACT15328
auggagaagaucgugcugcuccuugccauugucagccugguuaaauccgaccagauaugcaucggcuaccacgcuaacaauucuaccgaacaaguggauacaauuauggagaagaacguaacugugacgcaugcacaggacaucuuggaaaagacccacaaugggaaauuauguaaccuggauggagucaaaccccuaauucucagagacugcucaguggccgguuggcugcuuggcaauccuaugugugaugaguuccugaacguuccagaauggaguuauaucguggagaagauaaauccggcgaacgacuugugcuaccccgggaauuuuaacgauuaugaggaacucaagcaucugcugagcaggaucaaucacuucgagaaaauucagaucauuccuaagaacuccuggucugaccaugaggcuucgggagucucaagcgccuguccauaccagggccggaguuccuuuuuccgcaaugugguauggcucacuaaaaaggauaacgcauaucccacaaucaaacgaucuuacaauaacaccaaccaagaagacuuacugguucuuugggguauacaccacccuaaugaugccgcugagcagacacguuuguaucagaacccaaccacuuacauuagcguggggacauccacccugaaucagaggcuaguccccaagaucgcaacgagaucaaaggugaacggacaaaauggccggauggaauuuuucuggacuauucucaaaaguaacgacgccaucaauuuugagagcaacggcaauuucaucgcuccugaaaacgccuacaagauugugaaaaagggggauucuaccauaaugaaauccgagcuggaauauggaaauugcaacacaaagugucagacuccaaucggugcgauuaauucaagcaugccguuucauaacauccacccccuuaccauaggcgagugcccuaaauacgucaagaguaaucgccugguuuuggcaacagggcucagaaacucuccacagggagagaggcggcgcaagaaacgaggccuguucggugccauugcuggguuuaucgaaggaggcuggcagggcaugguggacgggugguauggauaccaucacuccaacgagcaagguagcggcuaugccgcagacaaggaaucgacccagaaagcuaucgaugggguaacgaauaaggugaacucuauuaucgacaaaaugaauacucaguucgaggccgucggaagagaauuuaacaauuuagagaggcggauugagaaccugaauaagaagauggaagauggcuuccucgacguguggacauacaacgcggagcuucugguuuugauggaaaaugagcguacccuagauuuccacgacuccaacgugaaaaaucuguaugauaagguccgccuccaacugagagacaacgccaaagaacuugguaauggguguuuugaguucuaccauaggugcgauaacgaguguauggaaucagugcggaauggcacuuacgacuauccccacuacagugaggaagcacgacugaagcgcgaggagauaagcggaguaaaauuggaauccaucggcacauaucagauucucucuaucuacagcaccguugcuucaagucuggccuuagcuaucaugguggccgggcuguuucuauggaugugcuccaacggaagccuccagugcagaauuuguauauga

SEQ ID NO: 131038 - RNA, 1704 nt, Artificial Sequence
  derived and/or modified CDS sequence (opt3) from hemagglutinin__InfluenzaA__ACT15330
auggagaagaucgugcugcuccuugccauugucagccugguuaaauccgaccagauaugcaucggcuaccacgcuaacaauucuaccgaacaaguggauacaauuauggagaagaacguaacugugacgcaugcacaggacaucuuggaaaagacccacaaugggaaauuauguaaccuggauggagucaaaccccuaauucucagagacugcucaguggccgguuggcugcuuggcaauccuaugugugaugaguuccugaacguuccagaauggaguuauaucguggagaagauaaauccggcgaacgacuugugcuaccccgggaauuuuaacgauuaugaggaacucaagcaucugcugagcaggaucaaucacuucgagaaaauucagaucauuccuaagaacuccuggucugaccaugaggcuucgggagucucaagcgccuguccauaccagggccggaguuccuuuuuccgcaaugugguauggcucacuaaaaaggauaacgcauaucccacaaucaaacgaucuuacaauaacaccaaccaagaagacuuacugguucuuugggguauacaccacccuaaugaugccgcugagcagacacguuuguaucagaacccaaccacuuacauuagcguggggacauccacccugaaucagaggcuaguccccaagaucgcaacgagaucaaaggugaacggacaaaguggccggauggaauuuuucuggacuauucucaaaagcaaugacgccaucaacuuugagucuaauggcaacuucaucgcuccugaaaaugccuacaagauugugaaaaagggggauuccaccauaaugaaaucagagcuggaauauggaaacugcaauacaaagugucagacuccaaucggugcgauuaacagcaguaugccguuucauaauauccacccccuuaccauaggcgagugcccuaaauacgucaagucuaaccgccugguuuuggcaacagggcucagaaauuccccacagggagagaggcggcgcaagaaacgaggccuguucggugccauugcuggguuuaucgaaggaggcuggcagggcaugguggacgggugguauggauaccaucacagcaacgagcaagguucgggcuaugccgcagacaaggaaucuacccagaaagcuaucgaugggguaacgaacaaggucaauuccauuaucgacaaaaugaacacucaguucgaggccgugggaagagaauuuaauaacuuagagaggcggauugagaaucugaacaagaagauggaagauggcuuccucgacguguggacauacaaugcggagcuucugguuuugauggaaaacgagcguacccuagauuuccacgacucaaaugugaaaaaccuguaugauaagguccgccuccaacugagagacaaugccaaagaacuugguaacggguguuuugaguucuaccauaggugcgauaaugaguguauggaaagugugcggaacggcacuuacgacuauccccacuacagcgaggaagcacgacugaagcgcgaggagauauccggaguaaaauuggaaucuaucggcacauaucagauucucagcaucuacucaaccguugcuaguucccuggccuuagcuaucaugguggccgggcuguuucuauggaugugcagcaauggaucucuccagugcagaauuuguauauga

SEQ ID NO: 131039 - RNA, 1707 nt, Artificial Sequence
  derived and/or modified CDS sequence (opt3) from hemagglutinin__InfluenzaA__ACT15332
auggagaagaucgugcugcuccuugccauugucagccugguuaaauccgaccagauaugcaucggcuaccacgcuaacaauucuaccgaacaaguggauacaauuauggagaagaacguaacugugacgcaugcacaggacaucuuggaaaagacccacaaugggaaauuaugugaucuggacggagucaaaccccuaauucucagagauugcucaguggccgguuggcugcuuggcaacccuaugugugacgaguuccugaauguuccagaauggaguuauaucguggagaagauaaacccggcgaaugauuugugcuaccccggggacuuuaacgauuaugaggaacucaagcaucugcugagcaggaucaaucacuucgagaaaauucagaucauuccuaaguccucuuggucggaccaugaagcuaguagcggagucaguuccgccuguccauaccagggccggucuagcuuuuuccgcaacgugguauggcucaucaaaaaggauaaugcauaucccacaauaaaacgauccuacaacaauacuaaccaagaggacuuacugguucuuugggguauucaccacccuaaugaugccgcugagcagacccguuuguaucauaacccaacaaccuacaucucaguggggacuucaacacugaaccagaggcuaguccccaagauugcaaccagaagcaagaucaauggacagucuggccggauggaauuuuucuggacgauccucaaaccuaacgacgccauuaauuuugaguccaacggcaauuucauagcuccagaaaacgccuacaagaucgugaaaaagggggacucaacuauuaugaaaagcgagcuggaauauggaaauugcaacaccaagugucaaacaccgaucggugcgauaaauaguucuaugcccuuucacaacauucauccucuuacuaucggcgagugcccaaaauacgugaaguccagccgccuggucuuggcaaccgggcucagaaauucgccccagggaaagucuaggcggaaaaagcgcggccuguucggugccaucgcuggguuuauugagggaggcuggcagggcaugguugaugggugguauggauaccaccacuccaacgaacaggguucaggcuaugccgcagacaaagagaguacacaacgagcuaucgauggggugaccaauaagguaaacagcauuauagacaaaaugaauacgcaguucgaagccgugggaagagaguuuaacaacuuagaaaggcggaucgagaaucugaacaagaagauggaggauggcuuccucgacgucuggacuuacaaugcggaacuucugguguugauggagaacgaacguacacuagauuuccaugacuccaauguuaaaaaccuguaugauaaggugcgccuccagcugagagacaaugccaaagagcuugguaacggguguuuugaguucuaccacaggugcgauaaugaauguauggagucuguccggaacggcaccuacgacuauccucaauacagcgaagaggcacgacugaagcgcgaagagauuucaggagugaaauuggagaguaucggcaucuaucagauucucuccauauacagcacuguagcuucuucacuggccuuagcuaucaugguugccgggcuguuucuauggaugugcaguaauggaagccuccagugcagaauuuguaucuga

SEQ ID NO: 131040 - RNA, 1704 nt, Artificial Sequence
  derived and/or modified CDS sequence (opt3) from hemagglutinin__InfluenzaA__ACT15336
auggagaagaucgugcugcuccuugccauugucagccugguuaaauccgaccagauaugcaucggcuaccacgcuaacaauucuaccgaacaaguggauacaauuauggagaagaacguaacugugacgcaugcacaggacaucuuggaaaagacccacaaugggaaauuauguaaccuggauggagucaaaccccuaauucucagagacugcucaguggccgguuggcugcuuggcaauccuaugugugaugaguuccugaacguuccagaauggaguuauaucguggagaagauaaauccggcgaacgacuugugcuaccccgggaauuuuaacgauuaugaggaacucaagcaucugcugagcaggaucaaucacuucgagaaaauucagaucauuccuaagaacuccuggucugaccaugaggcuucgggagucucaagcgccuguccauaccagggccggaguuccuuuuuccgcaaugugguauggcucacuaaaaaggauaacgcauaucccacaaucaaacgaucuuacaauaacaccaaccaagaagacuuacugguucuuugggguauacaccacccuaaugaugccgcugagcagacacguuuguaucagaacccaaccacuuacauuagcguggggacauccacccugaaucagaggcuaguccccaagaucgcaacgagaucaaaggugaacggacaaaguggccggauggaauuuuucuggacuauucucaaaagcaaugacgccaucaacuuugagucuaauggcaacuucaucgcuccugaaaaugccuacaagauugugaaaaagggggauuccaccauaaugaaaucagagcuggaauauggaaacugcaauacaaagugucagacuccaaucggugcgauuaacagcaguaugccguuucauaauauccacccccuuaccauaggcgagugcccuaaauacgucaagucuaaccgccugguuuuggcaacagggcucagaaauuccccacagggagagaggcggcgcaagaaacgaggccuguucggugccauugcuggguuuaucgaaggaggcuggcagggcaugguggacgggugguauggauaccaucacagcaacgagcaagguucgggcuaugccgcagacaaggaaucuacccagaaagcuaucgaugggguaacgaacaaggucaauuccauuaucgacaaaaugaacacucaguucgaggccgugggaagagaauuuaauaacuuagagaggcggauugagaaucugaacaagaagauggaagauggcuuccucgacguguggacauacaaugcggagcuucugguuuugauggaaaacgagcguacccuagauuuccacgacucaaaugugaaaaaccuguaugauaagguccgccuccaacugagagacaaugccaaagaacuugguaacggguguuuugaguucuaccauaggugcgauaaugaguguauggaaagugugcggaacggcacuuacgacuauccccaguacagcgaggaagcacgacugaagcgcgaggagauauccggaguaaaauuggaaucuaucggcacauaucagauucucagcaucuacucaaccguugcuaguucccuggccuuagcuaucaugguggccgggcuguuucuauggaugugcagcaauggaucucuccagugcagaauuuguauauga

SEQ ID NO: 131041 - RNA, 1704 nt, Artificial Sequence
  derived and/or modified CDS sequence (opt3) from hemagglutinin__InfluenzaA__ACT15338
auggagaagaucgugcugcuccuugccauugucagccugguuaaauccgaccagauaugcaucggcuaccacgcuaacaauucuaccgaacaaguggauacaauuauggagaagaacguaacugugacgcaugcacaggacaucuuggaaaagacccacaaugggaaauuauguaaccuggauggagucaaaccccuaauucucagagacugcucaguggccgguuggcugcuuggcaauccuaugugugaugaguuccugaacguuccagaauggaguuauaucguggagaagauaaauccggcgaacgacuugugcuaccccgggaauuuuaacgauuaugaggaacucaagcaucugcugagcaggaucaaucacuucgagaaaauucagaucauuccuaagaacuccuggucugaccaugaggcuucgggagucucaagcgccuguccauaccagggccggaguuccuuuuuccgcaaugugguauggcucacuaaaaagaacaaugcauaucccacaaucaaacgaucuuacaacaacaccaaucaagaagauuuacugguucuuugggguauacaccacccuaacgacgccacagagcagacccguuuguaucagaauccaacuacauacauuagcguggggaccuccacgcugaaccagagacuaauccccaagauugcuacuaggucaaaggucaauggacaaaguggccggauggaauuuuucuggaccauccucaaaagcaacgaugcaaucaauuuugagucuaacggcaauuucauugccccugaaaacgcuuacaagauagugaaaaagggggacuccacaaucaugaaaucagagcuggaauauggaaauugcaacacuaagugucagaccccaauuggugccaucaauagcaguaugccguuucauaacauacacccccuuacaauuggcgagugcccuaaauacgugaagucuaaucgccuggucuuggcgaccgggcucagaaacuccccacaggagggaaggcggcgcaagaaacgaggccuguucggugcaaucgccggguuuaucgaaggaggcuggcagggcaugguugaugggugguauggauaccaucacagcaacgagcaagguucgggcuaugcugccgacaaggaaucuacgcagaaagcaauugacggggugacuaauaagguaaacuccaucauugauaaaaugaauacacaguucgaggcugugggaagagaauuuaacaauuuagagaggcggauagagaaccugaauaagaagauggaagacggcuuccucgaugucuggaccuacaacgccgagcuucugguguugauggaaaaugagcguacucuagacuuccacgauucaaacguuaaaaaucuguaugacaaggugcgccuccaacugagagauaacgcgaaagaacuugguaauggguguuuugaguucuaccauaggugcgacaacgaguguauggaaaguguccggaauggcacauacgauuauccccaguacagcgaggaagcccgacugaagcgcgaggagaucuccggagugaaauuggaaucuauuggcaccuaucagauccucagcaucuacucaacgguagcaaguucccuggcuuuagccauuaugguugcugggcuguuucuauggaugugcagcaacggaucucuccagugcagaauauguaucuga

SEQ ID NO: 131042 - RNA, 1704 nt, Artificial Sequence
  derived and/or modified CDS sequence (opt3) from hemagglutinin__InfluenzaA__ACT15340
auggagaagaucgugcugcuccuugccauugucagccugguuaaauccgaccagauaugcaucggcuaccacgcuaacaauucuaccgaacaaguggauacaauuauggagaagaacguaacugugacgcaugcacaggacaucuuggaaaagacccacaaugggaaauuauguaaccuggauggagucaaaccccuaauucucagagacugcucaguggccgguuggcugcuuggcaauccuaugugugaugaguuccugaacguuccagaauggaguuauaucguggagaagauaaauccggcgaacgacuugugcuaccccgggaauuuuaacgauuaugaggaacucaagcaucugcugagcaggaucaaucacuucgagaaaauucagaucauuccuaagaacuccuggucugaccaugaggcuucgggagucucaagcgccuguccauaccagggccggaguuccuuuuuccgcaaugugguauggcucacuaaaaagaacaaugcauaucccacaaucaaacgaucuuacaacaacaccaaucaagaagauuuacugguucuuugggguauacaccacccuaacgacgccgaggaacagacacguuuguaucagaauccaaccacuuacauuagcguggggacauccacccugaaccagaggcuaguccccaagaucgcuacgagaucaaaggugaauggacaaaguggccggauggaguuuuucuggacuauucucaaaagcaacgaugcaaucaauuuugaaucuaacggcaauuucaucgccccugagaacgcuuacaagauugugaaaaagggggacuccaccauaaugaaaucagaacuggaguauggaaauugcaacacaaagugucagacuccaaucggugccauuaauagcaguaugccguuucauaacauccacccccuuaccauaggcgagugcccuaaauacgucaagucuaaucgccugguuuuggcgacagggcucagaaacuccccacagggagaaaggcggcgcaagaaacgaggccuguucggugcaauugccggguuuaucgagggaggcuggcagggcaugguggaugggugguauggauaccaucacagcaacgaacaagguucgggcuaugcugccgacaaggagucuacccagaaagcaaucgacgggguaacgaauaaggugaacuccauuaucgauaaaaugaauacucaguucgaagcugucggaagagaguuuaacgccuuagagaggcggauugaaaaucugaacaagaagauggaggacggcuuccucgauguguggacauacaaugcggaacuucugguuuugauggagaacgaacguacccuagacuuccacgauucaaaugugaaaaaccuguaugacaagguccgccuccaacugagagauaaugccaaagagcuugguaacggguguuuugaguucuaccauaggugcgacaaugaauguauggagagugugcggaacggcacuuacgauuauccccaguacagcgaagaggcacgacugaagcgcgaggaaauauccggaguaaaauuggagucuaucggcacauaucagauucucagcaucuacucaaccguugcuaguucccuggccuuagcuaucaugguggccgggcuguuucuauggaugugcagcaauggaucucuccagugcagaauuuguauauga

SEQ ID NO: 131043 - RNA, 1704 nt, Artificial Sequence
  derived and/or modified CDS sequence (opt3) from hemagglutinin__InfluenzaA__ACT15342
auggagaagaucgugcugcuccuugccauugucagccugguuaaauccgaccagauaugcaucggcuaccacgcuaacaauucuaccgaacaaguggauacaauuauggagaagaacguaacugugacgcaugcacaggacaucuuggaaaagacccacaaugggaaguuauguaaccuggauggagucaaaccccuaauucucagagacugcucaguggccgguuggcugcuuggcaauccuaugugugaugaguuccugaacguuccagaauggaguuauaucguggagaagauaaauccggcgaacgacuugugcuaccccgggagcuuuaaugauuaugaggaacucaagcaucugcuguccaggaucaaccacuucgagaaaauucagaucauuccuaaaaauucuuggucggaccaugaggcuucaggagucagcagugccuguccauaccagggccgguccuccuuuuuccgcaacgugguauggcucacuaaaaaggauaaugcauaucccacaaucaaacgaagcuacaacaauaccaaccaagaagacuuacugguucuuugggguauacaccacccuaacgaugccgcugagcagacacguuuguaucagaauccaaccacuuacauuuccguggggacaucaacccugaaccagaggcuaguccccaagaucgcaacgagaaguaaggugaauggacaaagcggccggauggaauuuuucuggacuauucucaaaccuaacgacgccaucaauuuugagucuaacggcaauuucaucgcuccagaaaacgccuacaagauugugaaaaagggggauuccaccauaaugaaaucagagcuggaauauggaaauugcaacacaaagugucagacuccgaucggugcgauuaauagcaguaugcccuuucauaacauccacccucuuaccauaggcgagugcccaaaauacgucaagucuaaucgccugauuuuggcaacagggcucagaaacucuccccagggagagaggcggcgcaagaaacgaggccuguucggugccaucgcuggguuuaucgaaggaggcuggcagggcaugguugacgggugguauggauaccaucacagcaaugagcaagguucgggcuaugccgcagacaaggaaucuacccagaaagcuauugauggggugacgaacaagguaaacuccaucauugacaaaaugaauacucaguucgaggccgugggaagagaauuuaacaauuuagagaggcggauagagaaccugaauaagaagauggaagauggcuuccucgacgucuggacauacaacgcggagcuucugguguugauggaaaaugagcguacccuagauuuccacgacucaaacguuaaaaaucuguaugauaaggugcgccuccaacugagagacaacgccaaagaacuugguaauggguguuuugaguucuaccauaggugcgauaacgaguguauggaaaguguccggaauggcacuuacgacuauccucaguacagcgaggaagcacgacugaagcgcgaggagaucuccggagugaaauuggaaucuauuggcacauaucagauccucagcaucuacucaaccguagcuaguucccuggccuuagcuauuaugguugccgggcuguuucuauggaugugcagcaacggaucucuccagugcagaauauguaucuga

SEQ ID NO: 131044 - RNA, 1704 nt, Artificial Sequence; identical to SEQ ID NO: 131040
  derived and/or modified CDS sequence (opt3) from hemagglutinin__InfluenzaA__ACT15343

SEQ ID NO: 131045 - RNA, 1704 nt, Artificial Sequence
  derived and/or modified CDS sequence (opt3) from hemagglutinin__InfluenzaA__ACT15345
auggagaagaucgugcugcuccuugccauugucagccugguuaaauccgaccagauaugcaucggcuaccacgcuaacaauucuaccgaacaaguggauacaauuauggagaagaacguaacugugacgcaugcacaggacaucuuggaaaagacccacaaugggaaauuauguaaccuggauggagucaaaccccuaauucucagagacugcucaguggccgguuggcugcuuggcaauccuaugugugaugaguuccugaacguuccagaauggaguuauaucguggagaagauaaauccggcgaacgacuugugcuaccccgggaauuuuaacgauuaugaggaacucaagcaucugcugagcaggaucaaucacuucgagaaaauucagaucauuccuaagaacuccuggucugaccaugaggcuucgggagucucaagcaguuguccauaccagggccgguccucuuucuuccgcaaugugguauggcucacuaaaaaggauaacgccuaucccacaaucaaacgaagcuacaauaacaccaaccaagaagacuuacugguucuuugggguauacaccacccuaaugaugcagccgagcagacacguuuguaucagaacccaaccacuuacauuuccguggggacaucaacccugaaucagaggcuaguccccaagaucgcuacgagaaguaaggugaacggacaaagcggccggauggaauuuuucuggacuauucucaaaucuaaugacgcaaucaacuuuggcuccaaugggaacuucaucgccccugagaaugcuuacaagauugugaaaaagggagauucaaccauaaugaaaagcgaacuggaguaugguaacugcaauacaaagugucagacuccaaucggcgccauuaacaguucuaugccguuucauaauauccacccccuuaccauaggggaaugcccuaaauacgucaaguccaaccgccugguuuuggcgacaggacucagaaauagcccacagggcgagaggcggcgcaagaaacgaggucuguucggggcaauugccggauuuaucgagggcggcuggcaggggaugguggacggaugguaugguuaccaucacucgaacgaacaaggcucuggguaugcugccgacaaggaguccacccagaaagcaaucgauggaguaacgaacaaggucaauucaauuaucgacaaaaugaacacucaguucgaagcugugggcagagaguuuaauaacuuagaaaggcggauugagaaucugaacaagaagauggaggaugguuuccucgacguguggacauacaaugccgaacuucugguuuugauggagaacgaacguacccuagauuuccacgacaguaaugugaaaaaccuguaugauaagguccgccuccaacugagagacaaugcgaaagagcuugggaacggcuguuuugaauuuuaccauaggugcgauaaugaguguauggagagcgugcggaacggaacuuacgacuauccccaguacuccgaagaggcccgacugaagcgcgaagagauaucuggcguaaaauuggagagcaucgggacauaucagauucucucaaucuacaguaccguugcauccagccuggcuuuagccaucaugguggcuggacuguuucuauggaugugcucuaaugguucacuccagugcagaauuuguauauga

SEQ ID NO: 131046 - RNA, 1707 nt, Artificial Sequence
  derived and/or modified CDS sequence (opt3) from hemagglutinin__InfluenzaA__ACT15347
auggagaagaucgugcugcuccuugccauugucagccugguuaaauccgaccagauaugcaucggcuaccacgcuaacaauucuaccgaacaaguggauacaauuauggagaagaacguaacugugacgcaugcacaggacaucuuggaaaagacccacaaugggaaauuaugugaucuggacggagucaaaccccuaauucucagagauugcucaguggccgguuggcugcuuggcaacccuaugugugacgaguuccugaauguuccagaauggaguuauaucguggagaagauaaacccggcgaaugauuugugcuaccccggggacuuuaacgauuaugaggaacucaagcaucugcugagcaggaucaaucacuucgagaaaauucagaucauuccuaaguccucuuggucggaccaugaagcuaguagcggagucaguuccgccuguccauaccagggccggucuagcuuuuuccgcaacgugguauggcucaucaaaaaggauaaugcauaucccacaauaaaacgauccuacaacaauacuaaccaagaggacuuacugguucuuugggguauucaccacccuaaugaugccgcugagcagacccguuuguaucauaacccaacaaccuacaucucaguggggacuucaacacugaaccagaggcuaguccccaagauugcaaccagaagcaaggugaauggacagucuggccggauggaauuuuucuggacgauccucaaaccuaacgacgccaucaauuuugaguccaacggcaauuucauugcuccagaaaacgccuacaagauagugaaaaagggggacucaacuaucaugaaaagcgagcuggaauauggaaauugcaacaccaagugucaaacaccgauuggugcgaucaauaguucuaugcccuuucacaacauacauccucuuacuauuggcgagugcccaaaauacgucaaguccagccgccugguuuuggcaaccgggcucagaaauucgccccagggaaagaacaggcggaaaaagcgcggccuguucggugccaucgcuggguuuaucgagggaggcuggcagggcaugguggaugggugguauggauaccaccacucuaaugaacaggguuccggcuaugccgcagacaaagagucaacacaacgagcuauugaugggguaaccaacaaggugaauaguaucauugacaaaaugaacacgcaguucgaagccgucggaagagaguuuaacaauuuagaaaggcggauagagaaccugaauaagaagauggaggauggcuuccucgacguguggacuuacaacgcggaacuucugguuuugauggagaaugaacguacacuagauuuccaugacagcaacgugaaaaaucuguaugauaagguccgccuccagcugagagacaacgccaaagagcuugguaauggguguuuugaguucuaccacaggugcgauaacgaauguauggaguccgugcggaauggcaccuacgacuauccucaauacucugaagaggcacgacugaagcgcgaagagaucagcggaguaaaauuggagucaauuggcaucuaucagauccucaguauuuacuccacuguugcuagcucucuggccuuagcuauaaugguggccgggcuguuucuauggaugugcucaaacggaagucuccagugcagaaucuguauuuga

SEQ ID NO: 131047 - RNA, 1704 nt, Artificial Sequence
  derived and/or modified CDS sequence (opt3) from hemagglutinin__InfluenzaA__ACT15349
auggagaagaucgugcugcuccuugccauugucagccugguuaaauccgaccagauaugcaucggcuaccacgcuaacaauucuaccgaacaaguggauacaauuauggagaagaacguaacugugacgcaugcacaggacaucuuggagaaaacccacaaugggaaguuauguaaccuggauggagucaaaccccuaauucucagagacugcucaguggccgguuggcugcuuggcaauccuaugugugaugaguuccugaacguuccagaauggaguuauaucguggagaagauaaauccggcgaacgacuugugcuaccccgggaauuuuaacgauuaugaggaacucaagcaucugcugagcaggaucaaucacuucgagaaaauucagaucauuccuaagaacuccuggucugaccaugaggcuucgggagucucaagcgccuguccauaccagggccggaguuccuuuuuccgcaaugugguauggcucacuaaaaaggauaacgcauaucccacaaucaaacgaucuuacaauaacaccaaccaagaagacuuacugguucuuugggguauacaccacccuaaugaugccacagagcagacccguuuguaucagaacccaacuacauacauuagcguggggaccuccacgcugaaucagagacuaauccccaagauugcuacuaggucaaaggucaacggacaaaguggccggauggaauuuuucuggaccauccucaaaagcaaugacgcaaucaacuuugagucuaauggcaacuucauugccccugaaaaugcuuacaagauagugaaaaagggggauuccacaaucaugaaaucagagcuggaauauggaaacugcaauacuaagugucagaccccaauuggugccaucaacagcaguaugccguuucauaauauacacccccuuacaauuggcgagugcccuaaauacgugaagucuaaccgccuggucuuggcgaccgggcucagaaauuccccacaggaggaaaggcggcgcaagaaacgaggacuguucggcgcaaucgccgguuuuaucgaagggggauggcagggcaugguugacggcugguauggguaccaucacagcaacgaacaaggaucggguuaugcugccgacaaggagucuacgcagaaagcaauugauggcgugacuaacaagguaaauuccaucauugacaaaaugaacacacaguucgaagcuguggggagagaguuuaauaacuuagagaggcggauagaaaaucugaacaagaagauggaggauggauuccucgacgucuggaccuacaaugccgaacuucugguguugauggagaacgaacguacucuagauuuccacgacucaaauguuaaaaaccuguaugauaaggugcgccuccaacugagagacaaugcgaaagagcuuggcaacgguuguuuugaguucuaccauaggugcgauaaugaauguauggagaguguccggaacgggacauacgacuauccccaguacagcgaagaggcccgacugaagcgcgaggaaaucuccggcgugaaauuggagucuauuggaaccuaucagauccucagcaucuacucaacgguagcaaguucccuggcuuuagccauuaugguugcuggccuguuucuauggaugugcagcaaugggucucuccagugcagaauauguaucuga

SEQ ID NO: 131048 - RNA, 1707 nt, Artificial Sequence
  derived and/or modified CDS sequence (opt3) from hemagglutinin__InfluenzaA__ACT15351
auggagaagaucgugcugcuccuugccauugucagccugguuaaauccgaccagauaugcaucggcuaccacgcuaacaauucuaccgaacaaguggauacaauuauggagaagaacguaacugugacgcaugcacaggacaucuuggaaaagacccacaaugggaaauuaugugaucuggacggagucaaaccccuaauucucagagauugcucaguggccgguuggcugcuuggcaacccuaugugugacgaguuccugaauguuccagaauggaguuauaucguggagaagauaaacccggcgaaugauuugugcuaccccggggacuuuaacgauuaugaggaacucaagcaucugcugagcaggaucaaucacuucgagaaaauucagaucauuccuaaguccucuuggucggaccaugaagcuaguagcggagucaguuccgccuguccauaccagggcgguucuagcuuuuuccggaacgugguauggcucaucaaaaaggauaaugcauaucccacaauaaaacgcuccuacaacaauacuaaccaagaggacuuacugguucuuugggggauucaccacccuaaugaugccgcugagcagacccgauuguaucauaacccaacaaccuacaucucagugggaacuucaacacugaaccagcgucuaguccccaagauugcaaccagaagcaaggugaauggccagucuggcaggauggaauuuuucuggacgauccucaaaccuaacgacgccaucaauuuugaguccaacgggaauuucauugcuccagaaaacgccuacaagauagugaaaaagggagacucaacuaucaugaaaagcgagcuggaauaugguaauugcaacaccaagugucaaacaccgauuggcgcgaucaauaguucuaugcccuuucacaacauacauccucuuacuauuggggagugcccaaaauacgucaaguccagccggcugguuuuggcaaccggacuccgcaauucgccccagggcaagucuagaaggaaaaagcggggucuguucggggccaucgcuggauuuaucgagggcggcuggcaggggaugguggauggaugguaugguuaccaccacuccaacgaacagggcucaggguaugccgcagacaaagagaguacacaacgcgcuauugauggaguaaccaauaaggugaacagcaucauugacaaaaugaauacgcaguucgaagccgucggccgagaguuuaacaaguuagaaagaaggauagagaaccugaauaagaaaauggaggaugguuuccucgacguguggacuuacaacgcggaacuucugguuuugauggagaaugaacggacacuagauuuccaugacuccaacgugaagaaucuguaugauaaaguccgucuccagcugcgcgacaacgccaaggagcuugggaauggcuguuuugaguucuaccacagaugcgauaacgaauguauggagucugugaggaauggaaccuacgacuauccucaauacagcgaagaggcacggcugaaacgagaagagaucucaggcguaaaguuggagaguauugggaucuaucagauccucuccauuuacagcacuguugcuucuucacuggccuuagcuauaaugguggccggacuguuucuauggaugugcaguaacgguagccuccagugccgcaucuguauuuga

SEQ ID NO: 131049 - RNA, 1704 nt, Artificial Sequence
  derived and/or modified CDS sequence (opt3) from hemagglutinin__InfluenzaA__ACT15353
auggagaagaucgugcugcuccuugccauugucagccugguuaaauccgaccagauaugcaucggcuaccacgcuaacaauucuaccgaacaaguggauacaauuauggagaagaacguaacugugacgcaugcacaggacaucuuggaaaagacccacaaugggaaauuauguaaccuggauggagucaaaccccuaauucucagagacugcucaguggccgguuggcugcuuggcaauccuaugugugaugaguuccugaacguuccagaauggaguuauaucguggagaagauaaauccggcgaacgacuugugcuaccccgggaauuuuaacgauuaugaggaacucaagcaucugcugagcaggaucaaucacuucgagaaaauucagaucauuccuaagaacuccuggucugaccaugaggcuucgggagucucaagcgccuguccauaccagggccggaguuccuuuuuccgcaaugugguauggcucacuaaaaagaacucugcauaucccacaaucaaacgaagcuacaauaacaccaaccaagaagauuuacugguucuuugggguauacaccacccuaaugacgccgcugagcagacacguuuguaucagaacccaaccacuuacauuuccguggggacaucaacccugaaucagaggcuaguccccaagaucgcaacgagaaguaaggugaacggacaaagcggccggauggaauuuuucuggacuauucucaaaucuaaugaugccaucaacuuugaguccaauggcaacuucaucgcuccugaaaaugccuacaagauugugaaaaagggggacucaaccauaaugaaaagcgagcuggaauauaguaacugcaauacaaagugucagacuccaaucggagcgauuaacucuuccaugccguuucauaauauccacccccuuaccauaggugagugcccuaaauacgucaagagcaaccgccugguuuuggcaacaggccucagaaauucgccacagggggagaggcggcgcaagaaacgaggacuguucggcgccauugcugguuuuaucgaagggggauggcagggcaugguggauggcugguauggguaccaucacucuaacgagcaaggauccgguuaugccgcagacaaggaaucaacccagaaagcuaucgacggcguaacgaacaaggugaauaguauuaucgauaaaaugaacacucaguucgaggccgucgggagagaauuuaauaacuuagagaggcggauugagaaucugaacaagaagauggaagacggauuccucgauguguggacauacaaugcggagcuucugguuuugauggaaaacgagcguacccuagacuuccacgauagcaaugugaaaaaccuguaugacaagguccgccuccaacugagagauaaugccaaagaacuuggcaacgguuguuuugaguucuaccauaggugcgacaaugaguguauggaauccgugcggaacgggacuuacgauuauccccaguacucugaggaagcacgacugaagcgcgaggagauaagcggcguaaaauuggaaucaaucggaacauaucagauucucaguaucuacuccaccguugcuagcucucuggccuuagcuaucaugguggccggccuguuucuauggaugugcucaaaugggagucuccagugcagaauuuguauauga

SEQ ID NO: 131050 - RNA, 1707 nt, Artificial Sequence
  derived and/or modified CDS sequence (opt3) from hemagglutinin__InfluenzaA__ACT15355
auggagaagaucgugcugcuccuugccauugucagccugguuaaauccgaccagauaugcaucggcuaccacgcuaacaauucuaccgaacaaguggauacaauuauggagaagaacguaacugugacgcaugcacaggacaucuuggaaaagacccacaaugggaaauuaugugaucuggacggagucaaaccccuaauucucagagauugcucaguggccgguuggcugcuuggcaacccuaugugugacgaguuccugaauguuccagaauggaguuauaucguggagaagauaaacccggcgaaugauuugugcuaccccggggacuuuaacgauuaugaggaacucaagcaucugcugagcaggaucaaucacuucgagaaaauucagaucauuccuaaguccucuuggucggaccaugaagcuaguagcggagucaguuccgccuguccauaccagggccggucuagcuuuuuccgcaacgugguauggcucaucaaaaaggauaaugcauaucccacaauaaaacgauccuacaacaauacuaaccaagaggacuuacugguucuuugggguauucaccacccuaaugaugccgcugagcagacccguuuguaucauaacccaacaaccuacaucucaguggggacuucaacacugaaccagaggcuaguccccaagauugcaaccagaagcaaggugaauggacagucuggccggauggaauuuuucuggacgauccucaaaccuaacgacgccaucaauuuugaguccaacggcaauuucauugcuccagaaaacgccuacaagauagugaaaaagggggacucaacuaucaugaaaagcgagcuggaauauggaaauugcaacaccaagugucaaacaccgauuggugcgaucaauaguucuaugcccuuucacaacauacauccucuuacuauuggcgagugcccaaaauacgucaaguccagccgccugguuuuggcaaccgggcucagaaauucgccccagggaaagucuaggcggaaaaagcgcggccuguucggugccaucgcuggguuuaucgagggaggcuggcagggcaugguggaugggugguauggauaccaccacuccaacgaacaggguucaggcuaugccgcagacaaagagaguacacaacgagcuauugaugggguaaccaauaaggugaacagcaucauugacaaaaugaauacgcaguucgaagccgucggaagagaguuuaacaacuuagaaaggcggauagagaaucugaacaagaagauggaggauggcuuccucgacguguggacuuacaaugcggaacuucugguuuugauggagaacgaacguacacuagauuuccaugacuccaaugugaaaaaccuguaugauaagguccgccuccagcugagagacaaugccaaagagcuugguaacggguguuuugaguucuaccacaggugcgauaaugaauguauggagucugugcggaacggcaccuacgacuauccucaauacagcgaagaggcacgacugaagcgcgaagagaucucaggaguaaaauuggagaguauuggcaucuaucagauccucuccauuuacagcacuguugcuucuucacuggccuuagcuauaaugguggccgggcuguuucuauggaugugcaguaauggaagccuccagugcagaaucuguauuuga

SEQ ID NO: 131051 - RNA, 1704 nt, Artificial Sequence
  derived and/or modified CDS sequence (opt3) from hemagglutinin__InfluenzaA__ACT15357
auggagaagaucgugcugcuccuugccauugucagccugguuaaauccgaccagauaugcaucggcuaccacgcuaacaauucuaccgaacaaguggauacaauuauggagagaaacguaacugugacgcaugcacaggacaucuuggaaaagacccacaaugggaaauuauguaaccuggauggagucaagccccuaauucucagggacugcucaguggccgguuggcugcuuggcaauccuaugugugaugaguuccugaacguuccagaauggaguuauaucguggagaaaauaaauccggcgaacgacuugugcuaccccgggaauuuuaacgauuaugaggaacucaagcaucugcugagccggaucaaucacuucgagaagauucagaucauuccuaaaaacuccuggucugaccaugaggcuucgggagucucaagcgccuguccauaccagggccgcaguuccuuuuuccgaaaugugguauggcucacacaaaaggauaacgcauaucccacuaucaaacguucuuacaauaacaccaaccaggaagacuuacugguucuuugggguauacaccacccuaaugaugccgcugagcagacaagauuguaucagaacccaaccacuuacauuagcguggggacauccacccugaaucaaaggcuaauccccaagauugcaacgcggucaaaagucaacggacagaguggccgcauggaauuuuucuggacuauccucaagagcaaugacgccaucaacuuugagucuaauggcaacuucauugcuccugaaaaugccuacaagauagugaaaaagggggauuccaccaucaugaaaucagagcuggaauauggaaacugcaauacaaagugucagacuccaauuggugcgaucaacagcaguaugccguuucauaauauacacccccuuaccauuggcgagugcccuaaauacgugaagucuaacagacuggucuuggcaacagggcuccgaaauuccccacagggagagcggcgcaggaaaaagagaggccuguucggugccaucgcuggguuuaucgaaggaggcuggcaaggcaugguugacgggugguauggauaccaucacagcaacgagcaggguucgggcuaugccgcagacaaggaaucuacccagaaagcuauugauggggugacgaacaagguaaauuccaucauugacaaaaugaacacucaauucgaggccgugggaagggaauuuaauaacuuagagcggcguauagagaaucugaacaagaaaauggaagauggcuuccucgacgucuggacauacaaugcggagcuucugguguugauggaaaacgagcgcacccuagauuuccacgacucaaauguuaagaaccuguaugauaaggugagacuccagcugagggacaaugccaaagaacuugguaacggguguuuugaguucuaccaucggugcgauaaugaguguauggaaaguguccgaaacggcacuuacgacuauccccaguacagcgaggaagcacgccugaagagagaggagaucuccggagugaaauuggaaucuauuggcacauaucagauccucagcaucuacucaaccguagcuaguucccuggccuuagcuauuaugguugccgggcuguuucuauggaugugcagcaauggaucucuccaaugcaggauauguaucuga

SEQ ID NO: 131052 - RNA, 1701 nt, Artificial Sequence
  derived and/or modified CDS sequence (opt3) from hemagglutinin__InfluenzaA__ACT20200
augaaggccauccuggugguccuccuuuacaccuucgcuacagcaaacgccgacacucugugcauuggcuaucacgcgaauaacagcacggauaccguugacacaguguuggagaaaaauguaacugugacccauuccgucaacuuacuggaagauaagcacaaugggaaacuauguaagcucagaggaguggcuccccugcaucuugguaaaugcaacauagccggcuggauccuggggaauccugagugugaaucuuugucaacagcaaguagcugguccuacauuguugagaccucuucgucagacaacggaacuugcuauccaggcgauuuuaucgacuacgaggagcucagggagcagcugagcaguguguccucuuucgaacgguuugagauuuucccgaagacaagcuccuggcccaaucacgauucaaacaagggugucaccgccgcuuguccucaugcaggggccaaaaguuuuuauaagaaucugaucuggcucgugaaaaagggaaacagcuacccaaaauuaucuaaguccuauauaaaugacaagggcaaagaaguacugguucuuuggggcauccaccaccccucaacgagcgcugaucaacagaguuuguaccagaacgccgacgcguacguguucgucgggucuucccgcuauagcaagaaauuuaagccugagauugcaauccgaccaaaagugcgugaucaggagggaagaaugaauuacuauuggacucugguggaacccggugacaagauuaccuucgaggccacaggcaaccuagucguuccuagguacgcuuuugccauggaacggaacgcagggucgggaaucauaauuucugauacuccagugcaugacugcaauaccacaugucaaaccccgaaaggcgcuaucaacacgucccuccccuuccagaauauucacccuaucacuaucgguaagugcccaaaguauguaaaaucaacaaagcugcgccuugccaccgggcugagaaacgugcccaguauucagagcaggggauuguuuggcgcgauagccggcuucaucgaagggggauggacugguauggucgacggcugguacggguaucaucaccagaaugaacaaggauccggcuacgcagcugaucucaaaucuacacagaacgccauugacgagaucaccaauaaggugaacagcguuauagagaaaaugaauacgcaguuuaccgcuguggguaaggaguucaaccaccuggaaaagcggauugaaaauuuaaacaaaaaggucgaugacggguuccuggauaucuggacauacaaugccgagcuccuugugcuguuggaaaacgagcgcacucuagacuaucaugauucaaauguaaagaaccuguacgagaagguucgaaaccagcucaaaaauaacgcaaaggaaaucggcaauggauguuuugaguucuaucacaagugcgacaacaccuguauggaaagugugaaaaauggcacauacgauuauccuaaguacuccgaggaagccaaacugaacagagaggagauugacggggucaaacuugaaagcacuaggaucuaucaaauucuggcuauauacucuaccguggcgucaaguuugguccucgugguuagccugggagcaaucuccuuuuggaugugcucuaaugguucguuacagugccggauuuguaucuga

SEQ ID NO: 131053 - RNA, 1701 nt, Artificial Sequence
  derived and/or modified CDS sequence (opt3) from hemagglutinin__InfluenzaA__ACT21466
augaagaccaucauugcccugagcuacauacucugccuuguguucgcucagaaacugcccggcaacgacaauuccacagcaacuccuuguuuggggcaccaugccgucccaaacggaacguuaguuaagaccaucacaaaugaucaaauugaggugacuaacgcgaccgaacugguacagucuucaaguacagguaaaaucugcgacagcccgcacaggauucuagauggcaagaauuguacccucaucgacgcucugcuuggggauccccauugcgacggauuuaaaaacaaggagugggaucuguucguggaaagauccacugccuauucuaauuguuacccuuaugacgucccagauuacgcaucguugcggucacucguggccagcaguggcacacuggaguuuaccaacgaagguuucaauuggacggggguugcucaggacggaacuuccuaugcaugcaagcgcggcucugugaaauccuuuuucagccgacugaacuggcuccacaaguuagaguacaaauaucccgcccugaaugucaccaugccuaacaaugauaaguuugacaaacuuuacauauggggcgugcaucacccaucaacagauagugaccagacuagcuuguacguacaggcuucugggcguguuaccguguccacaaagagaucacagcagaccgucauccccaacauuggaagcaggccuugggugcgggguaucaguucucgcauuuccaucuauuggacgauagugaagccaggcgacauucugcuaaucaauagcacugggaaccucauugccccgagaggauacuucaaaaucaggucgggcaagucuuccaucaugcggucagaugcgcccauugacaacuguaauagugagugcauaacaccuaacgguagcaucccaaaugauaaacccuuucagaacgucaaucgcauuaccuauggggcauguccucgauacguuaagcaaaacacucugaaacuugccacaggaaugagaaaugugccagaaaagcagaccaggggcaucuucggcgcuauagccggguuuauugagaacggaugggaagguaugguagacggcugguauggguuccggcaccaaaauuccgagggaacgggccaggcagcugaucugaaaucuacccaagccgcgaucaaccagaucaaugguaaguugaaccgucucauugagaagacaaaugaaaaauuucaucagaucgagaaggaguucagcgaaguggaagggcgcauucaagaccuggagaaauacgucgaggauacuaagauagacuuauggucauauaacgccgaacugcucguggcacuugagaaucagcacaccaucgaucugacagacagugaaaugaacaaauuguucgagaagacuagaaagcagcuaagggaaaacgcugaggauaugggcaauggaugcuuuaaaauuuaccauaagugugacaacgccugcaucggcuccauccggaaugggaccuacgaccacgauguuuaucgagacgaggcucugaacaaucgcuuccagauuaaaggaguggaacucaagagcgguuacaaagauuggauacuguggaucucuuuugccauuucaugcuuccuucugugugucguguugcucggcuuuaucaugugggcaugccaaaaggggaacauuagauguaauaucugcauauga

SEQ ID NO: 131054 - RNA, 1701 nt, Artificial Sequence
  derived and/or modified CDS sequence (opt3) from hemagglutinin__InfluenzaA__ACT21467
augaagaccaucauugcccugagcuacauacucugccuuguguucgcucagaaacugcccggcuccgacaacucuacagcaacuuuguguuuagggcaccaugccgucccuaauggaacgcugguuaagaccaucacaaacgaucaaauugaggugacuaaugcgaccgaacuuguacagucaaguagcacagguaaaaucugcgacuccccacacaggauucucgauggcaagaacuguacccugaucgacgcucuacugggggauccgcauugcgacggauuuaaaaauaaggagugggauuuguucguggaaagaucuacugccuauucgaacuguuaccccuaugacgucccugauuacgcaucacuccggagccugguggccaguuccggcacacuggaguuuaccaaugaagguuucaacuggacggggguugcucaggacggaacuucuuaugcaugcaagcgcggcagcgugaaauccuuuuucucacgacucaauugguuacacaagcuggaguacaaauauccagcccuuaacgucaccaugcccaauaacgauaaguuugacaaauuguacauauggggcgugcaucacccuaguacagauagcgaccagacuucucuguacguacaggcuuccgggcguguuaccgugucaacaaagagaagccaacagaccgucaucccaaauauuggaaguaggcccugggugcgggguaucucuucccgcauuagcguguauuggacgaucgucaagccuagagacauacuacucauuaacucgacuggcaaucugaucgccccaaggggguacuucaaaauucggucuggaaaguccucaaucaugcgcagugaugcgccgaucgacaacuguaacagcgagugcauuacacccaauggcuccauaccuaacgauaaaccauuucagaauguuaaccgaaucaccuauggugcaugucccagauacgugaagcaaaauacucuuaaacuggccacagggaugaggaacguaccugaaaagcagacccggggaauuuucggcgcuaucgccggcuuuauagagaaugggugggaaggaaugguggacgguugguauggcuuccgucaccagaacucugaggggacgggacaggcagcugauuugaaaagcacccaagccgcgauuaaucgcaucaacggcaagcucaauagacugaucgagaagacaaacgaaaaauuucaucagauugagaaggaguucucagaagucgaagguaggauccaggacuuagagaaauacguggaggauacuaagauugaccuguggaguuauaaugccgaacuccuuguugcacuggagaaccaacacaccauagauuugacagacuccgaaaugaauaaacuauucgagaagacucggaagcagcugcgagaaaacgcugaggauauggggaacggcugcuuuaaaaucuaccauaagugugacaaugccugcauuggaagcauccgcaacggcaccuacgaccacgauguguauagagacgaggcucucaauaacagguuccagaucaaaggggucgaacugaagucuggauacaaagauuggauucuuuggauaucauuugccaucaguugcuuccuguugugugugguacuccuggguuuuauuaugugggcaugccagaagggcaauauccgguguaacauuugcaucuga

SEQ ID NO: 131055 - RNA, 1701 nt, Artificial Sequence
  derived and/or modified CDS sequence (opt3) from hemagglutinin__InfluenzaA__ACT21468
augaagaccaucauugcccugagcuacauacucugccuuguguucgcucagaaacugcccggcaacgacaauuccacagcaacuuuguguuuagggcaccaugccgucccuaacggaacgcugguuaagaccaucacaaaugaucaaauugaggugacuaacgcgaccgaacugguacagucuucaaguacagguaaaaucugcgacagcccacacaggauucucgauggcaagaauuguacccugaucgacgcccuucugggggauccgcauugcgacggauuuaaaaacaaggagugggauuuguucguggaaagauccacugcuuauucuaauuguuaccccuaugacgucccugauuacgcaucgcuccggucacugguggccagcaguggcacacuggaguuuaccaacgaagguuucaauuggacggggguugcucaggacggaacuuccuaugcaugcaagcgcggcucugugaaauccuuuuucagccgacucaacugguuacacaagcuggaguacaaauauccagcccuuaaugucaccaugcccaacaaugauaaguuugacaaauuguacauauggggcgugcaucacccuucaacagauagugaccagacuagccuguacguacaggcuucugggcguguuaccguguccacaaagagaucacagcagaccgucaucccaaacauuggaagcaggcccugggugcgggguaucaguucucgcauuuccaucuauuggacgauagugaagccuggcgacauucuacucaucaauagcacugggaaccugauugccccaagaggauacuucaaaaucaggucgggcaagucuuccaucaugcggucagaugcgccgauugacaacuguaauagugagugcauaacacccaacgguagcaucccuaaugauaaaccauuucagaacgucaaucgcauuaccuauggggcauguccccgauacguuaagcaaaacacucuuaaacuggccacaggaaugagaaaugugccugaaaagcagaccaggggcaucuucggcgcuauagccggguuuauugagaacggaugggaagguaugguagacggcugguauggguuccggcaccaaaauuccgagggaacgggccaggcagcugauuugaaaucuacccaagccgcgaucaaccagaucaaugguaagcucaaccgucugauugagaagacaaaugaaaaauuucaucagaucgagaaggaguucagcgaaguggaagggcgcauucaagacuuagagaaauacgucgaggauacuaagauagaccuguggucauauaacgccgaacuccuuguggcacuggagaaucagcacaccaucgauuugacagacagugaaaugaacaaacuauucgagaagacuagaaagcagcugagggaaaacguugaggauaugggcaauggaugcuuuaaaauuuaccauaagugugacaacgcuugcaucggcuccauccggaaugggaccuacgaccacgauguguaucgagacgaggcccucaacaaucgcuuccagauuaaaggagucgaacuaaagagcgguuacaaagauuggauacuuuggaucucuuuugcuauuucaugcuuccuguugugugugguacuccugggcuuuaucaugugggccugccaaaaggggaacauuagauguaauaucugcauauga

SEQ ID NO: 131056 - RNA, 1701 nt, Artificial Sequence
  derived and/or modified CDS sequence (opt3) from hemagglutinin__InfluenzaA__ACT21469
augaagaccaucauugcccugagcuacauauccagacucguguucgcucagaaacuucccggcaacgacaauucuacagcaacucugugcuuggggcaccaugccgucccuaacggaacguuaguuaagaccaucacaaaugaucaaauugaggugacuaacgcgaccgaacugguacagucaaguagcacagguaggaucugugacuccccacaccggauucuagauggcgagaauugcacccucaucgacgcucugcuuggggauccgcauugugacggauuucagaacaaagaaugggaucuguucguggagcgcucuaaggccuauucgaauugcuaccccuaugacgucccugauuacgcaucauugcgaagccucguggccaguuccggcacucuggaauuuaacaaugagucuuucaacuggacagguguugcucaggacgggaccagcuaugcauguaaacguagauccauaaagucauuuuucaguaggcugaauuggcuccaccaauuaaaguacaaauauccagcccugaacgugacgaugcccaauaacgauaaguuugacaaacuuuacaucuggggaguccaucacccuagcacugauucugaccagaccuccuuguacgcucaggccucaggccgggugacaguaagcacuaagcgcagucagcaaaccguuauuccaaauaucggcucuagacccugggugaggggagucuccagccggauuucgaucuauuggacaauagugaaaccuggggacauucugcuaaucaacucuaccgguaaccucauugcgccacgcggcuacuucaagauccgauccgggaagucaaguaucaugagaagcgaugcaccgauuggaaaaugcaauuccgaguguauaacgcccaacggcucuaucccuaaugacaagccauuucagaacgugaauaggauuacuuauggugccugcccccgguacgucaaacagaacacacugaaacuugcuaccgggaugcguaauguuccugaaaagcagacucgcggaaucuucggcgccauagcaggcuuuauugagaacgggugggaaggaaugguggaugguugguauggcuucagacaccaaaauagcgaggggacaggacaggcugccgaccugaagucaacccaggcggccaucaaccaaaucaauggcaaauugaacaggcucauugagaagacgaaugaaaaguuucaucagaucgagaaagaguucagugaaguagaaggucggauucaggaucuggagaaguacguggaggacaccaaaauagauuuaugguccuauaacgcagaacugcucgucgcucuugagaaucagcacacaaucgaccugacugauagcgaaaugaacaaguuguucgagcgaacccgcaaacaacuaagagaaaacgccgaggacauggggaauggcuguuuuaagauuuaccauaagugcgauaacgcuuguaucggaucuaucaggaauggcacauacgaccacgacguguaucgggaugaggcccugaacaaucgcuuccagauuaaagggguugaacucaagucaggauacaaagacuggauacuguggaucaguuuugcaauuagcugcuuccuucugugcguggucuugcucgguuuuaucaugugggccugucagaagggcaacauuagaugcaauaucuguauauga

SEQ ID NO: 131057 - RNA, 1701 nt, Artificial Sequence
  derived and/or modified CDS sequence (opt3) from hemagglutinin__InfluenzaA__ACT21471
augaagaccaucauugcccugagcuacauauccugccucguguucgcucagaaacuucccggcaacgacaauucuacagcaacucuguguuuggggcaccaugccgucccuaacggaacguuaguuaagaccaucacaaaugaucaaauugaggugacuaacgcgaccgaacugguacagucaaguagcacagguagaaucugcgacuccccacacaggauucuagauggcgagaauuguacccucaucgacgcucugcuuggggauccgcauugcgacggauuucagaacaaagaaugggaucuguucguggagcggucuaaggccuauucgaauuguuaccccuaugacgucccugauuacgcaucauugcgcagccucguggccaguuccggcacucuggaauuuaacaaugagucuuucaacuggacagguguugcucaggacgggaccagcuaugcaugcaaacgacguuccauaaagucauuuuucaguagacugaauuggcuccaccaauuaaaguacaaauauccagcccugaacgugacgaugcccaauaacgauaaguuugacaaacuuuacaucuggggaguccaucacccuagcacugauucugaccagaccuccuuguacgcucaggccucaggcagggugacaguaagcacuaagcggagucagcaaaccguuauuccaaauaucggcucucgccccugggugagaggggucuccagcaggauuucgaucuauuggacaauagugaaaccuggagacauucugcuaaucaacucuaccgguaaccucauugcgccacggggcuacuucaagauccgcuccgggaagucaaguaucaugcgaagcgaugcaccgauuggaaaauguaauuccgagugcauaacgcccaacggcucuaucccuaaugacaagccauuucagaacgugaauagaauuacuuauggugccugucccagguacgucaaacagaacacacugaaacuugcuaccgggaugcggaauguuccugaaaagcagacucguggaaucuucggcgccauagcaggcuuuauugagaacgggugggaaggaaugguggaugguugguauggcuuccgccaccaaaauagcgaggggacaggacaggcugccgaccugaagucaacccaggcggccaucaaccaaaucaauggcaaauugaacagacucauugagaagacgaaugaaaaguuucaucagaucgagaaagaguucagugaaguagaagguaggauucaggaucuggagaaguacguggaggacaccaaaauagauuuaugguccuauaacgcagaacugcucgucgcucuugagaaucagcacacaaucgaccugacugauagcgaaaugaacaaguuguucgagcggacccgaaaacaacuacgcgaaaacgccgaggacauggggaauggcugcuuuaagauuuaccauaagugugauaacgcuugcaucggaucuaucagaaauggcacauacgaccacgacguguauagggaugaggcccugaacaaucgguuccagauuaaagggguugaacucaagucaggauacaaagacuggauacuguggaucaguuuugcaauuagcugcuuccuucuguguguggucuugcucgguuuuaucaugugggccugccagaagggcaacauucgcuguaauaucugcauauga

SEQ ID NO: 131058 - RNA, 1701 nt, Artificial Sequence
  derived and/or modified CDS sequence (opt3) from hemagglutinin__InfluenzaA__ACT21472
augaagaccaucauugcccugagcuacauauccugccucguguucgcucagaaacuucccggcaacgacaauucuacagcaacucuguguuuggggcaccaugccgucccuaacggaacguuaguuaagaccaucacaaaugaucaaauugaggugacuaacgcgaccgaacugguacagucaaguagcacagguagaaucugcgacuccccacacaggauucuagauggcgagaauuguacccucaucgacgcucugcuuggggauccgcauugcgacggauuucagaacaaagaaugggaucuguucguggagcggucuaaggccuauucgaauuguuaccccuaugacgucccugauuacgcaucauugcgcagccucguggccaguuccggcacucuggaauuuaacaaugagucuuucaacuggacagguguugcucaggacgggaccagcuaugcaugcaaacgacguuccauaaagucauuuuucaguacgcugaauuggcuccaccaauuaaaguacaaauauccagcccugaacgugacuaugcccaauaacgauaaguuugacaaacuuuacaucuggggaguccaucacccuagcaccgauucugaccagacauccuuguacgcucaggccucaggcagagugacuguaagcaccaagaggagucagcaaacaguuauuccaaauaucggcucucggcccugggugcgcggggucuccagcagaauuucgaucuauuggaccauagugaaaccuggagacauucugcuaaucaacucuacggguaaccucauugcgccaaggggcuacuucaagauccgguccgggaagucaaguaucaugcgcagcgaugcaccgauuggaaaauguaauuccgagugcauaacucccaacggcucuaucccuaaugacaagccauuucagaacgugaaucgaauuacauauggugccugucccagauacgucaaacagaacacccugaaacuugcuacugggaugaggaauguuccugaaaagcagacacggggaaucuucggcgccauagcaggcuuuauugagaacgggugggaaggaaugguggaugguugguauggcuuccgucaccaaaauagcgaggggaccggacaggcugccgaccugaagucaacgcaggcggccaucaaccaaaucaauggcaaauugaaccgccucauugagaagaccaaugaaaaguuucaucagaucgagaaagaguucagugaaguagaagguaggauucaggaucuggagaaguacguggaggacacaaaaauagauuuaugguccuauaacgcagaacugcucgucgcucuugagaaucagcacacuaucgaccugaccgauagcgaaaugaacaaguuguucgagagaacacggaaacaacuacgagaaaacgccgaggacauggggaauggcugcuuuaagauuuaccauaagugugauaacgcuugcaucggaucuauccgcaauggcacuuacgaccacgacguguauagagaugaggcccugaacaauagguuccagauuaaagggguugaacucaagucaggauacaaagacuggauacuguggaucaguuuugcaauuagcugcuuccuucuguguguggucuugcucgguuuuaucaugugggccugccagaagggcaacauucgguguaauaucugcauauga

SEQ ID NO: 131059 - RNA, 1701 nt, Artificial Sequence
  derived and/or modified CDS sequence (opt3) from hemagglutinin__InfluenzaA__ACT21507
augaagaccaucauugcccugagcuacauacucugccuuguguucgcucagaaacugcccggcaacgacaauuccacagcaacuuuguguuuagggcaccaugccgucccuaacggaacgaucguuaagaccauuacaaaugaucaaaucgaggugacuaacgcgaccgaacugguacagucuucaaguacagguggcauuugcgacagcccacaccagauccuagauggggagaauagaacccucauagacgcucugcuuggagauccgcagugugacggcuuucaaaacaaaaagugggaucuguucguggaaagguccaaagccuauucuaauugcuaccccuaugacgucccugauuacgcaucguugcggucacucguggccagcagugguacucuggaguuuaacaaugaauccuucaacuggacagggguuacccagaauggaacgucuagcgcuuguaagggccgcuccaacaauucauuuuucagucgacugaacuggcucacucauuuaaaguuuaaauauccagcacugaaugugaccaugcccaacaacgagaaguucgacaaacuuuacaucuggggcguccaccauccugggacagauaaugaccagauuagcuuguaugcccaggcuucuggacguaucacuguguccaccaagagaucacaacagacaguaauuccaaacaucgguagcaggccccggguucgcgauauaccuaguagaauuucuaucuacuggaccauugugaaaccaggcgacauccugcuaaucaauuccacggggaaccucauugccccgaggggauacuuuaagauacggagcggcaagucgucuaucaugcgcuccgacgcgcccauugguaaaugcaauucagaguguaucacuccuaacgggaguauaccaaaugauaagcccuuccagaacgucaaucgaauuacauauggagcaugcccuagauacgugaaacagaacacccugaaacuugccacuggcaugaggaaugugccagaaaagcaaacacggggcaucuuuggggcuaucgccggauucauugagaacgguugggaaggcauggucgacgggugguauggauuucgucaccagaauagcgagggcaucggucaggcagcugaucugaaguccacccaagccgcgauuaaccagauaaaugggaaauugaaccgccucaucggcaagacgaacgagaaguuccaccagauugaaaaagaguucucugaaguugagggaagaauccaggaccuggaaaaguacguggaggauaccaggaucgacuuauggagcuauaaugccgagcugcucguagcacuugaaucacaacauacaauugaucugacugacagugagaugaacaaauuguuugaacggaccaagaaacagcuacgagagaaugcugaagauaugggcaacggguguuucaagauauaccacaagugcgacaaugccuguaucggauccauucgcaacgguacauaugaucaugacguguacagagacgaggcucugaauaaaagguuucagaucaagggcgucgagcucaaaagcggguacaaggauuggauucuguggaucucuuucgccauaucaugcuuucuucugugcguggcauugcucggauucaucaugugggccugucagaaaggcaacauucggugcaauaucuguauuuga

SEQ ID NO: 131060 - RNA, 1701 nt, Artificial Sequence
  derived and/or modified CDS sequence (opt3) from hemagglutinin__InfluenzaA__ACT21508
augaagaccaucauugcccugagcuacauacucugccuuguguucgcucagaaacugcccggcaacgacaauuccacagcaacuuuguguuuagggcaccaugccgucccuaacggaacgaucguuaagaccauuacaaaugaucaaaucgaggugacuaacgcgaccgaacugguacagucuucaaguacagguggcauuugcgacagcccacaccagauccuagauggggagaauuguacccucauagacgcucugcuuggagauccgcagugcgacggcuuucaaaacaaaaagugggaucuguucguggaaagauccaaagccuauucuaauuguuaccccuaugacgucccugauuacgcaucguugaggucacucguggccagcagugguacucuggaguuuaacaaugaauccuucaacuggacagggguuacccagaauggaacgucuagcgcuugcaagcggcgcuccaacaauucauuuuucagucgacugaacuggcucacucauuuaaaguuuaaauauccagcacugaaugugaccaugcccaacaacgagaaguucgacaaacuuuacaucuggggcguccaccauccuggcacagauaaugaccagauuagcuuguaugcccaggcuucugggcguaucacuguguccaccaagagaucacaacagacaguaauuccaaacaucggaagcaggccccggguucgcgauauaccuaguagaauuucuaucuacuggaccauugugaaaccaggugacauccugcuaaucaauuccacgggcaaccucauugccccgaggggguacuuuaagauacggagcggaaagucgucuaucaugcgcuccgacgcgcccauuggcaaauguaauucagagugcaucacuccuaacgguaguauaccaaaugauaagcccuuccagaacgucaaucgaauuacauauggggcauguccuagauacgugaaacaggacacccugaaacuugccacuggaaugaggaacgugccagaaaagcaaacacggggcaucuuuggcgcuaucgccggguucauugagaauggaugggaagguauggucgauggcugguauggguuucgucaccagaacagcgagggaaucggccaggcagcugaccugaaguccacccaagccgcgauuaaucagauaaacgguaaauugaaucgccucaucgggaagacgaacgagaaguuccaccagauugaaaaagaguucucugaaguugagggcagaauccaggaucuggaaaaguacguggaggacaccaaaaucgauuuauggagcuauaacgccgagcugcucguagcacuugaaaaucaacauacaauugaccugacugauucagagaugaacaaguuguuugaaaggaccaaaaagcagcuacgggagaaugcugaagacaugggaaacggcugcuucaagauauaccacaaaugugauaaugccugcaucgggaguauucgaaacggaacauaugaccaugacguguaccgcgaugaggcucugaauaacagauuucagaucaagggugucgagcucaaauccggcuacaaggacuggauucuguggaucagcuucgccauaucuugcuuucuucuguguguggcauugcucggguucaucaugugggccugccagaaaggaaauauuagguguaacaucugcauuuga

SEQ ID NO: 131061 - RNA, 1701 nt, Artificial Sequence
  derived and/or modified CDS sequence (opt3) from hemagglutinin__InfluenzaA__ACT21509
augaagaccaucauugcccugagcuacauacucugccuuguguucgcucagaaacugcccggcaacgacaauuccacagcaacuuuguguuuagggcaccaugccgucccuaacggaacgaucguuaagaccauuacaaaugaucaaaucgaggugacuaacgcgaccgaacugguacagucuucaaguacagguggcauuugcgacagcccacaccagauccuagauggggagaauuguacccucauagacgcucugcuuggagauccgcagugcgacggcuuucaaaacaaaaagugggaucuguucguggaaagauccaaagccuauucuaauuguuaccccuaugacgucccugauuacgcaucguugaggucacucguggccagcagugguacucuggaguuuaacaaugaauccuucaacuggacagggguuacccagaauggaacgucuagcgcuugcaagcggcgcuccaacaauucauuuuucagucgacugaacuggcucacucauuuaaaguuuaaauauccagcacugaaugugaccaugcccaacaacgagaaguucgacaaacuuuacaucuggggcguccaccauccuggcacagauaaugaccagauuagcuuguaugcccaggcuucugggcguaucacuguguccaccaagagaucacaacagacaguaauuccaaacaucggaagcaggccccggguucgcgauauaccuaguagaauuucuaucuacuggaccauugugaaaccaggugacauccugcuaaucaauuccacgggcaaccucauugccccgaggggguacuuuaagauacggagcggaaagucgucuaucaugcgcuccgacgcgcccauuggcaaauguaauucagagugcaucacuccuaacgguaguauaccaaaugauaagcccuuccagaacgucaaucgaauuacauauggggcauguccuagauacgugaaacagaacacccugaaacuugccacuggaaugaggaaugugccagaaacacaaacccggggcaucuuuggcgcuaucgccggguucauugagaacggaugggaagguauggucgacggcugguauggguuucgucaccagaauagcgagggaacgggccaggcagcugaucugaaguccacccaagccgcgaucaaccagauuaaugguaagcccaaccgcuugauagggaaaacaaacgagaaguuccaccagaucgaaaaggaguucucugaaguugagggcaggauucaggaccucgaaaaauacguggaggauacuaagaucgaccuguggagcuauaaugccgaguuacugguagcacucgaaaaccaacauaccaucgaucuuacagacucagagaugaauaaacuguuugaaaagacuaaaaagcaguugagagagaacgcugaagauaugggaaauggcugcuucaagauuuaccacaaaugugacaacgccugcauagggaguauccggaaugagaccuaugaucaugacguguaccgagacgaggcucuaaacaaucgcuuucagauuaagggagucgaacugaaauccgguuacaaggauuggauccucuggauuagcuucgccaucucuugcuuucugcuuuguguggcacuguugggcuucauaaugugggccugccagaaagggaacaucagauguaauauuugcaucuga

SEQ ID NO: 131062 - RNA, 1701 nt, Artificial Sequence
  derived and/or modified CDS sequence (opt3) from hemagglutinin__InfluenzaA__ACT21510
augaagaccaucauugcccugagcuacauacucugccccguguucgcucagaaacuuccuggcaacgacaauuccacagcaacucuguguuuggggcaccaugccgucccaaacggaacgaucguuaagaccauuacaaaugaucaaaucgaggugacuaacgcgaccgaauuaguacagucuucaaguacagguggcauuugcgacagcccgcaccagauccuggauggggagaauuguacccuaauagacgcucuccugggagauccccagugcgacggcuuucaaaacaaaaagugggaucuuuucguggaaagauccaaagccuauucuaauuguuacccuuaugacgucccagauuacgcaucgcugaggucauugguggccagcagugguacucucgaguuuaacaaugaauccuucaacuggacagggguuacccagaauggaacgucuagcgcuugcaagcggcgcuccaacaauucauuuuucagucgacugaacuggcugacucaucucaaguuuaaauaucccgcauuaaaugugaccaugccuaacaacgagaaguucgacaaacuguacaucuggggcguccaccauccaggcacagauaaugaccagauuagccuuuaugcccaggcuucugggcguaucacuguguccaccaagagaucacaacagacaguaauucccaacaucggaagcaggccucggguucgcgauauaccaaguagaauuucuaucuacuggaccauugugaaaccgggugacaucuugcugaucaauuccacgggcaaccuaauugcccccaggggguacuuuaagauacggagcggaaagucgucuaucaugcgcuccgacgcgccuauuggcaaauguaauucagagugcaucacuccaaacgguaguauacccaaugauaagccuuuccaggacgucaaccgaauuacauauggggcauguccaagauacgugaaacagaauacccucaagcuggccacuggaaugaggaacgugcccgaaaaacaaacacggggcaucuuuggcgcuaucgccggguucauugagaauggaugggaagguauggucgauggcugguauggguuucgucaccagaacagcgagggaaucggccaggcagcugaccuuaaguccacccaagccgcgauuaaucagauaaacgguaaacugaaucgcuugaucgggaagacgaacgagaaguuccaccagauugaaaaagaguucucugaaguugagggcagaauccaggaucucgaaaaguacguggaggacaccaaaaucgaucuguggagcuauaacgccgaguuacugguagcacucgaaaaucaacauacaauugaccuuacugauucagagaugaacaagcuguuugaaaggaccgagaaacaguugcgggaaaaugcugaggacaugggaaacggcugcuucaagauauaccacaagugugauaaugccgggaucggaaguauucgaaacgguacauaugaccaugacguguaccgcgaugaggcucuaaauaacagauuucagaucaaaggcgucgaacugaaguccggguacaaagacuggauucucuggaucagcuucgccauaucuugcuuucugcuuugcguggcacuguugggauucaucaugugggccugucagaagggcaauauuaggugcaacaucuguauuuga

SEQ ID NO: 131063 - RNA, 1701 nt, Artificial Sequence; identical to SEQ ID NO: 130961
  derived and/or modified CDS sequence (opt3) from hemagglutinin__InfluenzaA__ACT21572

SEQ ID NO: 131064 - RNA, 1701 nt, Artificial Sequence; identical to SEQ ID NO: 130717
  derived and/or modified CDS sequence (opt3) from hemagglutinin__InfluenzaA__ACT22031

SEQ ID NO: 131065 - RNA, 1701 nt, Artificial Sequence; identical to SEQ ID NO: 130717
  derived and/or modified CDS sequence (opt3) from hemagglutinin__InfluenzaA__ACT22032

SEQ ID NO: 131066 - RNA, 1701 nt, Artificial Sequence; identical to SEQ ID NO: 130717
  derived and/or modified CDS sequence (opt3) from hemagglutinin__InfluenzaA__ACT22033

SEQ ID NO: 131067 - RNA, 1701 nt, Artificial Sequence; identical to SEQ ID NO: 130717
  derived and/or modified CDS sequence (opt3) from hemagglutinin__InfluenzaA__ACT22034

SEQ ID NO: 131068 - RNA, 1701 nt, Artificial Sequence; identical to SEQ ID NO: 130732
  derived and/or modified CDS sequence (opt3) from hemagglutinin__InfluenzaA__ACT22035

SEQ ID NO: 131069 - RNA, 1701 nt, Artificial Sequence
  derived and/or modified CDS sequence (opt3) from hemagglutinin__InfluenzaA__ACT22036
augaaggccauccuggugguccuccuuuacaccuucgcuacagcaaacgccgacacucugugcauuggcuaucacgcgaauaacagcacggauaccguugacacaguguuggagaaaaauguaacugugacccauuccgucaacuuacuggaagauaagcacaaugggaaacuauguaagcucagaggaguggcuccccugcaucuugguaaaugcaacauagccggcuggauccuggggaauccugagugugaaucuuugucaacagcaaguagcugguccuacauuguugagaccucuucgucagacaacggaacuugcuauccaggcgauuuuaucgacuacgaggagcucagggagcagcugagcaguguguccucuuucgaacgguuugagauuuucccgaagacaagcuccuggcccaaucacgauucaaacaagggugucaccgccgcuuguccucaugcaggggccaaaaguuuuuauaagaaucugaucuggcucauaaagaagggaaacagcuacccaaaauuaucuaaguccuauaucaaugacaagggcaaagaagugcugguacuuuggggcauucaccaccccucaacgagcgcugaucaacagaguuuguaccagaacgccgacgcguacguuuucguggggucuucccgcuauagcaagaaauuuaagccugagaucgcaauucgaccaaaaguccgugaucaggagggaagaaugaauuacuauuggacucugguggaacccggugacaagaucaccuucgaggccacaggcaaccuaguggucccuagguacgcuuuugccauggaacggaacgcagggucgggaauaauuaucucugauacuccaguucaugacugcaauaccacaugucaaaccccgaaaggcgcuauuaacacgucccuccccuuccagaauauccacccuaucacuauugguaagugcccaaaguaugugaaaucaacaaagcugcgccuugccaccgggcugagaaacguacccaguauacagagcaggggauuguuuggcgcgaucgccggcuucauugaagggggauggacugguaugguggacggcugguacggguaucaucaccagaaugaacaaggauccggcuacgcagcugaucucaaaucuacacagaacgccaucgacgagauaaccaauaaggucaacagcgugauugagaaaaugaauacgcaguuuaccgcuguugguaaggaguucaaccaccuggaaaagcggaucgaaaauuuaaacaaaaagguggaugacggguuccuggauaucuggacauacaaugccgagcuccuuguccuguuggaaaacgagcgcacucuagacuaucaugauucaaaugugaaaaaccuguacgagaagguacgaagucagcucaaaaacaaugcaaaggaaauuggcaacggauguuuugaguucuaucacaagugcgacaauaccuguauggaauccguuaaaaacggcacauacgauuauccuaaguacagcgaggaagccaaacugaauagagaggagaucgacggggugaaacuugaaucuacuaggauuuaucaaauacuggcuaucuacucaaccgucgcgaguagcuuggugcucgucgugucccugggagcaauuucuuuuuggaugugcucgaacgguagcuuacagugccggaucuguaucuga

SEQ ID NO: 131070 - RNA, 1701 nt, Artificial Sequence
  derived and/or modified CDS sequence (opt3) from hemagglutinin__InfluenzaA__ACT22037
augaaggccauccuggugguccuccuuuacaccuucgcuacagcaaacgccgacacucugugcauuggcuaucacgcgaauaacagcacggauaccguugacacaguguuggagaaaaauguaacugugacccauuccgucaacuuacuggaagauaagcacaaugggaaacuauguaagcucagaggaguggcuccccugcaucuugguaaaugcaacauagccggcuggauccuggggaauccugagugugaaucuuugucaacagcaaguagcugguccuacauuguugagaccucuucgucagacaacggaacuugcuauccaggcgauuuuaucgacuacgaagaacucagggagcagcugagcaguguguccucuuucgaacgguuugagauuuucccgaagacaagcuccuggcccaaucacgauucaaacaagggugucaccgccgcuuguccucaugcaggggccaaaaguuuuuauaagaaucugaucuggcucgugaaaaagggaaacagcuacccaaaauuaucuaaguccuauauaaaugacaagggcaaagaaguacugguucuuuggggcauccaccaccccucaacgagcgcugaucaacagaguuuguaccagaacgccgacgcguacguguucgucgggacuucucgcuauuccaagaaauuuaagccugagauugcaauccgaccaaaagugcgugagcaggaaggaagaaugaauuacuauuggacccugguggagcccggugauaagauuacauucgaagccacuggcaaccuagucguuccuagguacgcuuuugccauggagcggaacgcagggagcggaaucauaauuucggacaccccagugcaugauugcaauacaaccugucaaacgccgaaaggcgcuaucaacacuucucuccccuuccagaauauucacccuaucacaaucgguaagugcccaaaguauguaaaauccaccaagcugcgccuugccacugggcugagaaacgugcccucaauucagaguaggggauuguuuggcgcgauagccggcuucaucgaagggggauggacagguauggucgacggcugguacggguaucaucaccagaaugagcaaggaagcggcuacgcagcugaccucaaauccacccagaacgccauugaugagaucacgaauaaggugaacucuguuauagaaaagaugaauacccaguuuacagcuguggguaaggaguucaaccaccuggaaaagcggauugagaauuuaaacaaaaaggucgacgauggguuccuggacaucuggacuuacaaugccgaacuccuugugcuguuggagaacgagcgcacccuagauuaucaugacagcaauguuaaaaaccuguacgaaaagguacgaucacagcucaaaaacaaugcaaaggagaucggcaacggauguuuugaguucuaucacaagugcgauaauacauguauggagagugugaaaaacggcacuuacgacuauccuaaguacuccgaagaggccaaacugaauagagaggaaauugauggggucaaacuugagagcaccaggaucuaucaaauucuggcuauauacucuacaguggcgucaaguuugguccucgugguuagccugggagcaaucuccuuuuggaugugcucuaacgguucguuacagugccggauuuguaucuga

SEQ ID NO: 131071 - RNA, 1701 nt, Artificial Sequence
  derived and/or modified CDS sequence (opt3) from hemagglutinin__InfluenzaA__ACT22038
augaaggccauccuggugguccuccuuuacaccuucgcuacagcaaacgccgacacucugugcauuggcuaucacgcgaauaacagcacggauaccguugacacaguguuggagaagaauguaacugugacccauuccgucaacuuacuggaagauaagcacaaugggaaacuauguaagcucagaggaguggcuccccugcaucuugguaaaugcaacauagccggcuggauccuggggaauccugagugugaaucuuugucaacagcaaguagcugguccuacauuguugagaccucuucgucagacaacggaacuugcuauccaggcgauuuuaucgacuacgaggagcucagggagcagcugagcaguguguccucuuucgaacgguuugagauuuucccgaagacaagcuccuggcccaaucacgauucaaacaagggugucaccgccgcuuguccucaugcaggggccaaaaguuuuuauaagaaucugaucuggcucgugaaaaagggaaacagcuacccaaaauuaucuaaguccuauauaaaugacaagggcaaagaaguacugguucuuuggggcauccaccaccccucaacgaacgcugaucaacagagcuuguaccagaaugccgacgcguacguguucgucgggaguucucgcuauuccaagaaauuuaagccugagauugcaauccgaccaaaagugcgugaucaggagggaagaaugaacuacuauuggacucugguggaacccggugacaagauuaccuucgaggccacaggcaaccuagucguuccuagguacgcuuuugccauggaacggaaugcagggagcggaaucauaauuucggauacuccagugcaugacugcaacaccacaugucaaaccccgaaaggcgcuaucaauacgucucuccccuuccagaacauucacccuaucacuaucgguaagugcccaaaguauguaaaauccacaaagcugcgccuugccaccgggcugagaaaugugcccucaauucagaguaggggauuguuuggcgcgauagccggcuucaucgaagggggauggacugguauggucgacggcugguacggguaucaucaccagaacgaacaaggaagcggcuacgcagcugaucucaaauccacacagaaugccauugacgagaucaccaacaagguaaauucuguuauagagaaaaugaacacgcaguuuaccgcuguggguaaggaguucaaucaccuggaaaagcggauugaaaacuuaaauaaaaaggucgaugacggguuccuggauaucuggacauacaacgccgagcuccuugugcuguuggaaaaugagcgcacucuagacuaucaugauagcaacgugaaaaaccuguacgagaagguucgaucacagcucaaaaauaacgcaaaggaaaucggcaauggauguuuugaguucuaucacaagugcgacaacaccuguauggaaagugugaaaaauggcacauacgauuauccuaaguacuccgaggaagccaaacugaacagagaggagauugacggggucaaacuugaaagcacuaggaucuaucaaauucuggcuauauacucuaccguggcgucaaguuugguccucgugguuagccugggagcaaucuccuuuuggaugugcucuaaugguucguuacagugccggauuuguaucuga

SEQ ID NO: 131072 - RNA, 1701 nt, Artificial Sequence
  derived and/or modified CDS sequence (opt3) from hemagglutinin__InfluenzaA__ACT22055
augaaggccauccuggugguccuccuuuacaccuucgcuacagcaaacgccgacacucugugcauuggcuaucacgcgaauaacagcacggauaccguugacacaguguuggagaaaaauguaacugugacccauuccgucaacuuacuggaagauaagcacaaugggaaacuauguaagcucagaggaguggcuccccugcaucuugguaaaugcaacauagccggcuggauccuggggaauccugagugugaaucuuugucaacagcaaguagcugguccuacauuguugagaccucuucgucagacaacggaacuugcuauccaggcgauuuuaucgacuacgaggagcucagggagcagcugagcaguguguccucuuucgaacgguuugagauuuucccgaagacaagcuccuggcccaaucacgauucaaacaagggugucaccgccgcuuguccucaugcaggggccaaaaguuuuuauaagaaucugaucuggcucgugaaaaagggaaacagcuacccaaaauuacgcaagucuuauauaaaugacaagggcaaagaaguacugguucuuuggggcauccaccaccccuccacgucagcugaucaacagagcuuguaccagaacgccgacgcguacguguucgucgggaccagucgauauucuaagaaauuuaagccugagauugcaauccguccaaaagugagagaucaggagggaaggaugaauuacuauuggacucugguggaacccggugacaagauuacauucgaggccacuggcaaccuagucguuccucgguacgcuuuugccauggaacgcaacgcaggguccggaaucauaauuagcgauaccccagugcaugacugcaauacaaccugucaaacgccgaaaggcgcuaucaacacuucgcuccccuuccagaauauucacccuaucacaaucgguaagugcccaaaguauguaaaaucuaccaagcugagacuugccacugggcugaggaacgugcccuccauucagucacggggauuguuuggcgcgauagccggcuucaucgaagggggauggacagguauggucgacggcugguacggguaucaucaccagaaugaacaaggaaguggcuacgcagcugaucucaaaagcacccagaacgccauugacgagaucacgaauaaggugaacuccguuauagagaaaaugaauacccaguuuacagcuguggguaaggaguucaaccaccuggaaaagcgcauugaaaauuuaaacaaaaaggucgaugacggguuccuggauaucuggacuuacaaugccgagcuccuugugcuguuggaaaacgagcgaacccuagacuaucaugauucuaauguaaagaaccuguacgagaagguuagaagccagcucaaaaacaaugcaaaggaaaucggcaacggauguuuugaguucuaucacaagugcgacaauacauguauggaaucagugaaaaacggcacuuacgauuauccuaaguacagugaggaagccaaacugaauagggaggagauugacggggucaaacuugaauccacccggaucuaucaaauucuggcuauauacagcacaguggcgucuucauugguccucgugguuagucugggagcaaucagcuuuuggaugugcuccaacgguucuuuacagugccguauuuguaucuga

SEQ ID NO: 131073 - RNA, 1701 nt, Artificial Sequence; identical to SEQ ID NO: 131030
  derived and/or modified CDS sequence (opt3) from hemagglutinin__InfluenzaA__ACT22504

SEQ ID NO: 131074 - RNA, 1701 nt, Artificial Sequence; identical to SEQ ID NO: 130959
  derived and/or modified CDS sequence (opt3) from hemagglutinin__InfluenzaA__ACT33122

SEQ ID NO: 131075 - RNA, 1701 nt, Artificial Sequence
  derived and/or modified CDS sequence (opt3) from hemagglutinin__InfluenzaA__ACT33123
augaaggccauccuggugguccuccuuuacaccuucgcuacagcaaacgccgacacucugugcauuggcuaucacgcgaauaacagcacggauaccguugacacaguguuggagaaaaauguaacugugacccauuccgucaacuuacuggaagauaagcacaaugggaaacuauguaagcucagaggaguggcuccccugcaucuugguaaaugcaacauagccggcuggauccuggggaauccugagugugaaucuuugucaacagcaaguagcugguccuacauuguugagaccucuucgucagacaacggaacuugcuauccaggcgauuuuaucgacuacgaggagcucagggagcagcugagcaguguguccucuuucgaacgguuugagauuuucccgaagacaagcuccuggcccaaucacgauucaaacaagggugucaccgccgcuuguccucaugcaggggccaaaaguuuuuauaagaaucugaucuggcucgugaaaaagggaaacagcuacccaaaauuaucuaaguccuauauaaaugacaagggcaaagaaguacugguucuuuggggcauccaccaccccucaacgagcgcugaucaacagaguuuguaccagaacgccgacgcguacguguucgucgggacuucucgcuauuccaagaaauuuaagccugagauugcaauccgaccaaaagugcgugaucaggagggaagaaugaauuacuauuggacccugguggaacccggugacaagauuacauucgaggccacuggcaaccuagucguuccuagguacgcuuuugccauggaacggaacgcagggagcggaaucauaauuucggauaccccagugcaugacugcaauacaaccugucaaacgccgaaaggcgcuaucaacacuucucuccccuuccagaauauucacccuaucacaaucgguaagugcccaaaguauguaaaauccaccaagcugcgccuugccacugggcugagaaacgugcccucaauucagaguaggggauuguuuggcgcgauagccggcuucaucgaagggggauggacagguauggucgacggcugguacggguaucaucaccagaaugaacaaggaagcggcuacgcagcugaucucaaauccacccagaacgccauugacgagaucacgaauaaggugaacucuguuauagagaaaaugaauacccaguuuacagcuguggguaaggaguucaaccaccuggaaaagcggauugaaaauuuaaacaaaaaggucgaugacggguuccuggauaucuggacuuacaaugccgagcuccuugugcuguuggaaaacgagcgcacccuagacuaucaugauagcaauguaaagaaccuguacgagaagguucgaucacagcucaaaaacaaugcaaaggaaaucggcaacggauguuuugaguucuaucacaagugcgacaauacauguauggaaagugugaaaaacggcacuuacgauuauccuaaguacuccgaggaagccaaacugaauagagaggagauugacggggucaaacuugaaagcaccaggaucuaucaaauucuggcuauauacucuacaguggcgucaaguuugguccucgugguuagccugggagcaaucuccuuuuggaugugcucuaacgguucguuacaguuccggauuugcaucuga

SEQ ID NO: 131076 - RNA, 1701 nt, Artificial Sequence; identical to SEQ ID NO: 130717
  derived and/or modified CDS sequence (opt3) from hemagglutinin__InfluenzaA__ACT33125

SEQ ID NO: 131077 - RNA, 1701 nt, Artificial Sequence
  derived and/or modified CDS sequence (opt3) from hemagglutinin__InfluenzaA__ACT36505
augaaggccauccuggugguccuccuuuacaccuucgcuacagcaaacgccgacacucugugcauuggcuaucacgcgaauaacagcacggauaccguugacacaguguuggagaagaauguaacugugacccauuccgucaacuuacuggaagauaagcacaaugggaaacuauguaagcucagaggaguggcuccccugcaucuugguaaaugcaacauagccggcuggauccuggggaauccugagugugaaucuuugucaacagcaaguagcugguccuacauuguugagaccucuucgucagacaacggaacuugcuauccaggcgauuuuaucgacuacgaggagcucagggagcagcugagcaguguguccucuuucgaacgguuugagauuuucccgaagacaagcuccuggcccaaucacgauucaaacaagggugucaccgccgcuuguccucaugcaggggccaaaaguuuuuauaagaaucugaucuggcucgugaaaaagggaaacagcuacccaaaauuaucuaaguccuauauaaaugacaagggcaaagaaguacugguucuuuggggcauccaccaccccucaacgagcgcugaucaacagaguuuguaccagaacgccgacgcguacguguucgucgggacuucucgcuauuccaagaaauuuaagccugagauugcaauccgaccaaaagugcgugaucaggagggaagaaugaauuacuauuggacccugauugaacccggugacaagaucacauucgaggccacuggcaaccuaguggucccuagguacgcuuuugccauggaacggaacgcagggagcggaauaauuaucucggauaccccaguucaugacugcaauacaaccugucaaacgccgaaaggcgcuauuaacacuucucuccccuuccagaauauccacccuaucacaauugguaagugcccaaaguaugugaaauccaccaagcugcgccuugccacugggcugagaaacguacccucaauacagaguaggggauuguuuggcgcgaucgccggcuucauugaagggggauggacagguaugguggacggcugguacggguaucaucaccagaaugaacaaggaagcggcuacgcagcugaucucaaauccacccagaacgccaucgacgagauaacgaauaaggucaacucugugauugagaaaaugaauacccaguuuacagcuguugguaaggaguucaaccaccuggaaaagcggaucgaaaauuuaaacaaaaagguggaugacggguuccuggauaucuggacuuacaaugccgagcuccuuguccuguuggaaaacgagcgcacccuagacuaucaugauagcaaugugaaaaaccuguacgagaagguacgaucacagcucaaaaacaaugcaaaggaaauuggcaacggauguuuugaguucuaucacaagugcgacaauacauguauggaaaguguuaaaaacggcacuuacgauuauccuaaguacuccgaggaagccaaacugaauagagaggagaucgacggggugaaacuugaaagcaccaggauuuaucaaauacuggcuaucuacucuacagucgcgucaaguuuggugcucgucgugagccugggagcaauuuccuuuuggaugugcucuaacgguucguuacagugccggaucuguaucuga

SEQ ID NO: 131078 - RNA, 1701 nt, Artificial Sequence
  derived and/or modified CDS sequence (opt3) from hemagglutinin__InfluenzaA__ACT36649
augaaggccauccuggugguccuccuuuacaccuucgcuacagcaaacgccgacacucugugcauuggcuaucacgcgaauaacagcacggauaccguugacacaguguuggagaaaaauguaacugugacccauuccgucaacuuacuggaagauaagcacaaugggaaacuauguaagcucagaggaguggcuccccugcaucuugguaaaugcaacauagccggcuggauccuggggaauccugagugugaaucuuugucaacagcaaggaguuggagcuacauuguugagaccuccucuucggacaacggaacuugcuauccaggcgauuuuaucgacuacgaggagcuccgggagcagcuuaauucagugagcaguuucgaacgcuuugagauuuucccgaagacauccucuuggcccaaccacgauagcaauaagggugucaccgccgcuuguccucaugcaggggccaaauccuuuuauaagaaccugaucuggcucgugaaaaagggaaauucauacccaaaauuaaguaagagcuauauaaacgacaagggcaaagaaguacugguucuuuggggcauccaccaccccucuacguccgcugaucaacagucauuguaccagaaugccgacgcguacguguucgucgggagcagucgauauucuaagaaauuuaagccugagauugcaauccguccaaaagugagagaucaggagggaaggaugaacuacuauuggacucugguggaacccggugacaagauuaccuucgaggccacaggcaaccuagucguuccucgguacgcuuuugccauggaacgcaaugcaggguccggaaucauaauuagcgauacuccagugcaugacugcaacaccacaugucaaaccccgaaaggcgcuaucaauacgucgcuccccuuccagaacauucacccuaucacuaucgguaagugcccaaaguauguaaaaucuacaaagcugagacuugccaccgggcugaggaaugugcccuccauucagucacggggauuguuuggcgcgauagccggcuucaucgaagggggauggacugguauggucgacggcugguacggguaucaucaccagaacgaacaaggaaguggcuacgcagcugaucucaaaagcacacagaaugccauugacgagaucaccaacaagguuaauuccgugauagagaaaaugaacacgcaguuuaccgcuguggguaaggaguucaaucaccuggaaaagcgcauugaaaacuuaaauaaaaaggucgaugacggguuccuggauaucuggacauacaacgccgagcuccuugugcuguuggaaaaugagcgaacucuagacuaucaugauucuaacguaaaaagccuguacgagaagguuagaucacagcucaaaaacaaugcaaaggaaaucggcaacggauguuuugaguucuaucacaagugcgacaauaccuguauggaaagugugaaaaacggcacauacgauuauccuaaguacuccgaggaagccaaacugaauagggaggagauugacggggucaagcuggaaagcacucggaucuaucaaauucuggcuauauacucuaccguggcgucaaguuugguccucgugguuagccugggagcaaucuccuuuuggaugugcucuaacgguucguuacagugccguauuuguaucuga

SEQ ID NO: 131079 - RNA, 1701 nt, Artificial Sequence; identical to SEQ ID NO: 130717
  derived and/or modified CDS sequence (opt3) from hemagglutinin__InfluenzaA__ACT36650

SEQ ID NO: 131080 - RNA, 1701 nt, Artificial Sequence; identical to SEQ ID NO: 130717
  derived and/or modified CDS sequence (opt3) from hemagglutinin__InfluenzaA__ACT36652

SEQ ID NO: 131081 - RNA, 1701 nt, Artificial Sequence; identical to SEQ ID NO: 130715
  derived and/or modified CDS sequence (opt3) from hemagglutinin__InfluenzaA__ACT36653

SEQ ID NO: 131082 - RNA, 1701 nt, Artificial Sequence
  derived and/or modified CDS sequence (opt3) from hemagglutinin__InfluenzaA__ACT36655
augaaggccauccuggugguccuccuuuacaccuucgcuacagcaaacgccgacacucugugcauuggcuaucacgcgaauaacagcacggauaccguugacacaguguuggagaaaaauguaacugugacccauuccgucaacuuacuggaagauaagcacaaugggaaacuauguaagcucagaggaguggcuccccugcaucuugguaaaugcaacauagccggcuggauccuggggaauccugagugugaaucuuugucaacagcaaguagcugguccuacauuguugagaccucuucgucaggaaacggcacuugcuauccaggugacuuuaucgauuacgaagaacucagggagcagcugagcaguguguccucuuucgaacgguuugagauuuucccgaagacaagcuccuggcccaaucacgacucaaacaagggggucaccgccgcuuguccucaugcaggagccaaaaguuuuuauaagaaucugaucuggcucgugaaaaagggcaacagcuacccaaaauuaucuaaguccuauauaaaugauaagggcaaagaaguacugguucuuugggggauccaccaccccucaacgagcgcugaccaacagaguuuguaccagaacgccgaugcguacguguucgucggaucuucccgcuauagcaagaaauuuaagccugagauugcaauccgaccaaaagugcgugaccaggaggguagaaugaauuacuauuggacucugguggaacccggcgauaagauuaccuucgaggccacagggaaccuagucguuccuagguacgcuuuugccauggaacggaacgcaggaucgggcaucauaauuucugacacuccagugcaugauugcaauaccacaugucaaaccccgaaaggugcuaucaacacgucccuccccuuccagaauauucacccuaucacuaucgggaagugcccaaaguauguaaaaucaacaaagcugcgccuugccaccggacugagaaacgugcccaguauucagagcaggggcuuguuuggcgcgauagccggguucaucgagggagguuggacuggcauggucgacgggugguacggauaucaucaccagaaugaacaaggcuccgguuacgcagcugaccucaaaucuacacagaacgccauugaugagaucaccaauaaggugaacagcguuauagagaaaaugaauacgcaguuuaccgcuguggggaaggaguucaaccaccuggagaagcggauugaaaauuuaaacaaaaaggucgacgauggcuuccuggacaucuggacauacaaugccgagcuccuugugcuguuggaaaacgagcgcacucuagauuaucaugacucaaauguaaagaaccuguacgagaagguucgaagucagcucaaaaacaaugcaaaggaaaucggaaacggcuguuuugaguucuaucacaagugcgauaauaccuguauggaauccgugaaaaacgggacauacgacuauccuaaguacagcgaggaagccaaacugaauagagaggagauugauggagucaaacuugaaucuacuaggaucuaucaaauucuggcuauauacucaaccguggcgaguagcuugguccucgugguuucccugggugcaaucucuuuuuggaugugcucgaacggcagcuuacagugccggauuuguaucuga

SEQ ID NO: 131083 - RNA, 1701 nt, Artificial Sequence; identical to SEQ ID NO: 130704
  derived and/or modified CDS sequence (opt3) from hemagglutinin__InfluenzaA__ACT36658

SEQ ID NO: 131084 - RNA, 1701 nt, Artificial Sequence; identical to SEQ ID NO: 130743
  derived and/or modified CDS sequence (opt3) from hemagglutinin__InfluenzaA__ACT36659

SEQ ID NO: 131085 - RNA, 1701 nt, Artificial Sequence; identical to SEQ ID NO: 130704
  derived and/or modified CDS sequence (opt3) from hemagglutinin__InfluenzaA__ACT36661

SEQ ID NO: 131086 - RNA, 1701 nt, Artificial Sequence; identical to SEQ ID NO: 130717
  derived and/or modified CDS sequence (opt3) from hemagglutinin__InfluenzaA__ACT36663

SEQ ID NO: 131087 - RNA, 1701 nt, Artificial Sequence; identical to SEQ ID NO: 130717
  derived and/or modified CDS sequence (opt3) from hemagglutinin__InfluenzaA__ACT36666

SEQ ID NO: 131088 - RNA, 1701 nt, Artificial Sequence
  derived and/or modified CDS sequence (opt3) from hemagglutinin__InfluenzaA__ACT52687
augaaggccauccuggugguccuccuuuacaccuucgcuacagcaaacgccgacacucugugcauuggcuaucacgcgaauaacagcacggauaccguugacacaguguuggagaaaaauguaacugugacccauuccgucaacuuacuggaagauaagcacaaugggaaacuauguaagcucagaggaguggcuccccugcaucuugguaaaugcaacauagccggcuggauccuggggaauccugagugugaaucuuugucaacagcaaguagcugguccuacauuguugagaccucuucgucagacaacggaacuugcuauccaggcgauuuuaucgacuacgaagaacucagggagcagcugagcaguguguccucuuucgaacgguuugagauuuucccgaagacaagcuccuggcccaaucacgauucaaacaagggugucaccgccgcuuguccucaugcaggggccaaaaguuuuuauaagaaucugaucuggcucgugaaaaagggaaacagcuacccaaaauuaucuaaguccuauauaaaugacaagggcaaagaaguacugguucuuuggggcauccaccaccccucaacgagcgcugaucaacagaguuuguaccagaacgccgacgcguacguguucgucgggucuucccgcuauagcaagaaauuuaagccugagauugcaauccgaccaaaagugcguggacaggaggguagaaugaauuacuauuggacucugguggaacccggcgauaagauuaccuucgaggccacagggaaccuagucguuccuagguacgcuuuugccauggaacggaacgcaggaucgggcaucauaauuucugacacuccagugcaugauugcaauaccacaugucaaaccccgaaaggugcuaucaacacgucccuccccuuccagaauauucacccuaucacuaucgggaagugcccaaaguauguaaaaucaacaaagcugcgccuugccaccggacugagaaacgugcccaguauucagagcaggggcuuguuuggcgcgauagccggguucaucgagggagguuggacuggcauggucgacgggugguacggauaucaucaccagaaugaacaaggcuccgguuacgcagcugaccucaaaucuacacagaacgccauugaugagaucaccaauaaggugaacagcguuauagagaaaaugaauacgcaguuuaccgcuguggggaaggaguucaaccaccuggagaagcggauugaaaauuuaaacaaaaaggucgacgauggcuuccuggacaucuggacauacaaugccgagcuccuugugcuguuggaaaacgagcgcacucuagauuaucaugacucaaauguaaagaaccuguacgagaagguucgaagucagcucaaaaacaaugcaaaggaaaucggaaacggcuguuuugaguucuaucacaagugcgauaauaccuguauggaauccgugaaaaacgggacauacgacuauccuaaguacagcgaggaagccaaacugaauagagaggagauugauggagucaaacuugaaucuacuagguuuuaucaaauccuggcuauuuacucaaccguggcgaguagcuugguccucgugguuucccugggugcaauaucuuucuggaugugcucgaacggcagcuuacagugccggaucuguauuuga

SEQ ID NO: 131089 - RNA, 1701 nt, Artificial Sequence; identical to SEQ ID NO: 130704
  derived and/or modified CDS sequence (opt3) from hemagglutinin__InfluenzaA__ACT54606

SEQ ID NO: 131090 - RNA, 1701 nt, Artificial Sequence; identical to SEQ ID NO: 130717
  derived and/or modified CDS sequence (opt3) from hemagglutinin__InfluenzaA__ACT66146

SEQ ID NO: 131091 - RNA, 1701 nt, Artificial Sequence; identical to SEQ ID NO: 130959
  derived and/or modified CDS sequence (opt3) from hemagglutinin__InfluenzaA__ACT66155

SEQ ID NO: 131092 - RNA, 1701 nt, Artificial Sequence
  derived and/or modified CDS sequence (opt3) from hemagglutinin__InfluenzaA__ACT66162
auggaggccauccuggugguccuccuuuacaccuucgcuacagcaaacgccgacacucugugcauuggcuaucacgcgaauaacagcacggauaccguugacacaguguuggaaaagaauguaacugugacccauuccgucaacuuacuggaggauaaacacaaugggaagcuauguaaacucagaggaguggcuccccugcaucuugguaagugcaacauagccggcuggauccuggggaauccugaaugugagucuuugucaacagcaaguagcugguccuacauuguugaaaccucuucgucagacaacggaacuugcuauccaggcgauuuuaucgacuacgaggagcucagggaacaccugagcaguguguccucuuucgagcgguuugaaauuuucccgaaaacaagcuccuggcccaaucaugauucaaacaagggugucaccgccgcuuguccucacgcaggggccaagaguuuuuauaaaaaucugaucuggcucgugaagaaaggaaacagcuacccaaaguuaucuaaauccuauauaaaugacaagggcaaggagguacugguucuuuggggcauccaccaucccucaacgagcgcugaucagcaaaguuuguaccagaacgccgacgcguacguguucgucgggucuucccgcuauagcaaaaaguuuaaaccugagauugcaauccgaccaaaggugcgugaucaggaaggaagaaugaauuacuauuggacucugguggagcccggugacaaaauuaccuucgaagccacaggcaaccuagucguuccuagguacgcuuuugccauggagcggaacgcagggucgggaaucauaauuucugauacuccagugcacgacugcaauaccacaugucagaccccgaagggcgcuaucaacacgucccuccccuuccaaaauauucauccuaucacuaucgguaaaugcccaaaguauguaaagucaacaaaacugcgccuugccaccgggcugagaaacgugcccaguauucagagcaggggauuguuuggcgcgauagccggcuucaucgaagggggauggacugguauggucgacggcugguacggguaucaccaccagaaugagcagggauccggcuacgcagcugaucucaagucuacacaaaacgccauugacgagaucaccaauaaagugaacagcguuauagaaaagaugaauacgcaguuuaccgcuguggguaaagaguucaaccaucuggaaaagcggauugagaauuuaaacaagaaagucgaugacggguuccuggauaucuggacauacaaugccgaacuccuugugcuguuggagaacgagcgcacucuagacuaucacgauucaaauguaaagaaccuguacgaaaaaguucgaagucagcucaagaacaaugcaaaagagaucggcaacggauguuuugaguucuaucauaagugcgacaauaccuguauggaauccgugaagaacggcacauacgauuauccuaaauacagcgaagaggccaagcugaauagagaggaaauugacggggucaaacuugagucuacuaggaucuaucagauucuggcuauauacucaaccguggcgaguagcuugguccucgugguuucccugggagcaaucucuuuuuggaugugcucgaacgguagcuuacaaugccggauuuguaucuga

SEQ ID NO: 131093 - RNA, 1701 nt, Artificial Sequence; identical to SEQ ID NO: 130717
  derived and/or modified CDS sequence (opt3) from hemagglutinin__InfluenzaA__ACT67239

SEQ ID NO: 131094 - RNA, 1701 nt, Artificial Sequence; identical to SEQ ID NO: 130717
  derived and/or modified CDS sequence (opt3) from hemagglutinin__InfluenzaA__ACT67255

SEQ ID NO: 131095 - RNA, 1701 nt, Artificial Sequence; identical to SEQ ID NO: 130704
  derived and/or modified CDS sequence (opt3) from hemagglutinin__InfluenzaA__ACT68102

SEQ ID NO: 131096 - RNA, 1701 nt, Artificial Sequence
  derived and/or modified CDS sequence (opt3) from hemagglutinin__InfluenzaA__ACT68103
augaaggccauccuggugguccuccuuuacaccuucgcuacagcaaacgccgacacucugugcauuggcuaucacgcgaauaacagcacggauaccguugacacaguguuggagaaaaauguaacugugacccauuccgucaacuuacuggaagauaagcacaaugggaaacuauguaagcucagaggaguggcuccccugcaucuugguaaaugcaacauagccggcuggauccuggggaauccugagugugaaucuuugucaacagcaaguagcugguccuacauuguugagaccucuucgucagacaacggaacuugcuauccaggcgauuuuaucgacuacgaggagcucagggagcagcugagcaguguguccucuuucgaacgguuugagauuuucccgaagacaagcuccuggcccaaucacgauucaaacaagggugucaccgccgcuuguccucaugcaggggccaaaaguuuuuauaagaaucugaucuggcucgugaaaaagggaaacagcuacccaaaauuaucuaaguccuauauaaaugacaagggcaaagaaguacugguucuuuggggcauccaccaccccucaacgagcgcugaucaacagaguuuguaccagaacgccgacgcguacguguucgucgggucuucccgcuauagcaagaaauuuaagccugagauugcaauccgaccaaaagugcgugaucaggagggaagaaugaauuacuauuggacucugguggaacccggugacaagauuaccuucgaggccacaggcaaccuagucguuccuagguacgcuuuugccauggaacggaacgcagggucgggaaucauaauuucugauacuccagugcaugacugcaauaccacaugucaaacccucaaaggcgcuaucaacacgucccugccguuccagaauauucaccccaucacuaucgguaagugcccuaaguauguaaaaucaacaaaacuucgccuggccaccggguugagaaacgugccaaguauucagagcaggggacucuuuggcgcgauagccggcuucaucgaagggggauggacugguauggucgacggcugguacggguaucaucaccagaaugaacaaggauccggcuacgcagcugaucugaaaucuacacagaacgccauugacgagaucaccaauaaggugaacagcguuauagagaaaaugaauacgcaguuuaccgcuguggguaaggaguucaaccacuuagaaaagcggauugaaaaucugaacaaaaaggucgaugacggguuccucgauaucuggacauacaaugccgagcuucugguguugcuagaaaacgagcgcacucuggacuaucaugauucaaauguaaagaaccucuacgagaagguucgaagucagcugaaaaacaaugcaaaggaaaucggcaacggauguuuugaguucuaucacaagugcgacaauaccuguauggaauccgugaaaaacggcacauacgauuaucccaaguacagcgaggaagccaaacuuaauagagaggagauugacggggucaagcuggaaucuacuaggaucuaucaaauuuuggcuauauacucaaccguggcgaguagccucguccuggugguuuccuuaggagcaaucucuuuuuggaugugcucgaacgguagccugcagugccggauuuguaucuga

SEQ ID NO: 131097 - RNA, 1701 nt, Artificial Sequence; identical to SEQ ID NO: 130704
  derived and/or modified CDS sequence (opt3) from hemagglutinin__InfluenzaA__ACT68104

SEQ ID NO: 131098 - RNA, 1701 nt, Artificial Sequence
  derived and/or modified CDS sequence (opt3) from hemagglutinin__InfluenzaA__ACT68105
augaaggccauccuggugguccuccuuuacaccuucgcuacagcaaacgccgacacucugugcauuggcuaucacgcgaauaacagcacggauaccguugacacaguguuggagaaaaauguaacugugacccauuccgucaacuuacuggaagauaagcacaaugggaaacuauguaagcucagaggaguggcuccccugcaucuugguaaaugcaacauagccggcuggauccuggggaauccugagugugaaucuuugucaacagcaaguagcugguccuacauuguugagaccucuucgucagacaacggaacuugcuauccaggcgauuuuaucgacuacgaggagcucagggagcagcugagcaguguguccucuuucgaacgguuugagauuuucccgaagacaagcuccuggcccaaucacgauucaaacaagggugucaccgccgcuuguccucaugcaggggccaaaaguuuuuauaagaaucugaucuggcucgugaaaaagggaaacagcuacccaaaauuaucuaaguccuauauaaaugacaagggcaaagaaguacugguucuuuggggcauccaccaccccucaacgagcgcugaucaacagaguuuguaccagaacgccgacgcguacguguucgucgggucuuccaaguauagcaaaaaguuuaaaccugagauugcaauccgcccaaaggugcgagaucaggagggacguaugaauuacuauuggacucugguggaacccggugacaaaauuaccuucgaggccacaggcaaccuagucguuccuagauacgcuuuugccauggaaaggaacgcagggucgggaaucauaauuucugauacuccagugcaugacugcaauaccacaugucaaaccccgaagggcgcuaucaacacgucccuccccuuccagaauauucacccuaucacuaucgguaagugcccaaaauauguaaagucaacaaaacugcggcuugccaccgggcugcgcaacgugcccaguauucagagcagaggauuguuuggcgcgauagccggcuucaucgaagggggauggacugguauggucgacggcugguacggguaucaucaccagaaugaacaaggauccggcuacgcagcugaucucaagucuacacagaacgccauugacgagaucaccaauaaagugaacagcguuauagagaagaugaauacgcaguuuaccgcuguggguaaggaauuuaaccaccuggagaaaaggauugaaaauuuaaacaagaaagucgaugacggguuccuggauaucuggacauacaaugccgagcuccuugugcuguuggaaaacgagcggacucuagacuaucaugauucaaauguaaagaaccuguacgagaaaguucgcagucagcucaagaacaaugcaaaggaaaucggcaacggauguuucgaguucuaucacaaaugcgacaauaccuguauggaauccgugaagaacggcacauacgauuauccuaaauacagcggggaggccaagcugaaucgagaagagauugacggagucaaacuugagucuacuagaaucuaucaaauucuggcuauauacucaaccguggcgaguagcuugguccucgugguuucccugggugcaaucucuuuuuggaugugcucgaacggcagcuuacagugcaggauuuguaucuga

SEQ ID NO: 131099 - RNA, 1701 nt, Artificial Sequence; identical to SEQ ID NO: 130704
  derived and/or modified CDS sequence (opt3) from hemagglutinin__InfluenzaA__ACT68106

SEQ ID NO: 131100 - RNA, 1701 nt, Artificial Sequence; identical to SEQ ID NO: 130704
  derived and/or modified CDS sequence (opt3) from hemagglutinin__InfluenzaA__ACT68107

SEQ ID NO: 131101 - RNA, 1701 nt, Artificial Sequence; identical to SEQ ID NO: 130897
  derived and/or modified CDS sequence (opt3) from hemagglutinin__InfluenzaA__ACT68108

SEQ ID NO: 131102 - RNA, 1701 nt, Artificial Sequence
  derived and/or modified CDS sequence (opt3) from hemagglutinin__InfluenzaA__ACT68109
augaaggccauccuggugguccuccuuuacaccuucgcuacagcaaacacugacacgcugugcauuggcuaucacgccaauaacagcaccgauacaguugacacuguguuggagaaaaauguaaccgugacacauuccgucaacuuacuggaagauaagcacaaugggaaacuauguaagcucagaggaguggcgccccugcaucuugguaaaugcaacauagcuggcuggauccuggggaauccugagugugaaucuuugucaaccgccaguagcugguccuacauuguugagacuucuucgucagacaacggaacaugcuauccaggcgauuuuaucgacuacgaggagcucagggagcagcugagcaguguguccucuuucgaacgguuugagauuuucccgaagaccagcuccuggcccaaucacgauucaaacaagggugucacggcagccuguccucaugcuggggcaaaaaguuuuuauaagaaucugaucuggcucgugaaaaagggaaacagcuacccaaaauuaucuaaguccuauauaaaugacaagggcaaagaaguacugguucuuuggggcauccaccaccccucaacuagcgccgaucaacagaguuuguaccagaacgcugacgccuacguguucgucgggaccucucgcuauuccaagaaauuuaagccugagauugcgauccgaccaaaagugcgugaucaggagggaagaaugaauuacuauuggacacugguggaacccggugacaagauuacuuucgaggcaaccggcaaccuagucguuccuagguacgccuuugcuauggaacggaacgccgggagcggaaucauaauuucggauacaccagugcaugacugcaauaccacgugucaaacuccgaaaggcgcaaucaacacaucucuccccuuccagaauauucacccuaucaccaucgguaagugcccaaaguauguaaaauccacuaagcugcgccuugcuacagggcugagaaacgugcccucaauucagaguaggggauuguuuggcgccauagcgggcuucaucgaagggggauggaccgguauggucgacggcugguacggguaucaucaccagaaugaacaaggaagcggcuacgccgcagaucucaaauccacgcagaacgcuauugacgagaucaccaauaaggugaacucuguuauagagaaaaugaauacacaguuuacugccguggguaaggaguucaaccaccuggaaaagcggauugaaaauuuaaacaaaaaggucgaugacggguuccuggauaucuggaccuacaaugcugagcuccuugugcuguuggaaaacgagcgcacacuagacuaucaugauagcaauguaaagaaccuguacgagaagguucgaucacagcucaaaaacaaugccaaggaaaucggcaacggauguuuugaguucuaucacaagugcgacaauacuuguauggaaagugugaaaaacggcaccuacgauuauccuaaguacuccgaggaagcaaaacugaauagagaggagauugacggggucaaacuugaaagcacaaggaucuaucaaauucuggccauauacucuaccguggcuucaaguuugguccucgugguuagccugggagcgaucuccuuuuggaugugcucuaacgguucguuacagugccggauuuguaucuga

SEQ ID NO: 131103 - RNA, 1701 nt, Artificial Sequence; identical to SEQ ID NO: 130704
  derived and/or modified CDS sequence (opt3) from hemagglutinin__InfluenzaA__ACT68110

SEQ ID NO: 131104 - RNA, 1701 nt, Artificial Sequence; identical to SEQ ID NO: 130704
  derived and/or modified CDS sequence (opt3) from hemagglutinin__InfluenzaA__ACT68112

SEQ ID NO: 131105 - RNA, 1701 nt, Artificial Sequence; identical to SEQ ID NO: 130704
  derived and/or modified CDS sequence (opt3) from hemagglutinin__InfluenzaA__ACT68113

SEQ ID NO: 131106 - RNA, 1701 nt, Artificial Sequence; identical to SEQ ID NO: 130704
  derived and/or modified CDS sequence (opt3) from hemagglutinin__InfluenzaA__ACT68115

SEQ ID NO: 131107 - RNA, 1701 nt, Artificial Sequence; identical to SEQ ID NO: 130704
  derived and/or modified CDS sequence (opt3) from hemagglutinin__InfluenzaA__ACT68119

SEQ ID NO: 131108 - RNA, 1701 nt, Artificial Sequence
  derived and/or modified CDS sequence (opt3) from hemagglutinin__InfluenzaA__ACT79133
augaaggccauccuggugguccuccuuuacaccuucgcuacagcaaacgccgacacucugugcauuggcuaucacgcgaauaacagcacggauaccguugacacaguguuggagaaaaauguaacugugacccauuccgucaacuuacuggaagauaagcacaaugggaaacuauguaagcucagaggaguggcuccccugcaucuugguaaaugcaacauagccggcuggauccuggggaauccugagugugaaucuuugucaacagcaaguagcugguccuacauuguugagaccucuucgucagacaacggaacuugcuauccaggcgauuuuaucgacuacgaggagcucagggagcagcugagcaguguguccucuuucgaacgguuugagauuuucccgaagacaagcuccuggcccaaucacgauucaaacaagggugucaccgccgcuuguccucaugcaggggccaaaaguuuuuauaagaaucugaucuggcucgugaaaaagggaaacagcuacccaaaauuaucuaaguccuauauaaaugacaagggcaaagaaguacugguucuuuggggcauccaccaccccucaacgagcgcugaucaacagaguuuguaccagaacgccgacgcguacguguucgucgggacuucucgcuauuccaagaaauuuaagccugagauugcaauccgaccaaaagugcgugaucaggagggaagaaugaauuacuauuggaagcugguggaacccggugacaaaauuaccuucgaggccacaggcaaccuagucguuccuagguacgcuuuugccauggaacggaacgcagggagcggaaucauaauuucggauacuccagugcaugacugcaauaccacaugucaaaccccgaagggcgcuaucaacacgucucuccccuuccagaauauucacccuaucacuaucgguaagugcccaaaauauguaaaguccacaaaacugcgccuugccaccgggcugagaaacgugcccucaauucagaguaggggauuguuuggcgcgauagccggcuucaucgaagggggauggacugguauggucgacggcugguacggguaucaucaccagaaugaacaaggaagcggcuacgcagcugaucucaaguccacacagaacgccauugacgagaucaccaauaaagugaacucuguuauagagaagaugaauacgcaguuuaccgcuguggguaaggaguucaaccaccuggaaaaacggauugaaaauuuaaacaagaaagucgaugacggguuccuggauaucuggacauacaaugccgagcuccuugugcuguuggaaaacgagcgcacucuagacuaucaugauagcaauguaaagaaccuguacgagaaaguucgaucacagcucaagaacaaugcaaaggaaaucggcaacggauguuuugaguucuaucacaaaugcgacaauaccuguauggaaagugugaagaacggcacauacgauuauccuaaauacuccgaggaagccaagcugaauagagaggagauugacggggucaaacuugaaagcacuaggaucuaucaaauucuggcuauauacucuaccguggcgucaaguuugguccucgugguuagccugggagcaaucuccuuuuggaugugcucuaacgguucguuacagugccggauuuguaucuga

SEQ ID NO: 131109 - RNA, 1701 nt, Artificial Sequence; identical to SEQ ID NO: 130704
  derived and/or modified CDS sequence (opt3) from hemagglutinin__InfluenzaA__ACT79143

SEQ ID NO: 131110 - RNA, 1701 nt, Artificial Sequence; identical to SEQ ID NO: 130743
  derived and/or modified CDS sequence (opt3) from hemagglutinin__InfluenzaA__ACT79153

SEQ ID NO: 131111 - RNA, 1701 nt, Artificial Sequence; identical to SEQ ID NO: 131030
  derived and/or modified CDS sequence (opt3) from hemagglutinin__InfluenzaA__ACT79163

SEQ ID NO: 131112 - RNA, 1701 nt, Artificial Sequence; identical to SEQ ID NO: 131030
  derived and/or modified CDS sequence (opt3) from hemagglutinin__InfluenzaA__ACT79173

SEQ ID NO: 131113 - RNA, 1701 nt, Artificial Sequence
  derived and/or modified CDS sequence (opt3) from hemagglutinin__InfluenzaA__ACT79625
augaaggccauccuggugguccuccuuuacaccuucgcuacagcaaacgccgacacucugugcauuggcuaucacgcgaauaacagcacggauaccguugacacaguguuggagaaaaauguaacugugacccauuccgucaacuuacuggaagauaagcacaaugggaaacuauguaagcucagaggaguggcuccccugcaucuugguaaaugcaacauagccggcuggauccuggggaauccugagugugaaucuuugucaacagcaaguagcugguccuacauuguugagaccucuucgucagacaacggaacuugcuauccaggcgauuuuaucgacuacgaagaacucagggagcagcugagcaguguguccucuuucgaacgguuugagauuuucccgaagacaagcuccuggcccaaucacgauucaaacaagggugucaccacggccuguccucaugcuggggcaaaaaguuuuuauaagaaucugaucuggcucgugaaaaagggaaacagcuacccaaaauuaucuaaguccuauauaaaugacaagggcaaagaaguacugguucuuuggggcauccaccaccccucaacuagcgccgaucaacagaguuuguaccagaacgcugacgccuacguguucgucgggaccucucgcuauuccaagaaauuuaagccugagauugcgauccgaccaaaagugcgugaucaggagggaagaaugaauuacuauuggacacugguggaacccggugacaagauuacuuucgaggcaaccggcaaccuagucguuccuagguacgccuuugcuauggaacggaacgccgggagcggaaucauaauuucggauacaccagugcaugacugcaauaccacgugucaaacuccgaaaggcgcaaucaacacaucucuccccuuccagaauauucacccuaucaccaucgguaagugcccaaaguauguaaaauccacuaagcugcgccuugcuacagggcugagaaacgugcccucaauucagaguaggggauuguuuggcgccauagcgggcuucaucgaagggggauggaccgguauggucgacggcugguacggguaucaucaccagaaugaacaaggaagcggcuacgccgcagaucucaaauccacgcagaacgcuauugacgagaucaccaauaaggugaacucuguuauagagaaaaugaauacacaguuuacugccguggguaaggaguucaaccaccuggagaagcggauugaaaauuuaaacaaaaagaucgaugacggguuccuggauaucuggaccuacaaugcugagcuccuuguccuguugaaaaacgaacgcacacuagacuaucaugauagcaaugugaagaaccuguacgagaaaguacgaucacagcucaagaacaaugccaaggagauuggcaacggauguuuugaguucuaucacaaaugcgacaauacuuguauggagaguguuaagaacggcaccuacgauuauccuaaauacuccgaagaggcaaagcugaauagagaagagaucgacggggugaaacuugagagcacaaggauuuaucaaauacuggccaucuacucuaccgucgcuucaaguuuggugcucgucgugagccugggagcgauuuccuuuuggaugugcucuaacgguucguuacagugccggaucuguaucuga

SEQ ID NO: 131114 - RNA, 1701 nt, Artificial Sequence; identical to SEQ ID NO: 130704
  derived and/or modified CDS sequence (opt3) from hemagglutinin__InfluenzaA__ACT79627

SEQ ID NO: 131115 - RNA, 1701 nt, Artificial Sequence
  derived and/or modified CDS sequence (opt3) from hemagglutinin__InfluenzaA__ACT82512
augaaggccauccuggugguccuccuuuacaccuucgcuacagcaaacgccgacacucugugcauuggcuaucacgcgaauaacagcacggauaccguugacacaguguuggagaaaaauguaacugugacccauuccgucaacuuacuggaagauaagcacaaugggaaacuauguaagcucagaggaguggcuccccugcaucuugguaaaugcaacauagccggcuggauccuggggaauccugagugugaaucuuugucaacagcaaguagcugguccuacauuguugagaccucuucgucagacaacggaacuugcuauccaggcgauuuuaucgacuacgaggagcucagggagcagcugagcaguguguccucuuucgaacgguuugagauuuucccgaagacaagcuccuggcccaaucacgauucaaacaagggugucaccgccgcuuguccucaugcaggggccaaaaguuuuuauaagaaucugaucuggcucgugaaaaagggaaacagcuacccaaaauuaucuaaguccuauauaaaugacaagggcaaagaaguacugguucuuuggggcauccaccaccccucaacgagcgcugaucaacagaguuuguaccagaacgccgacgcguacguguucgucgggacuucucgcuauuccaagaaauuuaagccugagauugcaauccgaccaaaagugcgugaucaggagggaagaaugaauuacuauuggacccugguggaacccggugacaagauuacauucgaggccacuggcaaccuagucguuccuagguacgcuuuugccauggaacggaacgcagggagcggaaucauaauuucggauaccccagugcaugacugcaauacaaccugucaaacgccgaaaggcgcuaucaacacuucucuccccuuccagaauauucacccuaucacaaucgguaagugcccaaaguauguaaaauccaccaagcugcgccuugccacugggcugagaaacgugcccucaauucagaguaggggauuguuuggcgcgauagccggcuucaucgaagggggauggacagguauggucgacggcugguacggguaucaucaccagaaugaacaaggaagcggcuacgcagcugaucucaaauccacccagaacgccauugacgagaucacgaauaaggugaacucuguuauagagaaaaugaauacccaguuuacagcuguggguaaggaguucaaccaccuggaaaagcggauugaaaauuuaaacaaaaaggucgaugacggguuccuggauaucuggacuuacaaugccgagcuccuugugcuguuggaaaacgagcgcacccuagacuaucaugauagcaauguuaaaaaccuguacgagaagguacgaucacaguuuaaaaacaaugcaaaggaaaucggcaacggauguuucgaguuuuaucacaagugcgacaauacauguauggaaagugugaaaaacggcacuuacgauuauccuaaguacuccgaggaagccaaacucaauagagaggagauugacggggucaagcuggaaagcaccaggaucuaucaaauucuugcuauauacucuacaguggcgucaagucuggucuuggugguuagccucggagcaaucuccuucuggaugugcucuaacgguucgcugcagugccggauuuguaucuga

SEQ ID NO: 131116 - RNA, 1701 nt, Artificial Sequence; identical to SEQ ID NO: 130717
  derived and/or modified CDS sequence (opt3) from hemagglutinin__InfluenzaA__ACT82513

SEQ ID NO: 131117 - RNA, 1701 nt, Artificial Sequence
  derived and/or modified CDS sequence (opt3) from hemagglutinin__InfluenzaA__ACT82514
augaaggccauccuggugguccuccuuuacaccuucgcuacagcaaacgccgacacucugugcauuggcuaucacgcgaauaacagcacggauaccguugacacaguguuggagaaaaauguaacugugacccauuccgucaacuuacuggaagauaagcacaaugggaaacuauguaagcucagaggaguggcuccccugcaucuugguaaaugcaacauagccggcuggauccuggggaauccugagugugaaucuuugucaacagcaaguagcugguccuacauuguugagaccucuucgucagacaacggaacuugcuauccaggcgauuuuaucgacuacgaggagcucagggagcagcugagcaguguguccucuuucgaacgguuugagauuuucccgaagacaagcuccuggcccaaucacgauucaaacaagggugucaccgccgcuuguccucaugcaggggccaaaaguuuuuauaagaaucugaucuggcucgugaaaaagggaaacagcuacccaaaauuaucuaaguccuauauaaaugacaagggcaaagaaguacugguucuuuggggcauccaccaccccucaacgagcgcugaucaacagaguuuguaccagaacgccgacgcguacguguucgucgggacuucucgcuauuccaagaaauuuaagccugagauugcaauccgaccaaaagugcgugaucaggagggaagaaugaauuacuauuggacccugguggaacccggugacaagauuacauucgaggccacuggcaaccuagucguuccuagguacgcuuuugccauggaacggaacgcagggagcggaaucauaauuucgaauaccccagugcaugauugcaacacaaccugucaaacgccgaaaggcucuaucaauacuucccuccccuuccagaacauucacccuaucacaaucgguaagugcccaaaguauguaaaaucaaccaagcugcgccuugcuacugggcugagaaaugugcccaguauucagagcaggggauuguuuggcgccauagcgggcuucaucgaagggggauggacagguauggucgacggcugguacggguaucaucaccagaacgaacaaggauccggcuacgccgcagaccucaaaucuacccagaaugcuauugaugagaucacgaacaaggugaauagcguuauagagaaaaugaacacccaguuuacagccguggguaaggaguucaaucaccuggaaaagcggauugaaaacuuaaauaaaaaggucgacgauggguuccuggacaucuggacuuacaacgcugagcuccuugugcuguuggaaaaugagcgcacccuagauuaucaugacucaaacguaaagaaccuguacgagaagguucgaagucagcucaaaaauaacgccaaggaaaucggcaauggauguuuugaguucuaucacaagugcgauaacacauguauggaauccgugaaaaauggcacuuacgacuauccuaaguacagcgaggaagcaaaacugaacagagaggagauugauggggucaaacuugaaucuaccaggaucuaucaaauucuggccauauacucaacaguggcuaguagcuugguccucgugguuucccugggagcgaucucuuuuuggaugugcucgaaugguagcuuacagugccggauuuguaucuga

SEQ ID NO: 131118 - RNA, 1701 nt, Artificial Sequence; identical to SEQ ID NO: 130717
  derived and/or modified CDS sequence (opt3) from hemagglutinin__InfluenzaA__ACT82515

SEQ ID NO: 131119 - RNA, 1701 nt, Artificial Sequence
  derived and/or modified CDS sequence (opt3) from hemagglutinin__InfluenzaA__ACT82516
augaaggccauccuggugguccuccuuuacaccuucgcuacagcaaacgccgacacucugugcauuggcuaucacgcgaauaacagcacggauaccguugacacaguguuggagaagaauguaacugugacccauuccgucaacuuacuggaagauaagcacaaugggaaacuauguaagcucagaggaguggcuccccugcaucuugguaaaugcaacauagccggcuggauccuggggaauccugagugugaaucuuugucaacagcaaguagcugguccuacauuguugagaccucuucgucagacaacggaacuugcuauccaggcgauuuuaucgacuacgaggagcucagggagcagcugagcaguguguccucuuucgaacgguuugagauuuucccgaagacaagcuccuggcccaaucacgauucaaacaagggugucaccgccgcuuguccucaugcaggggccaaaaguuuuuauaagaaucugaucuggcucgugaaaaagggaaacagcuacccaaaauuaucuaaguccuauauaaaugacaagggcaaagaaguacugguucuuuggggcauccaccaccccucaacgagcgcugaucaacagaguuuguaccagaacgccgacgcguacguguucgucgggucuucccgcuauagcaagaaauuuaagccugagauugcaauccgaccaaaagugcgugaucaggagggaagaaugaauuacuauuggacucugguggaacccggugacaagauuaccuucgaggccacaggcaaccuaauggucccuagguacgcuuuugccauggaacggaacgcagggucgggaaucauaauuucugauacuccaguucaugacugcaauaccacaugucaaaccccgaaaggcgcuaucaacacgucccuccccuuccacaauauucauccuaucacuaucgguaagugcccaaaguaugugaaaucaacaaagcugcgccuugccaccgggcugagaaacguacccaguauucagagcaggggauuguuuggcgcgauagccggcuucaucgaagggggauggacugguaugguggacggcugguacggguaucaccaccagaaugaacagggauccggcuacgcagcugaucucaaaucuacacaaaacgccauugacgagaucaccaauaaggucaacagcgugauagagaaaaugaauacgcaguuuaccgcuguugguaaggaguucaaccaucuggaaaagcggauugaaaauuuaaacaaaaagguggaugacggguuccuggauaucuggacauacaaugccgagcuccuuguccuguuggaaaacgagcgcacucuagacuaucacgauucaaaugugaaaaaccuguacgagaagguacgaagucagcucaaaaacaaugcaaaggaaaucggcaacggauguuuugaguucuaucauaagugcgacaauaccuguauggaauccguuaaaaacggcacauacgauuauccuaaguacagcgaggaagccaaacugaauagagaggagauugacggggugaaacuugaaucuacuaggaucuaucagauucuggcuauauacucaaccgucgcgaguagcuuggugcucgucgugucccugggagcaaucucuuuuuggaugugcucgaacgguagcuuacaaugccggauuuguaucuga

SEQ ID NO: 131120 - RNA, 1701 nt, Artificial Sequence; identical to SEQ ID NO: 130959
  derived and/or modified CDS sequence (opt3) from hemagglutinin__InfluenzaA__ACT83795

SEQ ID NO: 131121 - RNA, 1701 nt, Artificial Sequence; identical to SEQ ID NO: 130959
  derived and/or modified CDS sequence (opt3) from hemagglutinin__InfluenzaA__ACT83805

SEQ ID NO: 131122 - RNA, 1701 nt, Artificial Sequence; identical to SEQ ID NO: 130717
  derived and/or modified CDS sequence (opt3) from hemagglutinin__InfluenzaA__ACT83815

SEQ ID NO: 131123 - RNA, 1701 nt, Artificial Sequence; identical to SEQ ID NO: 130717
  derived and/or modified CDS sequence (opt3) from hemagglutinin__InfluenzaA__ACT83825

SEQ ID NO: 131124 - RNA, 1701 nt, Artificial Sequence; identical to SEQ ID NO: 130717
  derived and/or modified CDS sequence (opt3) from hemagglutinin__InfluenzaA__ACT83835

SEQ ID NO: 131125 - RNA, 1701 nt, Artificial Sequence; identical to SEQ ID NO: 130810
  derived and/or modified CDS sequence (opt3) from hemagglutinin__InfluenzaA__ACT83845

SEQ ID NO: 131126 - RNA, 1701 nt, Artificial Sequence; identical to SEQ ID NO: 130704
  derived and/or modified CDS sequence (opt3) from hemagglutinin__InfluenzaA__ACT83855

SEQ ID NO: 131127 - RNA, 1701 nt, Artificial Sequence; identical to SEQ ID NO: 130717
  derived and/or modified CDS sequence (opt3) from hemagglutinin__InfluenzaA__ACT83865

SEQ ID NO: 131128 - RNA, 1701 nt, Artificial Sequence; identical to SEQ ID NO: 130959
  derived and/or modified CDS sequence (opt3) from hemagglutinin__InfluenzaA__ACT83875

SEQ ID NO: 131129 - RNA, 1701 nt, Artificial Sequence; identical to SEQ ID NO: 130959
  derived and/or modified CDS sequence (opt3) from hemagglutinin__InfluenzaA__ACT85999

SEQ ID NO: 131130 - RNA, 1701 nt, Artificial Sequence; identical to SEQ ID NO: 130959
  derived and/or modified CDS sequence (opt3) from hemagglutinin__InfluenzaA__ACT86009

SEQ ID NO: 131131 - RNA, 1701 nt, Artificial Sequence; identical to SEQ ID NO: 130717
  derived and/or modified CDS sequence (opt3) from hemagglutinin__InfluenzaA__ACT86019

SEQ ID NO: 131132 - RNA, 1701 nt, Artificial Sequence; identical to SEQ ID NO: 130810
  derived and/or modified CDS sequence (opt3) from hemagglutinin__InfluenzaA__ACT86029

SEQ ID NO: 131133 - RNA, 1701 nt, Artificial Sequence; identical to SEQ ID NO: 130717
  derived and/or modified CDS sequence (opt3) from hemagglutinin__InfluenzaA__ACT86039

SEQ ID NO: 131134 - RNA, 1701 nt, Artificial Sequence; identical to SEQ ID NO: 130717
  derived and/or modified CDS sequence (opt3) from hemagglutinin__InfluenzaA__ACT86059

SEQ ID NO: 131135 - RNA, 1701 nt, Artificial Sequence; identical to SEQ ID NO: 130717
  derived and/or modified CDS sequence (opt3) from hemagglutinin__InfluenzaA__ACT86069

SEQ ID NO: 131136 - RNA, 1701 nt, Artificial Sequence; identical to SEQ ID NO: 130717
  derived and/or modified CDS sequence (opt3) from hemagglutinin__InfluenzaA__ACT86079

SEQ ID NO: 131137 - RNA, 1701 nt, Artificial Sequence; identical to SEQ ID NO: 130717
  derived and/or modified CDS sequence (opt3) from hemagglutinin__InfluenzaA__ACT86089

SEQ ID NO: 131138 - RNA, 1701 nt, Artificial Sequence; identical to SEQ ID NO: 130717
  derived and/or modified CDS sequence (opt3) from hemagglutinin__InfluenzaA__ACT86099

SEQ ID NO: 131139 - RNA, 1701 nt, Artificial Sequence; identical to SEQ ID NO: 130959
  derived and/or modified CDS sequence (opt3) from hemagglutinin__InfluenzaA__ACT86109

SEQ ID NO: 131140 - RNA, 1701 nt, Artificial Sequence; identical to SEQ ID NO: 130717
  derived and/or modified CDS sequence (opt3) from hemagglutinin__InfluenzaA__ACT86119

SEQ ID NO: 131141 - RNA, 1701 nt, Artificial Sequence; identical to SEQ ID NO: 130959
  derived and/or modified CDS sequence (opt3) from hemagglutinin__InfluenzaA__ACT86129

SEQ ID NO: 131142 - RNA, 1701 nt, Artificial Sequence; identical to SEQ ID NO: 130717
  derived and/or modified CDS sequence (opt3) from hemagglutinin__InfluenzaA__ACT86139

SEQ ID NO: 131143 - RNA, 1701 nt, Artificial Sequence
  derived and/or modified CDS sequence (opt3) from hemagglutinin__InfluenzaA__ACU00932
augaaggccauccuggugguccuccuuuacaccuucgcuacagcaaacgccgacacucugugcauuggcuaucacgcgaauaacagcacggauaccguugacacaguguuggagaaaaauguaacugugacccauuccgucaacuuacuggaagauaagcacaaugggaaacuauguaagcucagaggaguggcuccccugcaucuugguaaaugcaacauagccggcuggauccuggggaauccugagugugaaucuuugucaacagcaaguagcugguccuacauuguugagaccucuucgucagacaacggaacuugcuauccaggcgauuuuaucgacuacgaggagcucagggagcagcugagcaguguguccucuuucgaacgguuugagauuuucccgaagacaagcuccuggcccaaucacgauucaaacaagggugucaccgccgcuuguccucaugcaggggccaaaaguuuuuauaagaaucugaucuggcucgugaaaaagggaaacagcuacccaaaauuaucuaaguccuauauaaaugacaagggcaaagaaguacugguucuuuggggcauccaccaccccucaacgagcgcugaucaacagaguuuguaccagaacgccgacgcguacguguucgucgggacuucucgcuauuccaagaauuuuaaaccugagauugcaauccgaccaaaggugcgugaucaggagggaagaaugaacuacuauuggacccugguggaacccggugacaaaauuacauucgaggccacuggcaaccuagucguuccuagguacgcuuuugccauggaacggaaugcagggagcggaaucauaauuucggauaccccagugcaugacugcaacacaaccugucaaacgccgaagggcgcuaucaauacuucucuccccuuccagaacauucacccuaucacaaucgguaaaugcccaaaguauguaaaguccaccaaacugcgccuugccacugggcugagaaaugugcccucaauucagaguaggggauuguuuggcgcgauagccggcuucaucgaagggggauggacagguauggucgacggcugguacggguaucaucaccagaacgaacaaggaagcggcuacgcagcugaucucaaguccacccagaaugccauugacgagaucacgaacaaaguuaauucugugauagagaagaugaacacccaguuuacagcuguggguaaagaguucaaucaccuggaaaagcggauugaaaacuuaaauaagaaagucgaugacggguuccuggauaucuggacuuacaacgccgagcuccuugugcuguuggaaaaugagcgcacccuagacuaucaugauagcaacguaaagaaccuguacgagaaaguucgaucacagcucaagaauaacgcaaaagaaaucggcaauggauguuuugaguucuaucacaagugcgacaacacauguauggaaagugugaagaauggcacuuacgauuauccuaaauacuccgaggaagccaagcugaacagagaggagauugacggggucaaacuugaaagcaccaggaucuaucaaauucuggcuauauacucuacaguggcgucaaguuugguccucgugguuagccugggagcaaucuccuuuuggaugugcucuaaugguucguuacagugccggauuuguaucuga

SEQ ID NO: 131144 - RNA, 1701 nt, Artificial Sequence; identical to SEQ ID NO: 130717
  derived and/or modified CDS sequence (opt3) from hemagglutinin__InfluenzaA__ACU00942

SEQ ID NO: 131145 - RNA, 1701 nt, Artificial Sequence; identical to SEQ ID NO: 130717
  derived and/or modified CDS sequence (opt3) from hemagglutinin__InfluenzaA__ACU00952

SEQ ID NO: 131146 - RNA, 1701 nt, Artificial Sequence
  derived and/or modified CDS sequence (opt3) from hemagglutinin__InfluenzaA__ACU12494
augaagaccaucauugcccugagcuacauacucugccuuguguucgcucagaaacugcccggcaacgacaauuccacagcaacuuuguguuuagggcaccaugccgucccuaacggaacgcugguuaagaccaucacaaaugaucaaauugaggugacuaacgcgaccgaacuuguacagucuucaaguacagguagaaucugcgacagcccacacaggauucucgauggcaaaaauuguacccugaucgacgcucuacugggggauccgcauugcgacggauuucagaacaaggagugggauuuguucguggaacgguccaaagccuauucuaauuguuaccccuaugacgucccugauuacgcaucgcuccgcucacugguggccagcaguggcacucuggaguuuauaaacgaagacuucaauuggacagguguugcucaguccggggagucuuaugcaugcaagcgaggaagcgugaaguccuuuuucucacgucucaacugguuacacgagagugauuacaaauauccagcccugaaugucaccaugcccaacaauggcaaguuugacaaacuuuacaucuggggcgugcaucacccuauuacggauagagaacaaacuagcuuguacguaagggcuucugggcggguuaccguguccacaaagcgcucacagcagacugucaucccaaacauuggaagcagacccugggugaggggucugaguucucggaucuccauauauuggaccauugugaaaccuggcgacauccuacucauuaauagcacagggaaccugaucgccccacgcggauacuucaagauccgaaccggcaagucgucuauuaugagauccgacgcgccgauagguacguguucaagugagugcaucacucccaacgggagcauuccuaaugauaaaccauuucagaacgucaauaggaucacauauggagcauguccccgguacguuaagcaaaacacccuuaaacuggccacuggcaugcguaaugugccugaaaagcagacacgcggcauauucggggcuauugccggauuuaucgagaacgguugggagggcaugguagacgggugguauggauucagacaccagaauagcgaaggcaccggucaggcagcugauuugaaaucuacgcaagccgcgaucgaccagauuaacgggaagcucaauaggcugaucgagaaaaccaacgaaaaguuucaucagauugagaaggaguucagcgaaguggagggccggauacaagauuuagaaaaauacgucgaggacacaaagaucgaucuguggucauauaaugccgaacuccuuguggcacuggagaaccagcacacuauugacuugaccgauagugaaaugaauaaacuauucgagaagacacgaaaacagcugcgcgagaacgcugaagacaugggaaauggcugcuuuaagaucuaccauaagugugauaacgccugcaucggguccauuagaaacggaacuuacgaccacgacguuuauagggaugaggcucucaauaaccgguuccagauaaaagguguggaacugaaguccggcuacaaagacuggauccuuuggauuucuuuugccaucucaugcuuccuguugugugucgugcuccugggguuuauuaugugggcaugccaaaagggaaauauccgcuguaacauaugcaucuga

SEQ ID NO: 131147 - RNA, 1698 nt, Artificial Sequence; identical to SEQ ID NO: 130829
  derived and/or modified CDS sequence (opt3) from hemagglutinin__InfluenzaA__ACU12505

SEQ ID NO: 131148 - RNA, 1701 nt, Artificial Sequence
  derived and/or modified CDS sequence (opt3) from hemagglutinin__InfluenzaA__ACU12516
augaagaccaucauugcccugagcuacauacucugccuuguguucgcucagaaacugcccggcaacgacaauuccacagcaacuuuguguuuagggcaccaugccgucccuaacggaacgaucguuaagaccauuacaaaugaucaaaucgaggugacuaacgcgaccgaacugguacagucuucaaguacagguggcauuugcgacagcccacaccagauccuagauggggagaauuguacccucguggacgcucugcuuggagauccgcagugcgacggcuuucaaaacaaaaagugggaucuguucgucgaaagauccaaagccuauucuaauuguuaccccuaugacgugccugauuacgcaucguugaggucacucguugccagcagugguacucuggaguuuaacaaugaauccuucaacuggacaggggugacccagaauggaacgucuagcgcuugcaagcggcgcuccaacaauucauuuuucagucgacugaacuggcucacucauuuaaaguuuaaauauccagcacugaaugucaccaugcccaacaacgagaaguucgacaaacuuuacauauggggcgugcaccauccuggcacagauaaugaccagaucagcuuguaugcccaggcuucugggcguauuacuguauccaccaagagaucacaacagacaguuaucccaaacauuggaagcaggccccgggugcgcgauaucaguucuagaauauccauuuacuggaccaucgucaaaccuggugacauucugcuaaucaauagcacgggcaaccucaucgccccaaggggguacuuuaagauucggucgggaaagucuuccauaaugcgcucagacgcgccgaucggcaaauguaauagugagugcauuacucccaacgguagcaucccuaaugauaagccauuccagaacgugaaucgaauaacauauggggcaugucccagauacgugaaacagaacacccugaaacuugccacuggaaugaggaaugucccugaaacacaaacccggggcauuuuuggcgcuaucgccggguucaucgagaacggaugggaagguaugguugacggcugguauggguuucgucaccaaaauuccgagggaacgggccaggcagcugaucugaagucuacccaggccgcgauuaaccagaucaaugguaaguugaaccgccucauugggaaaacaaacgagaaguuccaccagauagaaaaggaguucagcgaaguggagggcagaauccaggaccuggaaaaauacguagaggauacuaagauugacuuauggucauauaaugccgagcugcucguggcacuugaaaaccaacauaccaucgaucugacagacagugagaugaauaaauuguuugaaaggacuaagaaacagcuacgggagaacgcugaagauaugggaaauggcugcuucaagaucuaccacaagugugacaacgccugcauuggguccauacgaaauggaaccuaugaucaugacgucuaccgcgacgaggcucugaacaauagauuucagaucaaagguguggagcucaagagcggcuacaaagauuggauucuguggaucucuuucgccauuucaugcuuucuucuguguguugcauugcucggguucaucaugugggccugccagaagggaaacauaagguguaauaucugcauuuga

SEQ ID NO: 131149 - RNA, 1701 nt, Artificial Sequence; identical to SEQ ID NO: 128678
  derived and/or modified CDS sequence (opt3) from hemagglutinin__InfluenzaA__ACU12527

SEQ ID NO: 131150 - RNA, 1701 nt, Artificial Sequence; identical to SEQ ID NO: 130420
  derived and/or modified CDS sequence (opt3) from hemagglutinin__InfluenzaA__ACU12538

SEQ ID NO: 131151 - RNA, 1701 nt, Artificial Sequence; identical to SEQ ID NO: 129616
  derived and/or modified CDS sequence (opt3) from hemagglutinin__InfluenzaA__ACU12549

SEQ ID NO: 131152 - RNA, 1698 nt, Artificial Sequence
  derived and/or modified CDS sequence (opt3) from hemagglutinin__InfluenzaA__ACU12560
augaaggugaaacugcucguccuucugugcaccuucacagccacuuacgcugacacgaucuguauuggcuaucacgcaaacaauagcaccgauacaguugacacuguguuggagaagaacguaaccgugacacauuccgucaauuuacuggaaaacucucacaaugggaaacuaugccuccugaagggaauagcgccccuucagcuggguaacuguucaguggccggcuggaucuuggggaauccugagugcgaacuccugauuaguaaagagagcugguccuacaucguugaaaagccaaacccggagaauggaaccuguuaucccggccauuuugcugauuacgaggaacugagagagcaacucucuucggugagcucauucgaaagguuugagauuuucccuaaggagaguuccuggccaaaccacacugucacaggugugucugccagcugcucccauaauggggaaucaaguuuuuaucggaacuuacuguggcuuaccgggaaaaauggcuuguaccccaaccugagcaagucuuaugcaaauaacaaaggcaaggagguacuuguucucuggggagugcaccacccuccaaacaucggagaccagaauacgcuguaccauacugaaaacgccuacgucuccguggugucaagccacuauagucgcaaauucacccccgagauagcuaagcgaccuaagguccgugaucaggaagguagaaucaauuacuauuggacacuucuggagccaggcgacacuauuaucuuugaggcaaacgggaauuugauugccccgagguacgcuuucgcccucucucggggauuuggcuccgguaucauaaacagcaauguucccauggauaaaugugacgcgaagugccagaccccucaaggggcaauuaacucgucucugccauuccagaaugugcaucccguaacaaucggagaauguccuaaauaugugcgcuccgccaaguuaagaauggucaccggccugaggaacauuccaucaauccagagucggggccucuuuggggcuaucgccggauucauugaggguggcuggacggggaugguggauggaugguacggcuaucaccaccagaaugaacaagguagcggguacgcagcugaccagaaauccacucagaacgccauaaauggcaucacaaacaagguuaauucugugauugagaaaaugaacacccaguuuacugcggucggaaaggaguucaacaagcuagaacgccgaauggagaaucugaacaaaaagguggaugacggcuucaucgauauauggacauacaaugccgaauugcuaguacugcucgagaacgaaagaacccuggacuuucaugacagcaauguuaaaaaccuuuaugagaaggugaaaucacaacugaagaauaacgcaaaggaaauugggaauggaugcuucgaguuuuaccacaaauguaacgaugagugcauggaaagugucaagaaugguacguaugacuaccccaaauauuccgaggaaagcaaguugaacagggagaaaaucgauggcgugaagcucgagucuaugggggucuaccagauccuggcuauuuauucaaccguggccaguagcuuaguucugcuagugucccucggagcuaucucuuucuggaugugcucgaauggcagccugcagugucggauuugcauauga

SEQ ID NO: 131153 - RNA, 1698 nt, Artificial Sequence; identical to SEQ ID NO: 130536
  derived and/or modified CDS sequence (opt3) from hemagglutinin__InfluenzaA__ACU12571

SEQ ID NO: 131154 - RNA, 1698 nt, Artificial Sequence
  derived and/or modified CDS sequence (opt3) from hemagglutinin__InfluenzaA__ACU12582
augaaggugaaacugcucguccuucugugcaccuucacagccacuuacgcugacacgaucuguauuggcuaucacgcaaacaauagcaccgauacaguugacacuguguuggagaagaacguaaccgugacacauuccgucaauuuacuggaaaacucucacaaugggaaacuaugccuccugaagggaauagcgccccuucagcuggguaacuguucaguggccggcuggaucuuggggaauccugagugcgaacuccugauuaguaaagagagcugguccuacaucguugaaaagccaaacccggagaauggaaccuguuaucccggcagauuugcugauuacgaggaacugagggagcaacucucuucggugagcucauucgaacgguuugagauuuucccuaaggagaguuccuggccaaaccauacugucacaggugugucugccagcugcucccacaauggggaaucaaguuuuuaucgcaacuuacuguggcuuaccgggaaaaauggcuuguaccccaaccugagcaagucuuaugcaaauaacaaaggcaaggaggugcuaguucucuggggagugcaucacccuccaaacaucggagaccagaauacgcuguaccacacugaaaacgccuacgucuccguggugucaagccauuauagucgaaaauucacccccgagauagcuaagcguccuaaggucagagaucaggaagguaggaucaauuacuauuggacacuucuggagccaggcgacacuauuaucuuugaggcaaacgggaauuugauugccccgcgguacgcuuucgcccucucucgcggauuuggcuccgguaucauaaacagcaaugcgcccauggauaaaugugacgcaaagugccagaccccucaaggggccauuaacucgucucugccauuccagaauguucaccccgugacaaucggagaauguccuaaauauguaagauccgcuaaguuaaggauggugaccggccugcggaacauuccaucaauccagagucgcggccucuuuggggccaucgcaggauucauugaggguggcuggacggggauggucgauggaugguacggcuaucaucaccagaaugaacaagguagcggguacgcugccgaccagaaauccacucagaacgcgauaaauggcaucacaaacaagguaaauucuguuauugagaaaaugaacacccaguuuacugccgugggaaaggaguucaacaaacuugaacgaagaauggagaaucugaacaaaaaggucgaugacggcuucaucgauauauggacauacaaugcagaauugcuagugcugcucgagaacgaaaggacccuggacuuucacgacagcaauguaaagaaccuuuaugagaagguuaaaucacaacugaagaauaacgcuaaggaaauugggaauggaugcuucgaguuuuaccauaaauguaacgaugagugcauggaaagugugaagaaugguacguaugacuaccccaaauauuccgaggaaagcaaguugaaccgggagaaaaucgauggcgucaagcucgagucuauggggguguaccagauccuggccauuuauucaaccgucgcuaguagcuuagugcugcuaguuucccucggagccaucucuuucuggaugugcucgaauggcagccugcagugucguauuugcauauga

SEQ ID NO: 131155 - RNA, 1698 nt, Artificial Sequence
  derived and/or modified CDS sequence (opt3) from hemagglutinin__InfluenzaA__ACU12593
augaaggugaaacugcucguccuucugugcaccuucacagccacuuacgcugacacgaucuguauuggcuaucacgcaaacaauagcaccgauacaguugacacuguguuggagaagaacguaaccgugacacauuccgucaauuuacuggaaaacucucacaaugggaaacuaugccuccugaagggaauagcgccccuucagcuggguaacuguucaguggccggcuggaucuuggggaauccugagugcgaacuccugauuaguaaagagagcugguccuacaucguugaaaagccaaacccggagaauggaaccuguuaucccggccauuuugcugauuacgaggaacugagagagcaacucucuucggugagcucauucgaaagguuugagauuuucccuaaggagaguuccuggccaaaccacacugucacaggugugucugccagcugcucccauaauggggaaucaaguuuuuaucggaacuuacuguggcuuaccggcaaaaauggauuguaccccaaccugagcaagucuuaugcaaauaacaaagagaaggaaguucuaguacucuggggcgugcaccacccuccaaacaucgucgaccagaaaacgcuguaccgcacugagaaugccuacguguccguggucucaagccauuauagucgaaaguucacccccgaaauagcuaagcguccuaaaguuagagaucaggaggggaggaucaacuacuauuggacacuucuggagccaggagacacuauuaucuuugaagcaaaugguaacuugauugccccgcgguacgcuuucgcccucucucgcggcuuuggguccggaaucauaaauagcaacgcgcccauggauaagugugacgcaaaaugccagaccccucaaggcgccauuaauucgucucugccauuccagaacgugcaccccguaacaaucggugaguguccuaaguaugugagauccgcuaaauuaaggauggucaccgggcugcggaauauuccaucaauccagagucgcggacucuuuggcgccaucgcaggcuucauugaagggggauggacggguaugguggauggcugguacggguaucaucaccagaacgagcaaggaagcggcuacgcugccgaccagaaguccacucagaaugcgauagaugguaucacaaacaaaguuaauucugugauugaaaagaugaacacccaguuuacugccgucgggaaggaguucaauaaacuugagcgaagaauggaaaaccugaacaagaaaguggacgauggcuucaucgacauauggacauacaaugcagaguugcuaguacugcucgaaaacgagaggacccuggacuuucacgauagcaauguuaagaaccuuuaugaaaaagugaagucacaacugaagaauaacgcuaaagagauuggaaauggcugcuucgaguuuuaccauaaguguaacgacgaaugcauggagagugucaaaaaugggacguaugauuaccccaaguauuccgaagagagcaaauugaaccgggagaagaucgacggaaucaagcucgaaucuauggguguguaccagauucuggccaucuauucaaccgucgcuaguagcuuagugcugcuaguuucccucggcgccauuucuuucuggaugugcucgaaugggagccugcagugucguauaugcaucuga

SEQ ID NO: 131156 - RNA, 1701 nt, Artificial Sequence; identical to SEQ ID NO: 130717
  derived and/or modified CDS sequence (opt3) from hemagglutinin__InfluenzaA__ACU13090

SEQ ID NO: 131157 - RNA, 1701 nt, Artificial Sequence; identical to SEQ ID NO: 130717
  derived and/or modified CDS sequence (opt3) from hemagglutinin__InfluenzaA__ACU13091

SEQ ID NO: 131158 - RNA, 1701 nt, Artificial Sequence; identical to SEQ ID NO: 130717
  derived and/or modified CDS sequence (opt3) from hemagglutinin__InfluenzaA__ACU13092

SEQ ID NO: 131159 - RNA, 1701 nt, Artificial Sequence; identical to SEQ ID NO: 130717
  derived and/or modified CDS sequence (opt3) from hemagglutinin__InfluenzaA__ACU13093

SEQ ID NO: 131160 - RNA, 1701 nt, Artificial Sequence
  derived and/or modified CDS sequence (opt3) from hemagglutinin__InfluenzaA__ACU13094
augaaggccauccuggugguccuccuuuacaccuucgcuacagcaaacgccgacacucugugcauuggcuaucacgcgaauaacagcacggauaccguugacacaguguuggagaaaaauguaacugugacccauuccgucaacuuacuggaagauaagcacaaugggaaacuauguaagcucagaggaguggcuccccugcaucuugguaaaugcaacauagccggcuggauccuggggaauccugagugugaaucuuugucaacagcaaguagcugguccuacauuguugagaccucuucgucagacaacggaacuugcuauccaggcgauuuuaucgacuacgaagaacucagggagcagcugagcaguguguccucuuucgaacgguuugagauuuucccgaagacaagcuccuggcccaaucacgauucaaacaagggugucaccgccgcuuguccucaugcaggggccaaaaguuuuuauaagaaucugaucuggcucgugaaaaagggaaacagcuacccaaaauuaucuaaguccuauauaaaugacaagggcaaagaaguacugguucuuuggggcauccaccaccccucaacgagcgcugaucaacagaguuuguaccagaacgccgacgcguacguguucgucgggucuucccgcuauagcaagaaauuuaagccugagauugcaauccgaccaaaagugcguggacaggaggguagaaugaauuacuauuggacucugguggaacccggcgauaagauuaccuucgaggccacagggaaccuagucguuccuagguacgcuuuugccauggaacggaacgcaggaucgggcaucauaauuucugacacuccagugcaugauugcaauaccacaugucaaaccccgaaaggugcuaucaacacgucccuccccuuccagaauauucacccuaucacuaucgggaagugcccaaaguauguaaaaucaacaaagcugcgccuugccaccggacugagaaacgugcccaguauucagagcaggggcuuguuuggcgcgauagccggguucaucgagggagguuggacuggcauggucgacgggugguacggauaucaucaccagaaugaacaaggcuccgguuacgcagcugaccucaaaucuacacagaacgccauugaugagaucaccaauaaggugaacagcguuauagagaaaaugaauacgcaguuuaccgcuguggggaaggaguucaaccaccuggagaagcggauugaaaauuuaaacaaaaaggucgacgauggcuuccuggacaucuggacauacaaugccgagcuccuugugcuguuggaaaacgagcgcacucuagauuaucaugacucaaauguaaagaaccuguacgagaagguucgaagucagcucaaaaacaaugcaaaggaaaucggaaacggcuguuuugaguucuaucacaagugcgauaauaccuguauggaauccgugaaaaacgggacauacgacuauccuaaguacagcgaggaagccaaacugaauagagaggagauugauggagucaaacuugaaucuacuaggaucuaucaaauucuggcuauauacucaaccguggcgaguagcuugguccucgugguuucccugggugcaaucucuuuuuggaugugcucgaacggcagcuuacagugccggauuuguaucuga

SEQ ID NO: 131161 - RNA, 1701 nt, Artificial Sequence; identical to SEQ ID NO: 130717
  derived and/or modified CDS sequence (opt3) from hemagglutinin__InfluenzaA__ACU13095

SEQ ID NO: 131162 - RNA, 1701 nt, Artificial Sequence
  derived and/or modified CDS sequence (opt3) from hemagglutinin__InfluenzaA__ACU13096
augaaggccauccuggugguccuccuucacaccuucgcuacagcaaacgccgacacucugugcauuggcuaccaugcgaauaacagcacggauaccguugacacaguguuggagaaaaauguaacugugacccacuccgucaacuuacuggaagauaagcauaaugggaaacuauguaagcucagaggaguggcuccccugcaccuugguaaaugcaacauagccggcuggauccuggggaauccugagugugaaucuuugucaacagcaaguagcugguccuauauuguugagaccucuucgucagacaacggaacuugcuacccaggcgauuuuaucgacuaugaggagcucagggagcagcugagcaguguguccucuuucgaacgguuugagauuuucccgaagacaagcuccuggcccaaucaugauucaaacaagggugucaccgccgcuuguccucacgcaggggccaaaaguuuuuacaagaaucugaucuggcucgugaaaaagggaaacagcuauccaaaauuaucuaaguccuacauaaaugacaagggcaaagaaguacugguucuuuggggcauccaccaucccucaacgagcgcugaucaacagaguuuguaucagaacgccgacgcguacguguucgucgggucuucccgcuacagcaagaaauuuaagccugagauugcaauccgaccaaaagugcgugaucaggagggaagaaugaauuauuacuggacucugguggaacccggugacaagauuaccuucgaggccacaggcaaccuagucguuccuagguaugcuuuugccauggaacggaacgcagggucgggaaucauaauuucugauacuccagugcacgacugcaauaccacaugucaaaccccgaaaggcgcuaucaacacgucccuccccuuccagaauauucauccuaucacuaucgguaagugcccaaaguacguaaaaucaacaaagcugcgccuugccaccgggcugagaaacgugcccaguauucagagcaggggauuguuuggcgcgauagccggcuucaucgaagggggauggacugguauggucgacggcugguauggguaccaccaccagaaugaacaaggauccggcuaugcagcugaucucaaaucuacacagaacgccauugacgagaucaccaauaaggugaacagcguuauagagaaaaugaauacgcaguuuaccgcuguggguaaggaguucaaccaucuggaaaagcggauugaaaauuuaaacaaaaaggucgaugacggguuccuggauaucuggacauacaaugccgagcuccuugugcuguuggaaaacgagcgcacucuagacuaccacgauucaaauguuaaaaaccuguaugagaagguacgaagucagcucaaaaacaaugcaaaggaaaucggcaacggauguuuugaguucuaccauaagugcgacaauaccuguauggaauccgugaaaaacggcacauaugauuacccuaaguauagcgaggaagccaaacugaauagagaggagauugacggggucacucuugaaucuaccaggaucuaccaaauucuggcuauauauucaacaguggcgaguagcuugguccucgugguuucccugggagcaaucucuuuuuggaugugcucgaacgguagcuuacagugccggauuuguaucuga

SEQ ID NO: 131163 - RNA, 1701 nt, Artificial Sequence; identical to SEQ ID NO: 130717
  derived and/or modified CDS sequence (opt3) from hemagglutinin__InfluenzaA__ACU13098

SEQ ID NO: 131164 - RNA, 1701 nt, Artificial Sequence
  derived and/or modified CDS sequence (opt3) from hemagglutinin__InfluenzaA__ACU13099
augaaggccauccuggugguccuccuuuacaccuucgcuacagcaaacgccgacacucugugcauuggcuaucacgcgaauaacagcacggauaccguugacacaguguuggagaaaaauguaacugugacccauuccgucaacuuacuggaagauaagcacaaugggaaacuauguaagcucagaggaguggcuccccugcaucuugguaaaugcaacauagccggcuggauccuggggaauccugagugugaaucuuugucaacagcaaguagcugguccuacauuguugagaccucuucgucagacaacggaacuugcuauccaggcgauuuuaucgacuacgaagaacucagggagcagcugagcaguguguccucuuucgaacgguuugagauuuucccgaagacaagcuccuggcccaaucacgauucaaacaagggugucaccgccgcuuguccucaugcaggggccaaaaguuuuuauaagaaucugaucuggcucgugaaaaagggaaacagcuacccaaaauuaucuaaguccuauauaaaugacaagggcaaagaaguacugguucuuuggggcauccaccaccccucaacgagcgcugaucaacagaguuuguaccagaacgccgacgcguacguguucgucgggacuucucgcuauuccaagaaauuuaagccugagauugcaauccgaccaaaagugcgugagcaggaaggaagaaugaauuacuauuggacccugguggagcccggugauaagauuacauucgaagccacuggcaaccuagucguuccuagguacgcuuuugccauggagcggaacgcagggagcggaaucauaauuucggacaccccagugcaugauugcaauacaaccugucaaacgccgaaaggcgcuaucaacacuucucuccccuuccagaauauucacuccaucacaaucgguaagugcccuaaguauguaaaaucaaccaagcugcgccuugccacugggcugagaaacgugccaaguauucagagcaggggauuguuuggcgcgauagccggcuucaucgaagggggauggacagguauggucgacggcugguacggguaucaucaccagaaugagcaaggauccggcuacgcagcugaccucaaaucuacccagaacgccauugaugagaucacgaauaaggugaacagcguuauagaaaagaugaauacccaguuuacagcuguggguaaggaguucaaccaccuggaaaagcggauugagaauuuaaacaaaaaggucgacgauggguuccuggacaucuggacuuacaaugccgaacuccuugugcuguuggagaacgagcgcacccuagauuaucaugacucaaauguuaaaaaccuguacgaaaagguacgaagucagcucaaaaacaaugcaaaggagaucggcaacggauguuuugaguucuaucacaagugcgauaauacauguauggaguccgugaaaaacggcacuuacgacuaucccaaguacagcgaagaggccaaacugaauagagaggaaauugauggggucaaacuugagucuaccaggaucuaucaaauucuggcuauauacucaacaguggcgaguagcuugguccucgugguuucccugggagcaaucucuuuuuggaugugcucgaacgguagcuuacagugccggauuuguaucuga

SEQ ID NO: 131165 - RNA, 1701 nt, Artificial Sequence
  derived and/or modified CDS sequence (opt3) from hemagglutinin__InfluenzaA__ACU13129
augaaggccauccuggugguccuccuuuacaccuucgcuacagcaaacgccgacacucugugcauuggcuaucacgcgaauaacagcacggauaccguugacacaguguuggagaaaaauguaacugugacccauuccgucaacuuacuggaagauaagcacaaugggaaacuauguaagcucagaggaguggcuccccugcaucuugguaaaugcaacauagccggcuggauccuggggaauccugagugugaaucuuugucaacagcaaguagcugguccuacauuguugagaccucuucgucagacaacggaacuugcuauccaggcgauuuuaucgacuacgaagaacucagggagcagcugagcaguguguccucuuucgaacgguuugagauuuucccgaagacaagcuccuggcccaaucacgauucaaacaagggugucaccgccgcuuguccucaugcaggggccaaaaguuuuuauaagaaucugaucuggcucgugaaaaagggaaacagcuacccaaaauuaucuaaguccuauauaaaugacaagggcaaagaaguacugguucuuuggggcauccaccaccccucaacgagcgcugaucaacagaguuuguaccagaacgccgacgcguacguguucgucgggacuucucgcuauuccaagaaauuuaagccugagauugcaauccgaccaaaagugcgugagcaggaaggaagaaugaauuacuauuggacccugguggagcccggugauaagauuacauucgaagccacuggcaaccuagucguuccuagguacgcuuuugccauggagcggaacgcagggagcggaaucauaauuucggacaccccagugcaugauugcaauacaaccugucaaacgccgaaaggcgcuaucaacacuucucuccccuuccagaauauucacccuaucacaaucgguaagugcccaaaguauguaaaauccaccaagcugcgccuugccacugggcugagaaacgugcccucaauucagaguaggggauuguuuggcgcgauagccggcuucaucgaagggggauggacagguauggucgacggcugguacggguaucaucaccagaaugagcaaggaagcggcuacgcagcugaccucaaauccacccagaacgccauugaugagaucacgaauaaggugaacucuguuauagagaaaaugaauacccaguuuacagcugugggugaggaguucaaccaccuggaaaagcggauugaaaauuuaaacaagaaagucgacgauggguuccuggacaucuggacuuacaaugccgagcuccuugugcuguuggagaacgaacgcacccuagauuaucaugacagcaauguaaagaaccuguacgagaaaguucgaucacagcucaagaacaaugcaaaagaaaucggcaacggauguuuugaguucuaucacaagugcgauaauacauguauggaaagugugaagaacggcacuuacgacuauccuaaauacuccgaggaggccaagcugaauagagaagagauugauggggucaaacuugaaagcaccaggaucuaucaaauucuggcuauauacucuacaguggcgucaaguuugguccucgugguuagccugggagcaaucuccuuuuggaugugcucuaacgguucguuacagugccggauuuguaucuga

SEQ ID NO: 131166 - RNA, 1701 nt, Artificial Sequence; identical to SEQ ID NO: 130717
  derived and/or modified CDS sequence (opt3) from hemagglutinin__InfluenzaA__ACU16795

SEQ ID NO: 131167 - RNA, 1701 nt, Artificial Sequence; identical to SEQ ID NO: 130717
  derived and/or modified CDS sequence (opt3) from hemagglutinin__InfluenzaA__ACU16858

SEQ ID NO: 131168 - RNA, 1701 nt, Artificial Sequence; identical to SEQ ID NO: 130717
  derived and/or modified CDS sequence (opt3) from hemagglutinin__InfluenzaA__ACU16930

SEQ ID NO: 131169 - RNA, 1701 nt, Artificial Sequence; identical to SEQ ID NO: 130717
  derived and/or modified CDS sequence (opt3) from hemagglutinin__InfluenzaA__ACU16993

SEQ ID NO: 131170 - RNA, 1701 nt, Artificial Sequence; identical to SEQ ID NO: 130717
  derived and/or modified CDS sequence (opt3) from hemagglutinin__InfluenzaA__ACU17059

SEQ ID NO: 131171 - RNA, 1701 nt, Artificial Sequence; identical to SEQ ID NO: 130717
  derived and/or modified CDS sequence (opt3) from hemagglutinin__InfluenzaA__ACU17126

SEQ ID NO: 131172 - RNA, 1701 nt, Artificial Sequence; identical to SEQ ID NO: 130808
  derived and/or modified CDS sequence (opt3) from hemagglutinin__InfluenzaA__ACU17187

SEQ ID NO: 131173 - RNA, 1701 nt, Artificial Sequence; identical to SEQ ID NO: 130717
  derived and/or modified CDS sequence (opt3) from hemagglutinin__InfluenzaA__ACU17258

SEQ ID NO: 131174 - RNA, 1701 nt, Artificial Sequence
  derived and/or modified CDS sequence (opt3) from hemagglutinin__InfluenzaA__ACU17389
auggaggccauccuggugguccuccuuuacaccuucgcuacagcaaacgccgacacucugugcauuggcuaucacgcgaauaacagcacggauaccguugacacaguguuggaaaagaauguaacugugacccauuccgucaacuuacuggaggauaaacacaaugggaagcuauguaaacucagaggaguggcuccccugcaucuugguaagugcaacauagccggcuggauccuggggaauccugaaugugagucuuugucaacagcaaguagcugguccuacauuguugaaaccucuucgucagacaacggaacuugcuauccaggcgauuuuaucgacuacgaggagcucagggaacagcugagcaguguguccucuuucgagcgguuugaaauuuucccgaaaacaagcuccuggcccaaucacgauucaaacaagggugucaccgccgcuuguccucaugcaggggccaagaguuuuuauaaaaaucugaucuggcucgugaagaaaggaaacagcuacccaaaguuaucuaaauccuauauaaaugacaagggcaaggagguacugguucuuuggggcauccaccaccccucaacgagcgcugaucaacagaguuuguaccagaacgccgacgcguacguguucgucgggucuucccgcuauagcaaaaaguuuaaaccugagauugcaauccgaccaaaggugcgugaucaggaaggaagaaugaauuacuauuggacucugguggagcccggugacaaaauuaccuucgaagccacaggcaaccuagucguuccuagguacgcuuuugccauggagcggaacgcagggucgggaaucauaauuucugauacuccagugcaugacugcaauaccgcuugucaaacaccgaagggcgccaucaacaccucccuccccuuccacaauauucauccuaucacgaucgguaaaugcccaaaguauguaaagucaacuaaacugcgccuugcgacagggcugagaaacgugcccaguauucagagcaggggauuguuuggcgccauagcaggcuucaucgaagggggauggaccgguauggucgacggcugguacggguaucaccaccagaaugagcagggauccggcuacgcugccgaucucaagucuacucaaaacgcuauugacgagaucacaaauaaagugaacagcguuauagaaaagaugaauacccaguuuacggccguggguaaagaguucaaccaucuggaaaagcggauugagaauuuaaacaagaaagucgaugacggguuccuggauaucuggaccuacaaugcagaacuccuugugcuguuggagaacgagcgcacacuagacuaucacgauucaaauguaaagaaccuguacgaaaaaguucgaagucagcucaagaacaaugccaaagagaucggcaacggauguuuugaguucuaucauaagugcgacaauacuuguauggaauccgugaagaacggcaccuacgauuauccuaaauacagcgaagaggcuaagcugaauagagaggaaauugacggggucaaacuugagucuacaaggaucuaucagauucuggcgauauacucaacuguggcaaguagcuugguccucgugguuucccugggagccaucucuuuuuggaugugcucgaacgguagcuuacaaugccggauuuguaucuga

SEQ ID NO: 131175 - RNA, 1701 nt, Artificial Sequence; identical to SEQ ID NO: 130717
  derived and/or modified CDS sequence (opt3) from hemagglutinin__InfluenzaA__ACU17450

SEQ ID NO: 131176 - RNA, 1701 nt, Artificial Sequence; identical to SEQ ID NO: 130717
  derived and/or modified CDS sequence (opt3) from hemagglutinin__InfluenzaA__ACU17521

SEQ ID NO: 131177 - RNA, 1701 nt, Artificial Sequence; identical to SEQ ID NO: 130704
  derived and/or modified CDS sequence (opt3) from hemagglutinin__InfluenzaA__ACU27041

SEQ ID NO: 131178 - RNA, 1698 nt, Artificial Sequence
  derived and/or modified CDS sequence (opt3) from hemagglutinin__InfluenzaA__ACU27406
augaaggugaaacugcucguccuucugugcaccuucacagccacuuacgcugacacgaucuguauuggcuaucacgcaaacaauagcaccgauacaguugacacuguguuggagaagaacguaaccgugacacauuccgucaauuuacuggaaaacucucacaaugggaaacuaugccuccugaagggaauagcgccccuucagcuggguaacuguucaguggccggcuggaucuuggggaauccugagugcgaacuccugauuaguaaagagagcugguccuacaucguugaaaagccaaacccggagaauggaaccuguuaucccggccauuuugcugauuacgaggaacugagagagcaacucucuucggugagcucauucgaaagguuugagauuuucccuaaggagaguuccuggccaaaccacacugucacaggugugucugccagcugcucccauaauggggaaucaaguuuuuaucggaacuuacuguggcuuaccggaaagaauggcuuguaccccaaccugagcaagucuuaugcaaauaacaaagagaaggaaguucuaguacucuggggcgugcaccacccuccaaacaucgucgaccagaaaacgcuguaccgcacugagaaugccuacguguccguggucucaagccauuauagucgaaaguucacccccgaaauagcuaagcguccuaaaaucagagaucaggaggggaggauuaacuacuauuggacacuucuggagccaggagacacuaucauuuuugaagcaaaugguaacuugaucgccccgcgguacgcuuucgcccucucucgcggcuuuggguccggaauaauuaauagcaacgcgcccauggauaagugugacgcaaaaugccagaccccucaaggcgccaucaauucgucucugccauuccagaacguucaccccgugacaauuggugaguguccuaaguauguaagauccgcuaaauuaaggauggugaccgggcugcggaauaucccaucaauccagagucgcggacucuuuggcgccauugcaggcuucauagaagggggauggacggguauggucgauggcugguacggguaucaucaccagaacgagcaaggaagcggcuacgcugccgaccagaaguccacucagaaugcgaucaacgguauuacaaauaaagugaacucuguuaucgaacgaaugaauacccaguuuacugccguggggaaggaguucaacaaacuugagagaaggauggaaaaccugaauaaaaaggucgaugacggcuucauagauauuuggacauacaacgcagaguugcuagugcugcucgaaaaugagcggacccuggacuuucacgacagcaacguuaaaaaucuuuaugaaaagguaaaaucacaacugaagaacaaugcuaaggagaucggaaacggcugcuucgaguuuuaccauaaauguaaugaugaaugcauggagagugugaagaacgggacguaugacuaccccaaauauuccgaagagagcaaguugaaucgugagaaaaucgauggagucaagcucgaaucuauggguguguaccagauucuggccaucuauucaaccgucgcuaguagcuuagugcugcuaguuucccucggcgccauuucuuucuggaugugcucgaacgggagccugcagugucgcauaugcaucuga

SEQ ID NO: 131179 - RNA, 1698 nt, Artificial Sequence
  derived and/or modified CDS sequence (opt3) from hemagglutinin__InfluenzaA__ACU27407
augaaggugaaacugcucguccuucugugcaccuucacagccacuuacgcugacacgaucuguauuggcuaucacgcaaacaauagcaccgauacaguugacacuguguuggagaagaacguaaccgugacacauuccgucaauuuacuggaaaacucucacaaugggaaacuaugccuccugaagggaauagcgccccuucagcuggguaacuguucaguggccggcuggaucuuggggaauccugagugcgaacuccugauuaguaaagagagcugguccuacaucguugaaaagccaaacccggagaauggaaccuguuaucccggccauuuugcugauuacgaggaacugagagagcaacucucuucggugagcucauucgaaagguuugagauuuucccuaaggagaguuccuggccaaaccacacugucacaggugugucugccagcugcucccauaauggggaaucaaguuuuuaucggaacuuacuguggcuuaccggcaaaaauggauuguaccccaaccugagcaagucuuaugcaaauaacaaagagaaggaaguucuaguacucuggggcgugcaccacccuccaaacaucgucgaccagaaaacgcuguaccgcacugagaaugccuacguguccguggucucaagccauuauagucgaaaguucacccccgaaauagcuaagcguccuaaaguuagagaucaggaggggaggaucaacuacuauuggacacuucuggagccaggagacacuauuaucuuugaagcaaaugguaacuugauugccccgcgguacgcuuucgcccucucucgcggcuuuggguccggaaucauaaauagcaacgcgcccauggauaagugugacgcaaaaugccagaccccucaaggcgccauuaauucgucucugccauuccagaacgugcaccccguaacaaucggugaguguccuaaguaugugagauccgcuaaauuaaggauggucaccgggcugcggaauauuccaucaauccagagucgcggacucuuuggcgccaucgcaggcuucauugaagggggauggacggguaugguggauggcugguacggguaucaucaccagaacgagcaaggaagcggcuacgcugccgaccagaaguccacucagaaugcgauaaacgguaucacaaauaaaguuaacucugugauugaaaagaugaauacccaguuuacugccgucgggaaggaguucaacaaacuugagcgaagaauggaaaaccugaauaagaaaguggaugacggcuucaucgauauauggacauacaacgcagaguugcuaguacugcucgaaaaugagaggacccuggacuuucacgacagcaacguuaagaaucuuuaugaaaaagugaagucacaacugaagaacaaugcuaaagagauuggaaacggcugcuucgaguuuuaccauaaguguaaugaugaaugcauggagagugucaaaaacgggacguaugacuaccccaaguauuccgaagagagcaaauugaaucgggagaagaucgauggagugaagcucgaaucuaugggugucuaccagauccuggccauuuauucaaccguggcuaguagcuuaguucugcuagugucccucggcgccaucucuuucuggaugugcucgaacgggagccugcagugucguauuugcauauga

SEQ ID NO: 131180 - RNA, 1701 nt, Artificial Sequence; identical to SEQ ID NO: 130704
  derived and/or modified CDS sequence (opt3) from hemagglutinin__InfluenzaA__ACU29949

SEQ ID NO: 131181 - RNA, 1701 nt, Artificial Sequence
  derived and/or modified CDS sequence (opt3) from hemagglutinin__InfluenzaA__ACU29979
augaaggccauccuggugguccuccuuuacaccuucgcugcagccaacgcggacacacugugcauuggcuaucacgcuaauaacagcacugauacgguugacaccguguuggagaaaaauguaacagugacucauuccgucaacuuacuggaagauaagcacaaugggaaacuauguaagcucagaggaguggcaccccugcaucuugguaaaugcaacauagccggcuggauccuggggaauccugagugugaaucuuugucaaccgccaguagcugguccuacauuguugagacaucuucgucagacaacggaaccugcuauccaggcgauuuuaucgacuacgaggagcucagggagcagcugagcaguguguccucuuucgaacgguuugagauuuucccgaagacuagcuccuggcccaaucacgauucaaacaagggugucacagcugcauguccucaugccggggcuaaaaguuuuuauaagaaucugaucuggcucgugaaaaagggaaacagcuacccaaaauuaucuaaguccuauauaaaugacaagggcaaagaaguacugguucuuuggggcauccaccaccccucaaccagcgccgaucaacagaguuuguaccagaacgcggacgcauacguguucgucgggacgucucgcuauuccaagaaauuuaagccugagauugccauccgaccaaaagugcgugaucaggagggaagaaugaauuacuauuggacucugguggaacccggugacaagauuaccuucgaggcuacaggcaaccuagucguuccuagguacgccuuugcaauggaacggaacgcugggagcggaaucauaauuucggauacuccagugcaugacugcaauaccacaugucaaaccccgaaaggcgccaucaacacgucucuccccuuccagaauauucacccuaucacuaucgguaagugcccaaaguauguaaaauccacaaagcugcgccuugcgaccgggcugagaaacgugcccucaauucagaguaggggauuguuuggcgccauagcaggcuucaucgaagggggauggacugguauggucgacggcugguacggguaucaucaccagaaugaacaaggaagcggcuacgcugccgaucucaaauccacacagaacgcuauugacgagaucaccaauaaggugaacucuguuauagagaaaaugaauacgcaguuuaccgccguggguaaggaguucaaccaccuggaaaagcggauugaaaauuuaaacaaaaaggucgaugacggguuccuggauaucuggacauacaaugcagagcuccuugugcuguuggaaaacgagcgcacucuagacuaucaugauagcaauguaaagaaccuguacgagaagguucgaucacagcucaaaaacaaugccaaggaaaucggcaacggauguuuugaguucuaucacaagugcgacaauaccuguauggaaagugugaaaaacggcacauacgauuauccuaaguacuccgaggaagcuaaacugaauagagaggagauugacggggucaaacuugaaagcacuaggaucuaucaaauucuggcgauauacucuaccguggcaucaaguuugguccucgugguuagccugggagccaucuccuuuuggaugugcucuaacgguucguuacagugccggauuuguaucuga

SEQ ID NO: 131182 - RNA, 1701 nt, Artificial Sequence; identical to SEQ ID NO: 130717
  derived and/or modified CDS sequence (opt3) from hemagglutinin__InfluenzaA__ACU29989

SEQ ID NO: 131183 - RNA, 1704 nt, Artificial Sequence
  derived and/or modified CDS sequence (opt3) from hemagglutinin__InfluenzaA__ACU29999
augaaggccauccuggugguccuccuuuacaccuucgcuacagcaaacgccgacacucugugcauuggcuaucacgcgaauaacagcacggauaccguugacacaguguuggagaaaaauguaacugugacccauuccgucaacuuacuggaagauaagcacaaugggaaacuauguaagcucagaggaguggcuccccugcaucuugguaaaugcaacauagccggcuggauccuggggaauccugagugugaaucuuugucaacagcaaguagcugguccuacauuguugagaccucuucgucagacaacggaacuugcuauccaggcgauuuuaucgacuacgaggagcucagggagcagcugagcaguguguccucuuucgaacgguuugagauuuucccgaagacaagcuccuggcccaaucacgauucaaacaagggugucaccgccgcuuguccucaugcaggggccaaaaguuuuuauaagaaucugaucuggcucgugaaaaagggaaacagcuacccaaaauuaucuaaguccuauauaaaugacaagggcaaagaaguacugguucuuuggggcauccaccaccccucaacgagcgcugaucaacagaguuuguaccagaacgccgacgcguacguguucgucgggacuucucgcuauuccaagaaauuuaagccugagauugcaauccgaccaaaagugcgugaucaggagggaagaaugaauuacuauuggacccugguggaacccggugacaagauuacauucgaggccacuggcaaccuagucguuccuagguacgcuuuugccauggaacggaacgcagggagcggaaucauaauuucggauaccccagugcaugacugcaauacaaccugucaaacgccgaaaggcgcuaucaacacuucucuccccuuccagaauauucacccuaucacaaucgguaagugcccaaaguauguaaaauccaccaagcugcgccuugccacugggcugagaaacgugcccucaauucagaguaggggauuguuuggcgcgauagccggcuucaucgaagggggauggacagguauggucgacggcugguacggguaucaucaccagaaugaacaaggaagcggcuacgcagcugaucucaaauccacccagaacgccauugacgagaucacgaauaaggugaacucuguuauagagaaaaugaauacccaguuuacagcuguggguaaggaguucaaccaccuggaaaagcggauugaaaauuuaaacaaaaaggucgaugacggguuccuggauaucuggacuuacaaugccgagcuccuugugcuguuggaaaacgagcgcacccuagacuaucaugauagcaauguaaagaaccuguacgagaagguucgaucacagcucaaaaacaaugcaaaggaaaucggcaacggauguuuugaguucuaucacaagugcgacaauacauguauggaaagugugaaaaacggcacuuacgauuauccuaaguacuccgaggaagccaaacugaauagagaggagauugacggggucaaacuugaaagcaccaggaucuaucaaauucuggcuauauacucuacaguggcgucaaguuugguccucgugguuagccugggagcaaucuccuuuuggaugugcucuaacgguucguuacugcagugccggauuuguaucuga

SEQ ID NO: 131184 - RNA, 1704 nt, Artificial Sequence
  derived and/or modified CDS sequence (opt3) from hemagglutinin__InfluenzaA__ACU30009
auggaggccauccuggugguccuccuuuacaccuucgcuacagcaaacgccgacacucugugcauuggcuaucacgcgaauaacagcacggauaccguugacacaguguuggaaaagaauguaacugugacccauuccgucaacuuacuggaggauaaacacaaugggaagcuauguaaacucagaggaguggcuccccugcaucuugguaagugcaacauagccggcuggauccuggggaauccugaaugugagucuuugucaacagcaaguagcugguccuacauuguugaaaccucuucgucagacaacggaacuugcuauccaggcgauuuuaucgacuacgaggagcucagggaacagcugagcaguguguccucuuucgagcgguuugaaauuuucccgaaaacaagcuccuggcccaaucacgauucaaacaagggugucaccgccgcuuguccucaugcaggggccaagaguuuuuauaaaaaucugaucuggcucgugaagaaaggaaacagcuacccaaaguuaucuaaauccuauauaaaugacaagggcaaggagguacugguucuuuggggcauccaccaccccucaacgagcgcugaucaacagaguuuguaccagaacgccgacgcguacguguucgucgggucuucccgcuauagcaaaaaguuuaaaccugagauugcaauccgaccaaaggugcgugaucaggaaggaagaaugaauuacuauuggacucugguggagcccggugacaaaauuaccuucgaagccacaggcaaccuagucguuccuagguacgcuuuugccauggagcggaacgcagggucgggaaucauaauuucugauacuccagugcaugacugcaauaccacaugucaaaccccgaagggcgcuaucaacacgucccuccccuuccacaauauucauccuaucacuaucgguaaaugcccaaaguauguaaagucaacaaaacugcgccuugccaccgggcugagaaacgugcccaguauucagagcaggggauuguuuggcgcgauagccggcuucaucgaagggggauggacugguauggucgacggcugguacggguaucaccaccagaaugagcagggauccggcuacgcagcugaucucaagucuacacaaaacgccauugacgagaucaccaauaaagugaacagcguuauagaaaagaugaauacgcaguuuaccgcuguggguaaagaguucaaccaucuggaaaagcggauugagaauuuaaacaagaaagucgaugacggguuccuggauaucuggacauacaaugccgaacuccuugugcuguuggagaacgagcgcacucuagacuaucacgauucaaauguaaagaaccuguacgaaaaaguucgaagucagcucaagaacaaugcaaaagagaucggcaacggauguuuugaguucuaucauaagugcgacaauaccuguauggaauccgugaagaacggcacauacgauuauccuaaauacagcgaagaggccaagcugaauagagaggaaauugacggggucaaacuugagucuacuaggaucuaucagauucuggcuauauacucaaccguggcgaguagcuugguccucgugguuucccugggagcaaucucuuuuuggaugugcucggguuacggcagcuuacaaugccggauuuguaucuga

SEQ ID NO: 131185 - RNA, 1701 nt, Artificial Sequence; identical to SEQ ID NO: 131077
  derived and/or modified CDS sequence (opt3) from hemagglutinin__InfluenzaA__ACU30019

SEQ ID NO: 131186 - RNA, 1701 nt, Artificial Sequence; identical to SEQ ID NO: 130897
  derived and/or modified CDS sequence (opt3) from hemagglutinin__InfluenzaA__ACU30093

SEQ ID NO: 131187 - RNA, 1701 nt, Artificial Sequence
  derived and/or modified CDS sequence (opt3) from hemagglutinin__InfluenzaA__ACU30103
augaaggccauccuggugguccuccuuuacaccuucgcuacagcaaacgccgacacucugugcauuggcuaucacgcgaauaacagcacggauaccguugacacaguguuggagaaaaauguaacugugacccauuccgucaacuuacuggaagauaagcacaaugggaaacuauguaagcucagaggaguggcuccccugcaucuugguaaaugcaacauagccggcuggauccuggggaauccugagugugaaucuuugucaacagcaaguagcugguccuacauuguugagaccucuucgucagacaacggaacuugcuauccaggcgauuuuaucgacuacgaggagcucagggagcagcugagcaguguguccucuuucgaacgguuugagauuuucccgaagacaagcuccuggcccaaucacgauucaaacaagggugucaccgccgcuuguccucaugcaggggccaaaaguuuuuauaagaaucugaucuggcucgugaaaaagggaaacagcuacccaaaauuaucuaaguccuauauaaaugacaagggcaaagaaguacugguucuuuggggcauccaccaccccucaacgagcgcugaucaacagaguuuguaccagaacgccgacgcguacguguucgucgggacuucucgcuauuccaagaaauuuaagccugagauugcaauccgaccaaaagugcgugaucaggagggaagaaugaauuaccauuggacccugguggaacccggugacaagauuacauucgaggccacuggcaaccuagucguuccuagguaugcuuuugccauggaacggaacgcagggagcggaaucauaauuucggauaccccagugcacgacugcaauacaaccugucaaacgccgaaaggcgcuaucaacacuucucuccccuuccagaauauucauccuaucacaaucgguaagugcccaaaguacguaaaauccaccaagcugcgccuugccacugggcugagaaacgugcccucaauucagaguaggggauuguuuggcgcgauagccggcuucaucgaagggggauggacagguauggucgacggcugguauggguaccaccaccagaaugaacaaggaagcggcuaugcagcugaucucaaauccacccagaacgccauugacgagaucacgaauaaggugaacucuguuauagagaaaaugaauacccaguuuacagcuguggguaaggaguucaaccaucuggaaaagcggauugaaaauuuaaacaaaaaggucgaugacggguuccuggauaucuggacuuacaaugccgagcuccuugugcuguuggaaaacgagcgcacccuagacuaccacgauagcaauguaaagaaccuguaugagaagguucgaucacagcucaaaaacaaugcaaaggaaaucggcaacggauguuuugaguucuaccauaagugcgacaauacauguauggaaagugugaaaaacggcacuuaugauuacccuaaguauuccgaggaagccaaacugaauagagaggagauugacggggucaaacuugaaagcaccaggaucuaccaaauucuggcuauauauucuacaguggcgucaaguuugguccucgugguuagccugggagcaaucuccuuuuggaugugcucuaacgguucguuacagugccggauuuguaucuga

SEQ ID NO: 131188 - RNA, 1704 nt, Artificial Sequence
  derived and/or modified CDS sequence (opt3) from hemagglutinin__InfluenzaA__ACU30112
auggaggccauccuggugguccuccuuuacaccuucgcuacagcaaacgccgacacucugugcauuggcuaucacgcgaauaacagcacggauaccguugacacaguguuggaaaagaauguaacugugacccauuccgucaacuuacuggaggauaaacacaaugggaagcuauguaaacucagaggaguggcuccccugcaucuugguaagugcaacauagccggcuggauccuggggaauccugaaugugagucuuugucaacagcaaguagcugguccuacauuguugaaaccucuucgucagacaacggaacuugcuauccaggcgauuuuaucgacuacgaggagcucagggaacagcugagcaguguguccucuuucgagcgguuugaaauuuucccgaaaacaagcuccuggcccaaucacgauucaaacaagggugucaccgccgcuuguccucaugcaggggccaagaguuuuuauaaaaaucugaucuggcucgugaagaaaggaaacagcuacccaaaguuaucuaaauccuauauaaaugacaagggcaaggagguacugguucuuuggggcauccaccaccccucaacgagcgcugaucaacagaguuuguaccagaacgccgacgcguacguguucgucgggucuucccgcuauagcaaaaaguuuaaaccugagauugcaauccgaccaaaggugcgugaucaggaaggaagaaugaauuacuauuggacucugguggagcccggugacaaaauuaccuucgaagccacaggcaaccuagucguuccuagguacgcuuuugccauggagcggaacgcagggucgggaaucauaauuucugauacuccagugcaugacugcaauaccacaugucaaaccccgaagggcgcuaucaacacgucccuccccuuccacaauauucauccuaucacuaucgguaaaugcccaaaguauguaaagucaacaaaacugcgccuugccaccgggcugagaaacgugcccaguauucagagcaggggauuguuuggcgcgauagccggcuucaucgaagggggauggacugguauggucgacggcugguacggguaucaccaccagaaugagcagggauccggcuacgcagcugaucucaagucuacacaaaacgccauugacgagaucaccaauaaagugaacagcguuauagaaaagaugaauacgcaguuuaccgcuguggguaaagaguucaaccaucuggaaaagcggauugagaauuuaaacaagaaagucgaugacggguuccuggauaucuggacauacaaugccgaacuccuugugcuguuggagaacgagcgcacucuagacuaucacgauucaaauguaaagaaccuguacgaaaaaguucgaagucagcucaagaacaaugcaaaagagaucggcaacggauguuuugaguucuaucauaagugcgacaauaccuguauggaauccgugaagaacggcacauacgauuauccuaaauacagcgaagaggccaagcugaauagagaggaaauugacggggucaaacuugagucuacuaggaucuaucagauucuggcuauauacucaaccguggcgaguagcuugguccucgugguuucccugggagcaaucucuuuuuggaugugcucgcacaugguguuacugcaaugccggauuuguaucuga

SEQ ID NO: 131189 - RNA, 1701 nt, Artificial Sequence
  derived and/or modified CDS sequence (opt3) from hemagglutinin__InfluenzaA__ACU30121
auggaggccauccuggugguccuccuuuacaccuucgcuacagcaaacgccgacacucugugcauuggcuaucacgcgaauaacagcacggauaccguugacacaguguuggaaaagaauguaacugugacccauuccgucaacuuacuggaggauaaacacaaugggaagcuauguaaacucagaggaguggcuccccugcaucuugguaagugcaacauagccggcuggauccuggggaauccugaaugugagucuuugucaacagcaaguagcugguccuacauuguugaaaccucuucgucagacaacggaacuugcuauccaggcgauuuuaucgacuacgaggagcucagggaacagcugagcaguguguccucuuucgagcgguuugaaauuuucccgaaaacaagcuccuggcccaaucacgauucaaacaagggugucaccgccgcuuguccucaugcaggggccaagaguuuuuauaaaaaucugaucuggcucgugaagaaaggaaacagcuacccaaaguuaucuaaauccuauauaaaugacaagggcaaggagguacugguucuuuggggcauccaccaccccucaacgagcgcugaucaacagaguuuguaccagaacgccgacgcguacguguucgucgggucuucccgcuauagcaaaaaguuuaaaccugagauugcaauccgaccaaaggugcgugaucaggaaggaagaaugaauuacuauuggacucugguggagcccggugacaaaauuaccuucgaagccacaggcaaccuagucguuccuagguacgcuuuugccauggagcggaacgcagggucgggaaucauaauuucugauacuccagugcaugacugcaauaccacaugucaaaccccgaagggcgcuaucaacacgucccuccccuuccacaauauucauccuaucacuaucgguaaaugcccaaaguauguaaagucaacaaaacugcgccuugccaccgggcugagaaacgugcccaguauucagagcaggggauuguuuggcgcgauagccggcuucaucgaagggggauggacugguauggucgacggcugguacggguaucaccaccagaaugagcagggauccggcuacgcagcugaucucaagucuacacaaaacgccauugacgagaucaccaauaaagugaacagcguuauagaaaagaugaauacgcaguuuaccgcuguggguaaagaguucaaccaucuggaaaagcggauugagaauuuaaacaagaaagucgaugacggguuccuggauaucuggacauacaaugccgaacuccuugugcuguuggagaacgagcgcacucuagacuaucacgauucaaauguaaagaaccuguacgaaaaaguucgaaaccagcucaagaauaacgcaaaagagaucggcaauggauguuuugaguucuaucauaagugcgacaacaccuguauggaaagugugaagaauggcacauacgauuauccuaaauacuccgaagaggccaagcugaacagagaggaaauugacggggucaaacuugagagcacuaggaucuaucagauucuggcuauauacucuaccguggcgucaaguuugguccucgugguuagccugggagcaaucuccuuuuggaugugcucuaaugguucguuacaaugccggauuuguaucuga

SEQ ID NO: 131190 - RNA, 1701 nt, Artificial Sequence; identical to SEQ ID NO: 130810
  derived and/or modified CDS sequence (opt3) from hemagglutinin__InfluenzaA__ACU31124

SEQ ID NO: 131191 - RNA, 1701 nt, Artificial Sequence; identical to SEQ ID NO: 130749
  derived and/or modified CDS sequence (opt3) from hemagglutinin__InfluenzaA__ACU31143

SEQ ID NO: 131192 - RNA, 1701 nt, Artificial Sequence; identical to SEQ ID NO: 130749
  derived and/or modified CDS sequence (opt3) from hemagglutinin__InfluenzaA__ACU31144

SEQ ID NO: 131193 - RNA, 1701 nt, Artificial Sequence; identical to SEQ ID NO: 130749
  derived and/or modified CDS sequence (opt3) from hemagglutinin__InfluenzaA__ACU31145

SEQ ID NO: 131194 - RNA, 1701 nt, Artificial Sequence; identical to SEQ ID NO: 130897
  derived and/or modified CDS sequence (opt3) from hemagglutinin__InfluenzaA__ACU31146

SEQ ID NO: 131195 - RNA, 1701 nt, Artificial Sequence; identical to SEQ ID NO: 130717
  derived and/or modified CDS sequence (opt3) from hemagglutinin__InfluenzaA__ACU31147

SEQ ID NO: 131196 - RNA, 1701 nt, Artificial Sequence
  derived and/or modified CDS sequence (opt3) from hemagglutinin__InfluenzaA__ACU31148
augaaggccauccuggugauuaugcucuacaccuucgcuacagcaaacgccgacacucuuugcauaggcuaucacgcgaauaacagcacggauaccgucgacacaguucuggagaaaaaugugacuguaacccauuccgugaacuuguuagaagauaagcacaaugggaaacuguguaagcuaagaggagucgcuccccuccaucuggguaaaugcaacaucgccggcuggauucuugggaauccugagugugaaucucugucaacagcaaguagcugguccuacaucguggagaccucuucgucagacaacggaacuugcuauccaggcgauuuuauugacuacgaagaguugagggagcagcucagcaguguuuccucuuucgaacgguuugagaucuucccgaagacaagcuccuggcccaaucacgauucaaacaagggugugaccgccgcuuguccucaugcaggggccaaaaguuuuuauaagaaucugauauggcuggucaaaaagggaaacagcuacccaaaacucucuaaguccuauaucaaugacaagggcaaagaaguguuaguacuguggggcauucaccaccccucaacgagcgcugaucaacagagucuuuaccagaacgccgacgcguacguuuucguggggucuucccgcuauagcaagaaauuuaagccugagaucgcaauucgaccaaaaguccgugaucaggagggaagaaugaauuacuauuggacuuugguggaacccggugacaagaucaccuucgaggccacaggcaaccugguggucccuagguacgcuuuugccauggaacggaacgcagggucgggaauaauuaucucugauacuccaguucaugacugcaauaccacaugucaaaccccgaaaggcgcuauuaacacgucccuacccuuccagaauauccacccuaucacuauugguaagugcccaaaguaugugaaaucaacaaagcuccgccuggccaccgggcuuagaaacguacccaguauacagagcaggggacuguuuggcgcgaucgccggcuucauugaagggggauggacugguaugguggacggcugguacggguaucaucaccagaaugaacaaggauccggcuacgcagcugauuugaaaucuacacagaacgccaucgacgagauaaccaauaaggucaacagcgugauugagaaaaugaauacgcaguuuaccgcuguugguaaggaguucaaccaccucgagaagcggaucgaaaaucugaacaaaaagguggaugacggguucuuagauaucuggacauacaaugccgagcugcucguccuucuggaaaacgagcgcacuuuggacuaucaugauucaaaugugaaaaaccuauacgagaagguacgaagucagcugaaaaacaaugcaaaggaaauuggcaacggauguuuugaguucuaucacaagugcgacaauaccuguauggaauccguuaaaaacggcacauacgauuauccuaaguacagcgaggaagccaaacucaauagagaggagaucgacggggugaagcuggaaucuacuaggauuuaucaaauacuugcuaucuacucaaccgucgcgaguagccugguguuggucgugucccucggagcaauuucuuuuuggaugugcucgaacgguagccugcagugccggaucuguaucuga

SEQ ID NO: 131197 - RNA, 1701 nt, Artificial Sequence; identical to SEQ ID NO: 130704
  derived and/or modified CDS sequence (opt3) from hemagglutinin__InfluenzaA__ACU31149

SEQ ID NO: 131198 - RNA, 1701 nt, Artificial Sequence; identical to SEQ ID NO: 130704
  derived and/or modified CDS sequence (opt3) from hemagglutinin__InfluenzaA__ACU31150

SEQ ID NO: 131199 - RNA, 1701 nt, Artificial Sequence; identical to SEQ ID NO: 130704
  derived and/or modified CDS sequence (opt3) from hemagglutinin__InfluenzaA__ACU31151

SEQ ID NO: 131200 - RNA, 1701 nt, Artificial Sequence; identical to SEQ ID NO: 130704
  derived and/or modified CDS sequence (opt3) from hemagglutinin__InfluenzaA__ACU31152

SEQ ID NO: 131201 - RNA, 1707 nt, Artificial Sequence
  derived and/or modified CDS sequence (opt3) from hemagglutinin__InfluenzaA__ACU46644
auggagaagaucgugcuccuguucgccauugucagccuuguuaaauccgaccagauaugcaucggcuaccacgcuaacaauucuaccgaacaaguggauacaauuauggagaagaacguaacugugacgcaugcacaggacauccuggaaaagacccacaaugggaaguugugugauuuagacggagguaaaccccugauucuaagagauugcagggucgccggcuggcuccuggggaacccuaugugugacgaguuuaucaaugugccagaauggucauauauaguugagaaggcgaacccggugaaugaucuuugcuaccccggagacuucaacgauuaugaggaacugaagcauuugcucagucggaucaaucacuuugagaaaauucagaucauuccuaagagcuccuggucuucgcaugaggcuucacugggcgucagcagugccuguccauaccaggguaaauccucuuucuuucgcaacgugguauggcugaucaagaaaaauagcacauaucccacuauaaagcgauccuacaacaauaccaaccaagaagaccucuuaguucugugguggauucaccacccuaaugaugcagccgagcagacaaaacuuuaucagaacccaaccacuuacaucucaguggggacaaguaccuugaaccagcgucugguccccagaauugcuacgaggagcaaagugaauggacaaucuggccggauggaguucuuuuggacuauccuaaagccuaacgacgcaaucaauuucgaauccaacggcaauuuuauugccccagaauacgcuuauaaaauagugaagaaaggggauucaaccaucaugaaaagcgagcucgaauacggaaacugcaauacaaaaugucagacuccgaugggugccauuaacaguucuaugcccuuccaucacauccauccucugaccauaggcgagugcccaaaguaugucaaguccaaucgccuuguucuggcgacaggguugagaaacagcccccagagggagcggcgccgaaagaagagaggacucuuuggcgcaauugccgguuucaucgaagggggauggcagggcaugguggacggcugguacggguaucaccacucgaaugagcaaggaucugguuacgcugccgacaaagaauccacccagaaggcaaucgauggcguaacgaacaaagucaauucaauuaucgacaagaugaacacucaguuugaggcuguggggagggaguucaaucaucuggaacggcguauugagaacuuaaacaagaaaauggaagauggauuccuggacguguggacauauaaugccgagcuccuuguucugauggaaaacgagcgcaccuuggauuuucacgacaguaaugugaagaaccuauacgauaaagucagacugcaacucagggacaaugcgaaggaacugggcaacgguuguuucgaguuuuaccauaaaugcgaugacgaguguauggaaagcgugcggaaugggacuuaugauuacccucaguauuccgaggaagcccgacuuaagcgcgaggagauaucuggcguaaagcuggaaagcaucggaauuuaccagaucuugucaaucuauaguacaguugcauccagccucgcucuggccauuaugguggcuggcuuaucucuguggaugugcucaaacgggagucuacagugcagaauauguaucuga

SEQ ID NO: 131202 - RNA, 1701 nt, Artificial Sequence
  derived and/or modified CDS sequence (opt3) from hemagglutinin__InfluenzaA__ACU56924
augaaggccauccuggugguccuccuuuacaccuucgcuacagcaaacgccgacacucugugcauuggcuaucacgcgaauaacagcacggauaccguugacacaguguuggagaaaaauguaacugugacccauuccgucaacuuacuggaagauaagcacaaugggaaacuauguaagcucagaggaguggcuccccugcaucuugguaaaugcaacauagccggcuggauccuggggaauccugagugugaaucuuugucaacagcaaguagcugguccuacauuguugagaccucuucgucagacaacggaacuugcuauccaggcgauuuuaucgacuacgaggagcucagggagcagcugagcaguguguccucuuucgaacgguuugagauuuucccgaagacaagcuccuggcccaaucacgauucaaacaagggugucaccgccgcuuguccucaugcaggggccaaaaguuuuuauaagaaucugaucuggcucgugaaaaagggaaacagcuacccaaaauuaucuaaguccuauauaaaugacaagggcaaagaaguacugguucuuuggggcauccaccaccccucaacgagcgcugaucaacagaguuuguaccagaacgccgacgcguacguguucgucgggacuucucgcuauuccaagaaauuuaagccugagauugcaauccgaccaaaagugcgugauagagagggaaggaugaauuacuauuggacccugguggaacccggugacaagauuacauucgaggccacuggcaaccuagucguuccucgguacgcuuuugccauggaacgcaacgcagggagcggaaucauaauuucggauaccccagugcaugacugcaauacaaccugucagacgccgaaaggcgcuaucaacacuucucuccccuuccaaaauauucacccuaucacaaucgguaagugcccaaaguauguaaaauccaccaagcugagacuugccacugggcugaggaacgugcccucaauucagagucggggauuguuuggcgcgauagccggcuucaucgaagggggauggacagguauggucgacggcugguacggguaucaucaccagaaugaacagggaagcggcuacgcagcugaucucaaauccacccaaaacgccauugacgagaucacgaauaaggugaacucuguuauagagaaaaugaauacccaguuuacagcuguggguaaggaguucaaccaccuggaaaagcgcauugaaaauuuaaacaaaaaggucgaugacggguuccuggauaucuggacuuacaaugccgagcuccuugugcuguuggaaaacgagcgaacccuagacuaucaugauagcaauguaaagaaccuguacgagaagguuagaucacagcucaaaaacaaugcaaaggaaaucggcaacggauguuuugaguucuaucacaagugcgacaauacauguauggaaagugugaaaaacggcacuuacgauuauccuaaguacuccgaggaagccaaacugaauagggaggagauugacggggucaaacuugaaagcacccggaucuaucagauucuggcuauauacucuacaguggcgucaaguuugguccucgugguuagccugggagcaaucuccuuuuggaugugcucuaacgguucguuacaaugccguauuuguaucuga

SEQ ID NO: 131203 - RNA, 1701 nt, Artificial Sequence; identical to SEQ ID NO: 131070
  derived and/or modified CDS sequence (opt3) from hemagglutinin__InfluenzaA__ACU56931

SEQ ID NO: 131204 - RNA, 1701 nt, Artificial Sequence; identical to SEQ ID NO: 130717
  derived and/or modified CDS sequence (opt3) from hemagglutinin__InfluenzaA__ACU64792

SEQ ID NO: 131205 - RNA, 1701 nt, Artificial Sequence; identical to SEQ ID NO: 130897
  derived and/or modified CDS sequence (opt3) from hemagglutinin__InfluenzaA__ACU64801

SEQ ID NO: 131206 - RNA, 1701 nt, Artificial Sequence; identical to SEQ ID NO: 130897
  derived and/or modified CDS sequence (opt3) from hemagglutinin__InfluenzaA__ACU64812

SEQ ID NO: 131207 - RNA, 1701 nt, Artificial Sequence; identical to SEQ ID NO: 130366
  derived and/or modified CDS sequence (opt3) from hemagglutinin__InfluenzaA__ACU79871

SEQ ID NO: 131208 - RNA, 1701 nt, Artificial Sequence; identical to SEQ ID NO: 130364
  derived and/or modified CDS sequence (opt3) from hemagglutinin__InfluenzaA__ACU79882

SEQ ID NO: 131209 - RNA, 1701 nt, Artificial Sequence; identical to SEQ ID NO: 130377
  derived and/or modified CDS sequence (opt3) from hemagglutinin__InfluenzaA__ACU79893

SEQ ID NO: 131210 - RNA, 1701 nt, Artificial Sequence; identical to SEQ ID NO: 130377
  derived and/or modified CDS sequence (opt3) from hemagglutinin__InfluenzaA__ACU79904

SEQ ID NO: 131211 - RNA, 1698 nt, Artificial Sequence
  derived and/or modified CDS sequence (opt3) from hemagglutinin__InfluenzaA__ACU79937
augaaggccaaacugcucgugcuucugugcaccuucacagcuacuuacgcagacacgaucuguauuggcuaucacgccaacaauagcaccgauacagucgacacuguuuuggagaagaacgugaccguaacacauuccgugaauuuacuggaagauucucacaacgggaaacuaugccuccugaagggaauagcgccccuucagcuggguaauuguucagucgcuggcuggaucuuggggaacccugagugcgaaagucucauuagcaaagaguccuggucuuacaucguggaaaccccaaauccggagaacggaacuuguuaucccggcuacuuugccgacuaugaggaacugagagagcaacugucgucaguuagcaguuucgaaagguuugagauuuucccuaaggaguccucuuggccaaaucauacagugaccggugucacggcaagcugcucccacaacgggaagucaaguuuuuaccggaaucucuuauggcugacugagaaaaacggacuuuaucccaauuugagcaacucuuacgugaauaacaaggaaaaagaaguacugguucuauggggcgugcaucacccuuccaacaucggcguccagcgcgccauauaccacaccgagaaugcuuaugugucaguggucagcagucauuacucucgacguuucacaccagaaaucgcaaagagacccaaaguuagggggcaggagggacggauuaacuauuacuggacucuccuggagccuggugauaccaucauuuuugaagccaauggcaaccuuaucgcuccaugguaugccuucgcgcugucccgcggguuuggaagcggcauaauuacaucgaaugcaccgaugaacgagugugacgccaagugccagacgccccaaggugcuaucaauucuuccuugccuuuccagaacgugcacccaguaaccauuggggaaugucccaaguacgugagaucaacuaaacucaggauggucacaggacugcggaauaucccuaguauccagagccgcggcuuauuuggcgccauugcaggguucauagagggagguuggaccggcaugauggaugggugguauggauaccaucaccagaacgaacaaggcuccgguuacgcugccgaccagaagucuacucagaaugcgaucaacgggauuacaaauaaagugaacagcguuaucgagaagaugaauacccaguuuacggccgugggcaaagaguucaacaagcuggaacgaagaauggagaaccucaauaaaaaggucgaugacggauuccuugauauauggaccuauaacgcagaacuguuggugcuacuggagaaugaaaggacacucgacuuucacgauucaaacguaaagaaucuguacgagaaaguuaagagucaacuuaaaaacaaugcuaaggagauuggcaacgggugcuucgaauuuuaucauaaauguaauaacgagugcauggaauccgugaagaauggaacuuacgacuauccaaaguacagcgaggagucuaaacugaaccgggaaaagaucgacggugucaaauuggagucaaugggcguguaucagauccucgccauuuacaguaccgucgcuagcucccugguguuacugguuucucuaggggccaucucguucuggaugugcagcaauggaucccuccagugucguauuugcauauga

SEQ ID NO: 131212 - RNA, 1689 nt, Artificial Sequence
  derived and/or modified CDS sequence (opt3) from hemagglutinin__InfluenzaA__ACU79948
auggccaucauuuaccugauacuccuuuucaccgcugugagaggcgaccagaucugcauuggguaucacgcaaacaauagcacagagaaggucgauacuauccuggaaaggaacguuacggugacccaugccaaagacauuuuggagaagacacacaauggaaaauuauguaagcugaacgguauacccccucuagaacucggcgauugcuccaucgcgggguggcugcuuggaaauccagagugugaccggcuguugucuguaccggaauggucauacaucauggagaaagagaacccccgcgauggccucugcuauccugguaguuuuaaugacuacgaagaacugaagcaucugcucagcuccgugaagcacuucgaaaaagucaagauuuuaccaaaagaucgauggacucaacauaccacaaccgggggaucucgugcuugugccgugucgggcaaccccucauuuuucagaaauaugguuuggcugacuaagaaaggcagcgacuauccuguggcaaaggggaguuacaacaauacauccggagagcagaugcuuaucauuugggguguccaccacccaaacgaugagaccgaacagaggacguuguaucagaaugugggcacuuacguaucuguugggaccagcacacugaacaagcgguccacucccgagaucgccacccgcccuaaagugaauggacaaggcgguagaauggaauuuucauggacacuacucgacaugugggauaccauaaacuucgagaguacggggaaccugauugcuccagaauacggauuuaagaucagcaaaagggggucuuccggcauuaugaagacugagggcacacuugagaauugcgaaaccaaaugucagacuccgcugggagcaaucaacacaaccuugcccuuccauaauguccacccucucacgaucggugagugcccaaaguaugugaaaucagaaaagcugguguuagccaccggccugcggaacgucccccagauugagagccgcgggcucuuuggagcuauagccggcuucaucgaagguggguggcagggcaugguugacggaugguacggcuaucaucacaguaaugaucaagggucuggauacgcggcagacaaggaguccacacagaaagccuuugacgguauuacuaacaaugugaacagcguaaucgagaagaugaauacccaguucgaagcugugggcaaagaguuuucgaaccuugaacgaagacuggagaauuugaacaagaaaauggaagauggguuccuagacgucuggacauauaaugccgagcugcucgugcugauggagaacgaaaggacucuugauuuccacgacucuaauguuaagaaccuguacgauaaggugcggaugcaguugcgugacaacgucaaagagcucggaaauggcuguuuugaguucuaucauaagugcgaugacgaguguaugaacuccgugaaaaaugguaccuacgauuacccuaaguaugaggaagagucaaaacugaaccgcaaugaaauaaaggggguaaaguuaaguagcaugggcguuuaccaaauucuggcaaucuaugcuacaguggccggaucccuaucucucgcgaucaugauggccggcauuagcuuuuggaugugcucaaacgggagucugcagugcagaaucuguauuuga

SEQ ID NO: 131213 - RNA, 1689 nt, Artificial Sequence
  derived and/or modified CDS sequence (opt3) from hemagglutinin__InfluenzaA__ACU79959
auggccaucauuuaccugauacuccuuuucaccgcugugagaggcgaccagaucugcauuggguaucacgcaaacaauagcacagagaaggucgauacuauccuggaaaggaacguuacggugacccaugccaaagacauuuuggagaagacacacaauggaaaauuauguaagcugaacgguauacccccucuagaacucggcgauugcuccaucgcgggguggcugcuuggaaauccagagugugaccggcuguugucuguaccggaauggucauacaucauggagaaagagaacccccgcgauggccucugcuauccugguaguuuuaaugacuacgaagaacugaagcaucugcucagcuccgugaagcacuucgaaaaagucaagauuuuaccaaaagaucgauggacucaacauaccacaaccgggggaucucgugcuugugccgugucgggcaaccccucauuuuucagaaauaugguuuggcugacuaagaaaggcagcgacuauccuguggcaaaggggaguuacaacaauacauccggagagcagaugcuuaucauuugggguguccaccacccaaacgaugagaccgaacagaggacguuguaucagaaugugggcacuuacguaucuguugggaccagcacacugaacaagcgguccacucccgagaucgccacccgcccuaaagugaauggacaaggcgguagaauggaauuuucauggacacuacucgacaugugggauaccauaaacuucgagaguacggggaaccugauugcuccagaauacggauuuaagaucagcaaaagggggucuuccggcauuaugaagacugagggcacacuugagaauugcgaaaccaaaugucagacuccgcugggagcaaucaacacaaccuugcccuuccauaauguccacccucucacgaucggugagugcccaaaguaugugaaaucagaaaagcugguguuagccaccggccugcggaacgucccccagauugagagccgcgggcucuuuggagcuauagccggcuucaucgaagguggguggcagggcaugguugacggaugguacggcuaucaucacaguaaugaucaagggucuggauacgcggcagacaaggaguccacacagaaagccuuugacgguauuacuaacaaggugaauagcguaaucgagaaaaugaacacccaguucgaagcugugggcaaggaguuuucgaaucuugaacgaagacuggagaacuugaauaaaaagauggaagauggguuccuagacgucuggacauauaacgccgagcugcucgugcugauggagaaugaaaggacucuugauuuccacgacucuaacguuaagaaucuguacgauaaagugcggaugcaguugcgugacaacgucaaggagcucggaaacggcuguuuugaguucuaucauaaaugcgaugacgaguguaugaacuccgugaagaaugguaccuacgauuacccuaaauaugaggaagagucaaagcugaaucgcaacgaaauaaaggggguaaaauuaaguagcaugggcguuuaccaaauucuggcaaucuaugcuacaguggccggaucccuaucucucgcgaucaugauggccggcauuagcuuuuggaugugcucaaaugggagucugcagugcagaaucuguauuuga

SEQ ID NO: 131214 - RNA, 1701 nt, Artificial Sequence
  derived and/or modified CDS sequence (opt3) from hemagglutinin__InfluenzaA__ACU79970
augaagaccaucauugcccugagcuacauacagugccucguguucgcucaaaaauuucccggcaacgacaauuccacagcaacucuuugucuggggcaccaugccgucccuaacggaacgaucguuaagaccauuacaaaugaucagaucgaggugacuaacgcgaccgaauugguacagucuucaaguacaggugagauuugcgacagcccacaccagaucuuagauggcgaaaauuguacccugauagacgcucuacucggggauccgcaaugcgacggauuccagaacaaaaauugggaucuguuuguggagagauccaaggccuauucuaacuguuaccccuaugacgucccugauuacgcaucgcuuaggucacugguggccagcaguggcacuuuggaguucaauaacgaauccuuuaauuggacagguguuacccagaacgggacgucuagcgcuugcauccggcgcuccaauaacucauucuuuaguaaacucaauuggcugacucauagcaaguucaaguauccagcacugaacgugaccaugcccaacaaugagaacuuugacaaacucuacauuuggggaguccaccauccuggcacagauaaugaccagaucuucuuauaugcccaagcuagcggccgaauuacuguguccaccaagcguucacagcagacaguaaucccaaacauagggagcagacccaggguucggaauauuccuagucgcaucucuauuuacuggaccaucgugaaaccaggagauauccugcuuauuaacuccacggguaauuugauagccccgagaggcuacuuuaagaucaggagcgggaaaucgucuauuaugcgguccgacgcgcccaucggaaaguguaacucagaaugcauaacuccuaauggcaguauuccaaacgacaagcccuuccagaaugucaaccgcaucacauauggugcauguccucgauacgugaaacaaaauacccugaagcuagccacugggaugagaaacgugccagagaaacagacaaggggaaucuuuggcgcuauugccggcuucaucgaaaaugggugggagggaauggucgaugguugguauggcuuccggcaccagaacagcgaggggauuggacaagcagcugaccucaaguccacccaggccgcgauagaucagaucaacggcaaacugaaucgucuuauugguaagacgaacgaaaaauuucaccagaucgagaaggaguucucugaaguugaagggcgcauccaagaccuggagaaguacguggaggauaccaaaauugacuuguggagcuauaaugccgaacuccugguagcauuagagaaccagcauacaauagaucugacugacucagaaaugaauaagcucuuugagaaaaccaagaaacagcuuagagaaaacgcugaggauaugggcaauggaugcuucaagaucuaccacaagugugacaacgccugcauuggcaguaucaggaaugggacauaugaucaugacguguaccgggacgaggcucugaacaaucgauuucagauuaaaggagucgaauugaaguccgguuacaaagauuggauccuauggauaucuuucgccaucucuugcuuucugcucuguauugcacugcuuggcuucaucaugugggccugccaaaaggggaacauucgcuguaauaucugcauauga

SEQ ID NO: 131215 - RNA, 1698 nt, Artificial Sequence
  derived and/or modified CDS sequence (opt3) from hemagglutinin__InfluenzaA__ACU79981
augaaggugaaacugcucguccuucugugcaccuucacagccacuuacgcugacacgaucuguauuggcuaucacgcaaacaauagcaccgauacaguugacacuguguuggagagaaacguaaccgugacacauuccgucaauuuacuggaaaacucucacaaugggaagcuaugccuccugaaaggaauagcgccccuucagcuggguaacuguucaguggccggcuggaucuuggggaauccugagugcgaacuccugauuaguaaggagagcugguccuacaucguugaaaaaccaaacccggagaauggaaccuguuaucccggccauuuugcugauuacgaggaacugagggagcaacucucuucggugagcucauucgaacgguuugagauuuucccuaaggagaguuccuggccaaaccacacugucacaggugugucugccagcugcucccauaauggggaaucaaguuuuuaucgcaacuuacuguggcuuaccggaaagaauggcuuguaccccaaccugagcaaaucuuaugcaaauaacaaggagaaagaaguucuaguacucuggggcgugcaccacccuccaaacaucggggaccagaaggcccuguaccauacggagaaugcuuacgucuccguggugucaagccacuauagucgaaaauucacucccgaaauagcaaagcguccuaaggucagagaucaggagggaaggaucaacuacuauuggacccuucugaaaccaggugacacaauuaucuuugaggccaauggcaacuugauugcuccgcgguacgccuucgcgcucucucgcggguuuggauccggcaucauaaauagcaacgcacccauggauaagugugacgccaaaugccagacuccucaaggugcuauuaauucgucucugccauuccagaacguucaucccgugaccaucggggaauguccuaaguauguaagauccgccaaauuaaggauggugacaggacugcggaauauuccaucaauccagagucgcggccucuuuggcgcaaucgcuggguucauugagggagguuggaccggcauggucgaugggugguacggauaucaccaccagaacgaacaaggcagcgguuacgccgcggaccagaaguccacgcagaaugccauaaacgggaucacuaauaaagugaacucuguuauugagaagaugaauacacaguuuaccgcagugggcaaggaguucaacaaacuugaacgaagaauggagaaccugaauaagaaagucgaugacggauucaucgauauauggacuuacaacgcugaauugcuagugcugcucgagaaugaaaggacacuggacuuucaugacagcaacguaaagaaucuuuaugagaaaguuaagucacaacugaagaacaaugccaaagaaauuggcaacgggugcuucgaguuuuaccacaaguguaaugaugagugcauggaaagugugaaaaacggaaccuaugacuaccccaaguauuccgaggaaagcaaauugaaucgggagaagaucgauggugucaagcucgagucuaugggcguguaccagauccuggcuauuuauucaacggucgccaguagcuuagugcugcuaguuucccucggggcaaucucuuucuggaugugcucgaacggaagccugcagugucguauuugcauauga

SEQ ID NO: 131216 - RNA, 1698 nt, Artificial Sequence
  derived and/or modified CDS sequence (opt3) from hemagglutinin__InfluenzaA__ACU79992
augaaggugaaacugcucguccuucugugcaccuucacagccacuuacgcugacacgaucuguauuggcuaucacgcaaacaauagcaccgauacaguugacacuguguuggagaagaacguaaccgugacacauuccgucaauuuacuggaagauaaccacaaugggaaacuaugccuccugaagggaaaagcgccccuucagcuggguaacuguucuguggccggcuggauauuggggaauccugagugcggacuccugaucucaaaggaaaguuggagcuacauuguugagagaccaaacccggaaaauggcaccuguuaucccggucauuuugcugacuacgaggagcugagggaacaacucuccucugugucgucauucgagcgguuugaaaucuucccuaaggagagcaguuggccaaaccacacugucacagggguguccgccucuugcagccauaauggagaguccucauuuuauaaaaacuuacuguggcuuaccggcaagaauggcuuguaccccaaccugaguaaaagcuaugcaaauaacaaggaaaaagagguucuaguacucuggggagugcaccacccuccaaacauuggggaucagaugacgcuguaccauaaggaaaaugccuacgucucugugguguccucacacuauagccgcaaguucacucccgagaucgcuaaacgaccuaagguccgugaccaggaagguagaauaaacuacuauuggacccuucuggagccaggcgauacaaucauuuuugaggcaaaugggaacuugaucgccccgagguacgcuuucgcccucagucggggauuuggcucugguauuaucaauuccaacgcgcccauggacgaaugugaugcaaaaugccagacuccucaaggggccauaaauagcucgcugccauuccagaacguucaucccgugaccauuggagaguguccuaaguauguacgcucugcuaaauuaagaauggugacaggccugaggaauaucccauccauucagucacggggccucuuuggggccaucgcaggauucaucgaagguggcuggaccgggauggucgacggaugguacggcuaucaccaccagaacgagcaagguaguggguacgcugccgaucaaaagagcacgcagaaugcgauuaacggcauaacuaauaaagugaacuccguuaucgaaaagaugaauacacaguuuaccgccgugggaaaggaguucaacaaacuugagcgccgaauggaaaaccugaauaagaaagucgacgauggcuucauugacguguggacuuacaacgcagaguugcuaguacugcucgaaaaugagagaacacuggacuuucaugauucuaacguuaagaaucuuuaugaaaaagugaagaaccagcugaagaauaacgcuaaagagaucgggaauggaugcuucgaguuuuaccacaaguguaacgacgaaugcauggagagcgucaaaaaugguaccuaugauuaccccaaguauucagaagagaguaaauuguccagggagaagauagacggcgugaagcucgaaagcaugggggucuaccagauucuggccaucuauucuacgguggcuucaaguuuaguucugcuagugagccucggagccaucuccuucuggaugugcucuaacggcucgcugcagugucggauuugcaucuga

SEQ ID NO: 131217 - RNA, 1701 nt, Artificial Sequence; identical to SEQ ID NO: 130482
  derived and/or modified CDS sequence (opt3) from hemagglutinin__InfluenzaA__ACU80003

SEQ ID NO: 131218 - RNA, 1698 nt, Artificial Sequence
  derived and/or modified CDS sequence (opt3) from hemagglutinin__InfluenzaA__ACU80025
augaaggugaaacugcucguccuucugugcaccuucgccgcuacauacgcagacacuaucuguauuggcuaucacgccaacaauagcacggauaccguugacacaguguuggagaagaacguaacugugacccauuccgucaauuuacuggaaaacucucacaaugggaaacuaugccuccugaagggaauagcgccccuucagcuggguaacuguucaguggcuggcuggaucuuggggaauccugagugcgaacuccugauuaguaaagagagcugguccuacaucguugaaaagccaaacccggagaauggaacauguuaucccggccauuuugccgauuacgaggaacugagagagcaacucucuucggugagcucauucgaaagguuugagauuuucccuaaggagaguuccuggccaaaccacaccgucacuggugugucugcaagcugcucccauaauggggaaucaaguuuuuaucggaacuuacuguggcuuacaggcaaaaauggauuguaccccaaccugagcaagucuuaugccaauaacaaagagaaggaaguucuaguacucuggggcgugcaccacccuccaaacaucggggaccagaaagcucuguaccauaccgagaaugcauacgucuccguggugucaagccacuauagucgcaaguucacgcccgaaauagccaagcgaccuaaaguccgugaucaggagggaagaaucaacuacuauuggacucuucuggagccaggugacaccauuaucuuugaagcuaauggcaacuugauugccccgagguacgcguucgcacucucucggggguuuggauccggcaucauaaauagcaacgcccccauggauaagugugacgcuaaaugccagacaccucaaggugccauuaauucgucucugccauuccagaacguucaucccgugacuaucggggaguguccuaaguauguacgcuccgcaaaauuaagaauggugaccggacugaggaauauuccaucaauccagagucggggccucuuuggcgcuaucgccggguucauugaaggagguuggacaggcauggucgaugggugguacggauaucaccaccagaacgagcaaggcagcgguuacgcggccgaccagaaguccacccagaaugcaauaaacgggaucacgaauaaagugaacucuguuauugaaaagaugaauacucaguuuacagcugugggcaaggaguucaacaaacuugagcgccgaauggaaaaccugaauaagaaagucgaugacggauucaucgauauauggaccuacaacgccgaguugcuagugcugcucgaaaaugagagaacucuggacuuucaugacagcaacguaaagaaucuuuaugaaaaaguuaagucacaacugaagaacaaugcuaaagagauuggcaacgggugcuucgaguuuuaccacaaguguaaugaugaaugcauggagagugugaaaaacggaacauaugacuaccccaaguauuccgaagagagcaaauugaauagggagaagaucgauggugucaagcucgaaucuaugggcguguaccagauccuggccauuuauucaaccgucgcaaguagcuuagugcugcuaguuucccucggggccaucucuuucuggaugugcucgaacggaagccugcagugucggauuugcauauga

SEQ ID NO: 131219 - RNA, 1701 nt, Artificial Sequence
  derived and/or modified CDS sequence (opt3) from hemagglutinin__InfluenzaA__ACU80036
augaagaccaucauugcccugagcuacauacucugccuuguguucgcucagaaacugcccggcaacgacaauuccacagcaacuuuguguuuagggcaccaugccgucccuaacggaacgaucguuaagaccauuacaaaugaucaaaucgaggugacuaacgcgaccgaacugguacagucuucaaguacaggugagauuugcgacagcccacaccagauccuagauggcgaaaauuguacccucauagacgcucugcuuggggauccgcagugcgacggauuucaaaacaaaaagugggaucuguucguggagagauccaaagccuauucuaauuguuaccccuaugacgucccugauuacgcaucguugaggucacucguggccagcaguggcacucuggaauuuaacaaugaguccuucaacuggacagguguuacccagaaugggacgucuagcgcuugcauccggcgcuccaacaauucauuuuucagucgacugaacuggcucacucauuuaaaguuuaaguauccagcacugaaugugaccaugcccaacaacgagcaguucgacaaacuuuacauuuggggaguccaccauccuggcacagauaaugaccagaucuuuuuguaugcccaagcuagcggccguauuacugugucuaccaagagaucccagcagacaguaaucccaaacauagggucaaggccccggguucgcaauauuccuagcagaaucaguauuuacuggaccaucgugaaaccaggagauauccugcuaauuaacucuacggguaaucucauagccccgaggggcuacuucaagauccgguccgggaaaagcucgauuaugcgcucugacgcgcccaucggaaaguguuccucagaaugcauaacuccuaacggcaguauuccaaaugacaagcccuuucagaacgucaaucgaaucacauauggugcauguccuagauacgugaaacaaaacacccugaaacuugccacugggaugaggaaugugccagagaagcagacacggggaaucuucggcgcuauugccggcuuuaucgaaaacgggugggagggaauggucgaugguugguauggcuuccgucaccagaauagcgaggggcgcggacaagcagcugaccugaaguccacccaggccgcgauugaucagauaaacggcaaauugaauagacucaucgguaagacgaacgaaaaauuccaccagauugagaaggaauuuucugagguugaagggaggauccaagaccuggagaaguacguggaggauaccaaaaucgacuuauggagcuauaacgccgaacugcucguagcacuugagaaucagcauacaauugaucugacugacucagaaaugaacaaguuguucgagaaaaccaagaaacagcuacgggaaaaugcugaggauauaggcaacggaugcuuuaagaucuaccacaagugugacaaugccugcauuggcaguauccgaaacgggacauaugaucaugacguguaccgcgacgaggcucugaauaacagauuccagauuaaaggagucgaacucaaguccgguuacaaagauuggauccuguggaucagcuuugccauaucuugcuuccuucuguguguggcauugcucggcuuuauuaugugggccugccaaaaggggaauaucagguguaacauuugcaucuga

SEQ ID NO: 131220 - RNA, 1698 nt, Artificial Sequence; identical to SEQ ID NO: 130691
  derived and/or modified CDS sequence (opt3) from hemagglutinin__InfluenzaA__ACU80047

SEQ ID NO: 131221 - RNA, 1701 nt, Artificial Sequence
  derived and/or modified CDS sequence (opt3) from hemagglutinin__InfluenzaA__ACU80058
augaagaccaucauugcccugagcuacauacucugccuuguguucgcucagaaacugcccggcaacgacaauuccacagcaacuuuguguuuagggcaccaugccgucccuaacggaacgaucguuaagaccauuacaaaugaucaaaucgaggugacuaacgcgaccgaacugguacagucuucaaguacagguggcauuugcgacagcccacaccagauccuagauggggagaauuguacccucauagacgcucugcuuggagauccgcagugcgacggcuuucaaaacaaaaagugggaucuguucguggaaagauccaaagccuguucuaauugcuaucccuacgacgucccugauuaugcaucguugaggucacucguggccagcagugguacucuggaguuuaacaaugaauccuucaacuggacagggguuacccagaauggaacgucuagcgcuuguaagcggcgcuccaacaauucauuuuucagucgacugaacuggcucacucauuuaaaguuuaaauacccagcacugaaugugaccaugcccaacaacgagaaguucgacaaacuuuauaucuggggcguccaccauccuggcacagauaaugaccagaucuuuuuguacgcccaggcuagcgggcguauuacugugucuaccaagagaucccaacagacaguaauuccaaacaucggaucaaggccccggguucgcaauauaccuagcagaauuaguaucuauuggaccauugugaaaccaggugauauccugcuaaucaacucuacgggcaaucucauugccccgaggggguacuucaagauacgguccggaaagagcucgaucaugcgcucugacgcgcccauuggcaaaugcaacuccgaguguaucacuccuaaugguucaauaccaaacgacaagcccuuucagaaugucaaccgaauuacauacggggcaugcccuagauaugugaaacagaauacccugaagcuggccacuggaaugaggaacgugccagaaaaacaaacacggggcaucuucggcgcuaucgccggguuuauugagaauggaugggaagguauggucgauggcugguacggguuccgucaccagaacagugagggaaucggccaggcagcugaccuuaagagcacccaagccgcgauuaaucagauaaacgguaaauugaaccgccucaucgggaagacgaaugagaaguuccaccagauugaaaaagaguuuuccgaaguugagggcagaauccaggaucuggaaaaguauguggaggacaccaaaaucgauuuauggucuuacaacgccgagcugcucguagcacuugaaaaucaacauacaauugaccugacugauagcgagaugaacaaguuguucgaaaggaccaaaaagcagcuacgggagaaugcugaagacaugggaaacggcuguuuuaagauauaucacaaaugcgauaaugccugcaucgggucaauucgaaacggaacauacgaccaugauguguaucgcgacgaggcucugaauaacagauuccagaucaagggugucgagcucaaaaguggcuacaaggacuggauucuguggaucuccuuugccauaagcuguuuccuucugugcguggcauugcucggguuuaucaugugggccugucagaaaggaaauauuaggugcaacaucuguauuuga

SEQ ID NO: 131222 - RNA, 1698 nt, Artificial Sequence; identical to SEQ ID NO: 130536
  derived and/or modified CDS sequence (opt3) from hemagglutinin__InfluenzaA__ACU80069

SEQ ID NO: 131223 - RNA, 1698 nt, Artificial Sequence
  derived and/or modified CDS sequence (opt3) from hemagglutinin__InfluenzaA__ACU80080
augaaggugaaacugcucguccuucugugcaccuucacagccacuuacgcugacacgaucuguauuggcuaucacgcaaacaauagcaccgauacaguugacacuguguuggagaagaacguaaccgugacacauuccgucaauuuacuggaaaacucucacaaugggaaacuaugccuccugaagggaauagcgccccuucagcuggguaacuguucaguggccggcuggaucuuggggaauccugagugcgaacuccugauuaguaaagagagcugguccuacaucguugaaaagccaaacccggagaauggaaccuguuaucccggccauuuugcugauuacgaggaacugagagagcaacucucuucggugagcucauucgaaagguuugagauuuucccuaaggagaguuccuggccaaaccacacugucacaggugugucugccagcugcucccauaauggggaaucaaguuuuuaucggaacuuacuguggcuuaccggcaaaaauggauuguaccccaaccugagcaagucuuaugcaaauaacaaagagaaggaaguucuaguacucuggggcgugcaccacccuccaaacaucgucgaccagaaaacgcuguaccgcacugagaaugccuacguguccguggucucaagccauuauagucgaaaguucacccccgaaauagcuaagcguccuaaaguuagagaucaggaggggaggaucaacuacuauuggacacuucuggagccaggagacacuauuaucuuugaagcaaaugguaacuugauugccccgcgguacgcuuucgcccucucucgcggcuuuggguccggaaucauaaauagcaacgcgcccauggauaagugugacgcaaaaugccagaccccucaaggcgccauuaauucgucucugccauuccagaacgugcaccccguaacaaucggugaguguccuaaguaugugagauccgcuaaauuaaggauggucaccgggcugcggaauauuccaucaauccagagucgcggacucuuuggcgccaucgcaggcuucauugaagggggauggacggguaugguggauggcugguacggguaucaucaccagaacgagcaaggaagcggcuacgcugccgaccagaaguccacucagaaugcgauaaacgguaucacaaauaaaguuaacucugugauugaaaagaugaauacccaguuuacugccgucgggaaggaguucaacaaacuugagcgaagaauggaaaaccugaauaagaaaguggaugacggcuucaucgauauauggacauacaacgcagaguugcuaguacugcucgaaaaugagaggacccuggacuuucacgacagcaacguuaagaaucuuuaugaaaaagugaagucacaacugaagaacaaugcuaaagagauuggaaacggcugcuucgaguuuuaccauaaguguaaugaugaaugcauggagagugucaaaaacgggacguaugacuaccccaaguauuccgaagagagcaaauugaaucgggagaagaucgauggaaucaagcucgaaucuauggguguguaccagauucuggccaucuauucaaccgucgcuaguagcuuagugcugcuaguuucccucggcgccauuucuuucuggaugugcucgaacgggagccugcagugucguauaugcaucuga

SEQ ID NO: 131224 - RNA, 1698 nt, Artificial Sequence; identical to SEQ ID NO: 130822
  derived and/or modified CDS sequence (opt3) from hemagglutinin__InfluenzaA__ACU80091

SEQ ID NO: 131225 - RNA, 1701 nt, Artificial Sequence; identical to SEQ ID NO: 130585
  derived and/or modified CDS sequence (opt3) from hemagglutinin__InfluenzaA__ACU80102

SEQ ID NO: 131226 - RNA, 1701 nt, Artificial Sequence
  derived and/or modified CDS sequence (opt3) from hemagglutinin__InfluenzaA__ACU80113
augaagaccaucauugcccugagcuacauacucugccuuguguucgcucagaaauuucccggcaacgacaauuccacagcaacucuguguuuggggcaccaugccgucccuaacggaacgaucguuaagaccauuacaaaugaucaaaucgaggugacuaacgcgaccgaauuaguacagucuucaaguacaggugagauuugcgacagcccacaccagauccuggauggcgaaaauuguacccuaauagacgcucuccugggggauccgcagugcgacggauuccaaaacaaaaauugggaucuuuuuguggagagauccaaggccuauucuaacuguuaccccuaugacgucccugauuacgcaucgcugaggucauugguggccagcaguggcacucucgaguucaauaacgaauccuuuaauuggacagguguuacccagaacgggacgucuagcgcuugcauccggcgcuccaauaacucauucuuuagucgacugaauuggcugacucauagcaaauucaaguauccagcacucaacgugaccaugcccaacaaugagaacuuugacaaguuauacauuuggggaguccaccauccuggcacagauaaugaccagaucuuccuguaugcccaggcuucuggccguauuacuguguccaccaaaagaucacaacagacaguaaucccaaacauagggagcaggccccggguucgcaauauuccuaguagaaucucuauuuacuggaccaucgugaagccaggagauauccuuuugauuaacuccacggguaaucugauagccccgaggggcuacuuuaaaauccggagcgggaagucgucuauuaugcgcuccgacgcgcccaucggaaaauguaacucagaaugcauaacuccuaauggcaguauuccaaacgacaagcccuuccagaaugucaaccgaaucacauauggugcauguccuagauacgugaagcagaauacccuaaaacucgccacugggaugaggaacgugccagagaagcaaacacggggaaucuuuggcgcuauugccggcuucaucgaaaaugggugggagggaauggucgaugguugguauggcuuccgucaccagaacagcgaggggauuggacaggcagcugaccugaaauccacccaagccgcgauagaucagaucaacggcaaacuuaaucgccugauugguaagacgaacgaaaaguuucaccagaucgagaaagaguucucugaaaucgaagggaggauucaggacuuggagaaguacguugaggauaccaagauagaccucuggagcuauaaugccgaacuguuaguggcacuggagaaccaacauacaaucgaucucacugacucagaaaugaauaaacuuuuugagaagaccaaaaagcagcugagagaaaacgcugaggauaugggcaauggaugcuucaaaauuuaccacaagugugacaacgccugcaucggcaguauucggaaugggacauaugaucaugacguauaccgagacgaggcuuugaacaaucgcuuucagaucaagggaguggaacuaaaauccgguuacaagaacuggauacuguggaucagcuucgccauuucuugcuuucuccuguguaucgcacuucugggcuucauuaugugggccugccagaaagggaauaucagauguaacauaugcauuuga

SEQ ID NO: 131227 - RNA, 1701 nt, Artificial Sequence
  derived and/or modified CDS sequence (opt3) from hemagglutinin__InfluenzaA__ACU80135
augaagaccaucauugcccugagcuacauacucugccuuguguucgcucagaaauuucccggcaacgacaauuccacagcaacucuguguuuggggcaccaugccgucccuaacggaacgaugguuaagaccaucacaaaugaucaaauugaggugacuaacgcgaccgaauuaguacagucuucaaguacaggugagaucugcgacagcccacaccagauucuggauggcgaaaauuguacccuaaucgacgcucuccugggggauccgcagugcgacggauuccaaaacaaaaauugggaucuuuuuguggagagauccaaggccuauucuaacuguuaccccuaugacgucccugauuacgcaucgcugaggucauugguggccagcaguggcacucucgaguucaauaacgaauccuuuaauuggacagguguuacccagaacgggacgucuagcgcuugcauacggcgcuccaauaacucauucuuuagucgacugaauuggcugacucauagcaaauucaaguauccagcacucaacgugaccaugcccaacaaugagaacuuugacaaguuauacaucuggggaguccaccauccuggcacagauaaugaccagauuuuccuguaugcccaggcuucuggccguaucacuguguccaccaaaagaucacaacagacaguaauuccaaacaucgggagcaggccccggguucgcaauauaccuaguagaauuucuaucuacuggaccauugugaagccaggagauauccuuuugaucaacuccacggguaaucugauugccccgaggggcuacuuuaaaauacggagcgggaagucgucuaucaugcgcuccgacgcgcccauuggaaaauguaacucagaaugcaucacuccuaauggcaguauaccaaacgacaagcccuuccagaaugucaaccgaauuacauauggugcauguccuagauacgugaagcagaauacccuaaaacucgccacugggaugaggaacgugccagagaagcaaacacggggaaucuuuggcgcuaucgccggcuucauugaaaaugggugggagggaauggucgaugguugguauggcuuccgucaccagaacagcgaggggaucggacaggcagcugaccugaaauccacccaagccgcgauugaucagauaaacggcaaacuuaaucgccugaucgguaagacgaacgaaaaguuucaccagauugagaaagaguucucugaaguugaagggagaauccaggacuuggagaaguacguggaggauaccaagaucgaccucuggagcuauaaugccgaacuguuaguagcacuggagaaccaacauacaauugaucucacugacucagaaaugaauaaacuuuuugagaagaccaaaaagcagcugagggaaaacgcugaggauaugggcaauggaugcuucaaaauauaccacaagugugacaacgccugcaucggcaguauucggaaugggacauaugaucaugacguguaccgagacgaggcuuugaacaaucgcuuucagaucaagggagucgaacuaaaauccgguuacaaggauuggauucuguggaucagcuucgccauaucuugcuuucuccuguguaucgcacuucugggcuucauuaugugggccugccagaaagggaacaucagauguaauauuugcaucuga

SEQ ID NO: 131228 - RNA, 1701 nt, Artificial Sequence
  derived and/or modified CDS sequence (opt3) from hemagglutinin__InfluenzaA__ACU80146
augaagaccaucauugcccugagcuacauacucugccuuguguucgcucagaaacugcccggcaacgacaauuccacagcaacuuuguguuuagggcaccaugccgucccuaacggaacgaucguuaagaccauuacaaaugaucaaaucgaggugacuaacgcgaccgaacugguacagucuucaaguacaggugagauuugcgacagcccacaccagauccuagauggcgaaaauuguacccucauagacgcucugcuuggggauccgcagugcgacggauuucaaaacaaaaagugggaucuguucguggagagauccaaagccuauucuaauuguuaccccuaugacgucccugauuacgcaucguugaggucacucguggccagcaguggcacucuggaauuuaacaaugaguccuucaacuggacagguguuacccagaaugggacgucuagcgcuugcauccggcgcuccaacaauucauuuuucagucgacugaacuggcucacucauagcaaguuuaaguauccagcauuaaaugugaccaugcccaacaacgaggaguucgacaaacuguacauuuggggaguccaccauccuggcacagauaaugaccagaucuuucuuuaugcccaggcuucuggccguauuacuguguccaccaagagaucacaacagacaguaaucccaaacauagggagcaggccccggguucgcaauauuccuaguagaaucucuauuuacuggaccaucgugaaaccaggagauaucuugcugauuaacuccacggguaaucuaauagccccgaggggcuacuucaagauccggagcgggaaaucgucuauuaugcgcuccgacgcgcccaucggaaaguguaacucagaaugcauaacuccuaauggcaguauuccaaacgacaagcccuuucagaaugucaaccgaaucacauauggugcauguccuagauacgugaaacagaauacccucaagcuggccacugggaugaggaacgugccagaaaaacaaacacggggaaucuucggcgcuauugccggcuuuaucgagaaugggugggagggaauggucgaugguugguauggcuuccgucaccagaacagcgaagggauuggacaggcagcugaccuuaaguccacccaagccgcgauagaucagaucaauggcaaacugaaccgcuugauugguaagacgaacgagaaauuccaccagaucgaaaaggaguuuucugaaguugaggggagaauccaggaccucgagaaguacguggaagauaccaaaauugaccuguggagcuauaaugccgaguuacugguagcacucgaaaaccaacauacaauagaucuuacugacucagagaugaauaagcuguucgagaaaaccaagaaacaguugagggaaaacgcugaggauaugggcaauggaugcuuuaagaucuaccacaagugugacaacgccugcauuggcaguauccggaaugggacauaugaucaugacguguaccgagacgaagcucuaaacaaucgcuuccagauuaaaggagucgagcugaaguccgguuacaaagauuggauccucuggaucagcuuugccauaucuugcuuccugcuuuguguggcacuguugggccucauuaugugggccugccagaaggggaacaucagauguaauauuugcaucuga

SEQ ID NO: 131229 - RNA, 1701 nt, Artificial Sequence; identical to SEQ ID NO: 130482
  derived and/or modified CDS sequence (opt3) from hemagglutinin__InfluenzaA__ACU80157

SEQ ID NO: 131230 - RNA, 1698 nt, Artificial Sequence; identical to SEQ ID NO: 131218
  derived and/or modified CDS sequence (opt3) from hemagglutinin__InfluenzaA__ACU80168

SEQ ID NO: 131231 - RNA, 1701 nt, Artificial Sequence; identical to SEQ ID NO: 130482
  derived and/or modified CDS sequence (opt3) from hemagglutinin__InfluenzaA__ACU80179

SEQ ID NO: 131232 - RNA, 1701 nt, Artificial Sequence
  derived and/or modified CDS sequence (opt3) from hemagglutinin__InfluenzaA__ACU80190
augaagaccaucauugcccugagcuacauacucugccuuguguucgcucagaaacugcccggcaacgacaauuccacagcaacuuuguguuuagggcaccaugccgucccuaacggaacgaucguuaagaccauuacaaaugaucaaaucgaggugacuaacgcgaccgaacugguacagucuucaaguacaggugagauuugcgacagcccacaccagauccuagauggcgaaaauuguacccucauagacgcucugcuuggggauccgcagugcgacggauuucaaaacaaaaagugggaucuguucguggagagauccaaagccuauucuaauuguuaccccuaugacgucccugauuacgcaucguugaggucacucguggccagcaguggcacucuggaauuuaacaaugaguccuucaacuggacagguguuacccagaaugggacgucuagcgcuugcauccggcgcuccaacaauucauuuuucagucgacugaacuggcucacucauagcaaguuuaaguauccagcauuaaaugugaccaugcccaacaacgaggaguucgacaaacuguacauuuggggaguccaccauccuggcacagauaaugaccagaucuuucuuuaugcccaggcuucuggccguauuacuguguccaccaagagaucacaacagacaguaaucccaaacauagggagcaggccccggguucgcaauauuccuaguagaaucucuauuuacuggaccaucgugaaaccaggagauaucuugcugauuaacuccacggguaaucuaauagccccgaggggcuacuucaagauccggagcgggaaaucgucuauuaugcgcuccgacgcgcccaucggaaaguguaacucagaaugcauaacuccuaauggcaguauuccaaacgacaagcccuuucagaaugucaaccgaaucacauauggugcauguccuagauacgugaaacagaauacccucaagcuggccacugggaugaggaacgugccagaaaaacaaacacggggaaucuucggcgcuauugccggcuuuaucgagaaugggugggagggaauggucgaugguugguauggcuuccgucaccagaacagcgaagggauuggacaggcagcugaccuuaaguccacccaagccgcgauagaucagaucaauggcaaacugaaccgcuugauugguaagacgaacgagaaauuccaccagaucgaaaaggaguuuucugaaguugaggggagaauccaggaccucgagaaguacguggaagauaccaaaauugaccuguggagcuauaaugccgaguuacugguagcacucgaaaaccaacauacaauagaucuuacugacucagagaugaauaagcuguucgagaaaaccaagaaacaguugagggaaaacgcugaggauaugggcaauggaugcuuuaagaucuaccacaagugugacaacgccugcauuggcaguauccggaaugggacauaugaucaugacguguaccgagacgaagcucuaaacaaucgcuuccagauuaaaggaaucgagcugaaguccgguuacaaagauuggauacucuggaucagcuuugccauuucuugcuuccugcuuugugucgcacuguugggcuuuaucaugugggccugccagaaggggaacauuagauguaauaucugcauauga

SEQ ID NO: 131233 - RNA, 1701 nt, Artificial Sequence
  derived and/or modified CDS sequence (opt3) from hemagglutinin__InfluenzaA__ACU80201
augaagaccaucauugcccugagcuacauacucugccuuguguucgcucagaaacugcccggcaacgacaauuccacagcaacuuuguguuuagggcaccaugccgucccuaacggaacgaucguuaagaccauuacaaaugaucaaaucgaggugacuaacgcgaccgaacugguacagucuucaaguacaggugagauuugcgacagcccacaccagauccuagauggcgaaaauuguacccucauagacgcucugcuuggggauccgcagugcgacggauuucaaaacaaaaagugggaucuguucguggagagauccaaagccuauucuaauuguuaccccuaugacgucccugauuacgcaucguugaggucacucguggccagcaguggcacucuggaauuuaacaaugaguccuucaacuggacagguguuacccagaaugggacgucuagcgcuugcauccggcgcuccaacaauucauuuuucagucgacugaacuggcucacucauuuaaaguuuaaguauccagcacugaaugugaccaugcccaacaacgagcaguucgacaaacuuuacauuuggggaguccaccauccuggcacagauaaugaccagaucuuuuuguaugcccaagcuagcggccguauuacugugucuaccaagagaucccagcagacaguaaucccaaacauagggucaaggccccggguucgcaauauuccuagcagaaucaguauuuacuggaccaucgugaaaccaggagauauccugcuaauuaacucuacggguaaucucauagccccgaggggcuacuucaagauccgguccgggaaaagcucgauuaugcgcucugacgcgcccaucggaaaguguaacuccgaaugcauaacuccuaauggcucaauuccaaacgacaagcccuuucagaaugucaaccgaaucacauauggugcauguccuagauacgugaaacaaaauacccugaagcuggccacugggaugaggaacgugccagagaaacagacacggggaaucuucggcgcuauugccggcuuuaucgaaaaugggugggagggaauggucgaugguugguauggcuuccgucaccagaacagugaggggcgcggacaagcagcugaccuuaagagcacccaggccgcgauugaucagauaaauggcaaauugaacagacucaucgguaagacgaacgaaaaauuccaccagauugagaaggaauuuuccgagguugaagggaggauccaagaccuggagaaguacguggaggauaccaaaaucgacuuauggucuuauaaugccgaacugcucguagcacuugagaaccagcauacaauugaucugacugacagcgaaaugaauaaguuguucgagaaaaccaagaaacagcuacgggaaaacgcugaggauaugggcaauggaugcuuuaagauauaccacaagugugacaacgccugcaucggcucaauucgaaaugggacauaugaucaugacguguaccgcgacgaggcucugaacaauagauuccagaucaaaggagucgaacucaagagugguuacaaagauuggauucuguggaucuccuuugccauaagcugcuuccuucuguguguggcauugcucggcuuuaucaugugggccugccaaaaggggaacauuaaauguaauaucugcauuuga

SEQ ID NO: 131234 - RNA, 1701 nt, Artificial Sequence; identical to SEQ ID NO: 130482
  derived and/or modified CDS sequence (opt3) from hemagglutinin__InfluenzaA__ACU80212

SEQ ID NO: 131235 - RNA, 1698 nt, Artificial Sequence
  derived and/or modified CDS sequence (opt3) from hemagglutinin__InfluenzaA__ACU80234
augaaggugaaacugcucguccuucugugcaccuucgccgcuacauacgcagacacuaucuguauuggcuaucacgccaacaauagcacggauaccguugacacaguguuggagaagaacguaacugugacccauuccgucaauuuacuggaaaacucucacaaugggaaacuaugccuccugaagggaauagcgccccuucagcuggguaacuguucaguggcuggcuggaucuuggggaauccugagugcgaacuccugauuaguaaagagagcugguccuacaucguugaaaagccaaacccggagaauggaacauguuaucccggccauuuugccgauuacgaggaacugagagagcaacucucuucggugagcucauucgaaagguuugagauuuucccuaaggagaguuccuggccaaaccacaccgucacuggugugucugcaagcugcucccauaauggggaaucaaguuuuuauaaaaacuuacuguggcuuacaggaaagaauggcuuguaccccaaccugagcaaaucuuaugccaauaacaaggagaaagaaguucuaguacucuggggcgugcaccacccuccaaacaucggggaccagaaggcucuguaccauaccgagaaugcauacgucuccguggugucaagccacuauagucggaaguucacgcccgaaauagccaaacgcccuaagguccgagaucaggagggacguaucaacuacuauuggacucuucuggagccaggugacaccauuaucuuugaagcuaauggcaacuugauugccccgagauacgcguucgcacucucuaggggguuuggauccggcaucauaaauagcaacgcccccauggauaaaugugacgcuaagugccagacaccucaaggugccauuaauucgucucugccauuccagaacguucaucccgugacuaucggggaguguccuaaauauguacgguccgcaaaguuacgcauggugaccggacugagaaauauuccaucaauccagaguaggggccucuuuggcgcuaucgccggguucauugaaggagguuggacaggcauggucgaugggugguacggauaucaccaccagaacgagcaaggcagcgguuacgcggccgaccagaaauccacccagaaugcaauaaacgggaucacgaauaaggugaacucuguuauugaaaagaugaauacucaguuuacagcugugggcaaagaguucaacaaacuugagcggcgcauggaaaaccugaauaaaaaggucgaugacggauucaucgauauauggaccuacaacgccgaguugcuagugcugcucgaaaaugagcgaacucuggacuuucaugacagcaacguaaagaaucuuuaugaaaagguuaagucacaacugaaaaacaaugcuaaggagauuggcaacgggugcuucgaguuuuaccacaaauguaaugaugaaugcauggagagugugaagaacggaacauaugacuaccccaaauauuccgaagagagcaaguugaauagagagaagaucgauggugucaaacucgaaucuaugggcguguaccagauccuggccauuuauucaaccgucgcaaguagcuuagugcugcuaguuucccucggggccaucucuuucuggaugugcucgaacggaagccugcaguguaggauuugcauauga

SEQ ID NO: 131236 - RNA, 1701 nt, Artificial Sequence
  derived and/or modified CDS sequence (opt3) from hemagglutinin__InfluenzaA__ACU80245
augaagaccaucauugcccugagcuacauacucugccuuguguucgcucagaaauuucccggcaacgacaauuccacagcaacucuguguuuggggcaccaugccgucccuaacggaacgaucguuaagaccauuacaaaugaucaaaucgaggugacuaacgcgaccgaauuaguacagucuucaaguacaggugagauuugcgacagcccacaccagauccuggauggcgaaaauuguacccuaauagacgcucuccugggggauccgcagugcgacggauuccaaaacaaaaauugggaucuuuuuguggagagauccaaggccuauucuaacuguuaccccuaugacgucccugauuacgcaucgcugaggucauugguggccagcaguggcacucucgaguucaauaacgaauccuuuaauuggacagguguuacccagaacgggacgucuagcgcuugcauccggcgcuccaauaacucauucuuuagucgacugaauuggcugacucauagcaaauucaaguauccagcacucaacgugaccaugcccaacaaugagaacuuugacaaguuauacauuuggggaguccaccauccuggcacagauaaugaccagaucuuccuguaugcccaggcuucuggccguauuacuguguccaccaaaagaucacaacagacaguaaucccaaacauagggagcaggccccggguucgcaauauuccuaguagaaucucuauuuacuggaccaucgugaagccaggagauauccuuuugauuaacuccacggguaaucugauagccccgaggggcuacuuuaaaauccggagcgggaagucgucuauuaugcgcuccgacgcgcccaucggacgauguaacucagaaugcauaacuccuaauggcaguauuccaaacgacaaacccuuccagaaugucaacagaaucacauauggugcauguccuagguacgugaagcagaauacccuaaagcucgccacugggaugcggaacgugccagagaaacaaacacguggaaucuuuggcgcuauugccggcuucaucgaaaaugggugggagggaauggucgaugguugguauggcuuccgccaccagaacagcgaggggauuggacaggcagcugaccugaaguccacccaagccgcgauagaucagaucaacggcaaacuuaauagacugauugguaagacgaacgaaaaauuucaccagaucgagaaggaguucucugaaguugaagggaggauccaggacuuggagaaauacguggaggauaccaagauugaccucuggagcuauaaugccgaacuguuaguagcacuggagaaccaacauacaauagaucucacugacucagaaaugaauaaacuuuuugagaagaccaagaaacagcugcgggaaaacgcugaggauaugggcaauggaugcuucaagaucuaccacaaaugugacaacgccugcauuggcaguauccgaaaugggacauaugaucaugacguguaccgcgacgaggcuuugaacaauagauuucagauuaagggagucgaacuaaaguccgguuacaaagauuggauccuguggaucagcuucgccauaucuugcuuucuccuguguauugcacuucugggcuucaucaugugggccugccagaaggggaacauuagguguaauaucugcauauga

SEQ ID NO: 131237 - RNA, 1701 nt, Artificial Sequence; identical to SEQ ID NO: 130585
  derived and/or modified CDS sequence (opt3) from hemagglutinin__InfluenzaA__ACU80256

SEQ ID NO: 131238 - RNA, 1698 nt, Artificial Sequence; identical to SEQ ID NO: 130536
  derived and/or modified CDS sequence (opt3) from hemagglutinin__InfluenzaA__ACU80267

SEQ ID NO: 131239 - RNA, 1698 nt, Artificial Sequence; identical to SEQ ID NO: 131218
  derived and/or modified CDS sequence (opt3) from hemagglutinin__InfluenzaA__ACU80278

SEQ ID NO: 131240 - RNA, 1701 nt, Artificial Sequence; identical to SEQ ID NO: 130482
  derived and/or modified CDS sequence (opt3) from hemagglutinin__InfluenzaA__ACU80289

SEQ ID NO: 131241 - RNA, 1701 nt, Artificial Sequence; identical to SEQ ID NO: 130585
  derived and/or modified CDS sequence (opt3) from hemagglutinin__InfluenzaA__ACU80300

SEQ ID NO: 131242 - RNA, 1701 nt, Artificial Sequence
  derived and/or modified CDS sequence (opt3) from hemagglutinin__InfluenzaA__ACU80311
augagaaccaucauugcccugagcuacauacucugccuuguguucgcucagaaguuucccggcaacgacaauuccacagcaacucuguguuuggggcaccaugccgucccuaacggaacgaucguuaaaaccauuacaaaugaucaaaucgaggugacuaacgcgaccgaauuaguacagucuucaaguacaggugagauuugcgacagcccacaccagauccuggauggcgaaaauuguacccuaauagacgcucuccugggggauccgcagugcgacggauuccaaaacaagaauugggaucuuuuuguggagagguccaaagccuauucuaacuguuaccccuaugacgucccugauuacgcaucgcugcggucauugguggccagcaguggcacucucgaguucaauaacgaauccuuuaauuggacagguguuacccagaacgggacgucuagcgcuugcauccgccgauccaauaacucauucuuuagucgucugaauuggcugacucauagcaaguucaaauauccagcacucaacgugaccaugcccaacaaugagaacuuugacaaguuauacauuuggggaguccaccauccuggcacagauaaugaccagaucuuccuguaugcccaggcuucuggcagaauuacuguguccaccaagaggucacaacagacaguaaucccaaacauagggagccggccccgcguuagaaauauuccuaguaggaucucuauuuacuggaccaucgugaaaccaggagauauccuuuugauuaacuccacggguaaucugauagccccgcggggcuacuuuaagauccgcagcgggaaaucgucuauuaugcgauccgacgcgcccaucggaaaguguaacucagaaugcauaacuccuaauggcaguauuccaaacgacaaacccuuccagaaugucaacagaaucacauauggugcauguccuagguacgugaagcagaauacccuaaagcucgccacugggaugcggaacgugccagagaaacaaacacguggaaucuuuggcgcuauugccggcuucaucgaaaaugggugggagggaauggucgaugguugguauggcuuccgccaccagaacagcgaggggauuggacaggcagcugaccugaaguccacccaagccgcgauagaucagaucaacggcaaacuuaauagacugauugguaagacgaacgaaaaauuucaccagaucgagaaggaguucucugaaguugaagggaggauccaggacuuggagaaauacguggaggauaccaagauugaccucuggagcuauaaugccgaacuguuaguagcacuggagaaccaacauacaauagaucucacugacucagaaaugaauaaacuuuuugagaagaccaagaaacagcugcgggaaaacgcugaggauaugggcaauggaugcuucaagaucuaccacaaaugugacaacgccugcauuggcaguauccgaaaugggacauaugaucaugacguguaccgcgacgaggcuuugaacaauagauuucagauuaagggagucgaacuaaaguccgguuacaaagauuggauccuguggaucagcuucgccauaucuugcuuucuccuguguauugcacuucugggcuucaucaugugggccugccagaaggggaacauuagguguaauaucugcauauga

SEQ ID NO: 131243 - RNA, 1701 nt, Artificial Sequence; identical to SEQ ID NO: 130585
  derived and/or modified CDS sequence (opt3) from hemagglutinin__InfluenzaA__ACU80322

SEQ ID NO: 131244 - RNA, 1701 nt, Artificial Sequence; identical to SEQ ID NO: 130482
  derived and/or modified CDS sequence (opt3) from hemagglutinin__InfluenzaA__ACU80333

SEQ ID NO: 131245 - RNA, 1701 nt, Artificial Sequence; identical to SEQ ID NO: 130585
  derived and/or modified CDS sequence (opt3) from hemagglutinin__InfluenzaA__ACU80344

SEQ ID NO: 131246 - RNA, 1701 nt, Artificial Sequence; identical to SEQ ID NO: 130585
  derived and/or modified CDS sequence (opt3) from hemagglutinin__InfluenzaA__ACU80355

SEQ ID NO: 131247 - RNA, 1701 nt, Artificial Sequence; identical to SEQ ID NO: 130585
  derived and/or modified CDS sequence (opt3) from hemagglutinin__InfluenzaA__ACU80366

SEQ ID NO: 131248 - RNA, 1701 nt, Artificial Sequence
  derived and/or modified CDS sequence (opt3) from hemagglutinin__InfluenzaA__ACU80377
augaagaccaucauugcccugagcuacauacucugccuuguguucgcucagaaauuucccggcaacgacaauuccacagcaacucuguguuuggggcaccaugccgucccuaacggaacgaucguuaagaccauuacaaaugaucaaaucgaggugacuaacgcgaccgaauuaguacagucuucaaguacaggugagauuugcgacagcccacaccagauccuggauggcgaaaauuguacccuaauagacgcucuccugggggauccgcagugcgacggauuccaaaacaaaaauugggaucuuuuuguggagagauccaaggccuauucuaacuguuaccccuaugacgucccugauuacgcaucgcugaggucauugguggccagcaguggcacucucgaguucaauaacgaauccuuuaauuggacagguguuacccagaacgggacgucuagcgcuugcauccggcgcuccaauaacucauucuuuagucgacugaauuggcugacucauagcaaauucaaguauccagcacucaacgugaccaugcccaacaaugagaacuuugacaaguuauacauuuggggaguccaccauccuggcacagauaaugaccagaucuuccuguaugcccaggcuucuggccguauuacuguguccaccaaaagaucacaacagacaguaaucccaaacauagggagcaggccccggguucgcaauauuccuaguagaaucucuauuuacuggaccaucgugaagccaggagauauccuuuugauuaacuccacggguaaucugauagccccgaggggcuacuuuaaaauccggagcgggaagucgucuauuaugcgcuccgacgcgcccaucggaaaauguaacuucgaaugcauaacuccuaauggcucaauuccaaacgacaagcccuuucagaaugucaaccgaaucacauauggugcauguccuagauacgugaagcagaauacccuaaaacucgccacugggaugaggaacgugccagagaagcaaacacggggaaucuucggcgcuauugccggcuucaucgaaaaugggugggagggaauggucgaugguugguauggcuuucgucaccagaacagugaggggauuggacaggcagcugaccugaaaagcacccaagccgcgauagaucagaucaacggcaaacuuaaucgccugauugguaagacgaacgaaaaguuccaccagaucgagaaagaauuuuccgagguugaagggagaauccaggacuuggagaaguacguggaggauaccaagauugaccucuggucuuauaaugccgaacuguuaguagcacuggagaaccaacauacaauagaucucacugacagcgaaaugaauaaacuuuucgagaagaccaggaaacagcugcgggaaaacgcugaggauaugggcaauggaugcuuuaagaucuaccacaaaugugacaacgccugcauuggcucaauccgaaaugggacauaugaucaugacguguaccgcgacgaggcuuugaacaauagauuccagauuaagggagucgaacuaaagagugguuacaaagauuggauccuguggauauccuuugccaugagcugcuuccuccuguguaucgcacuucugggcuuuauuaugugggccugccagaaggggaacaucagguguaauauuugcaucuga

SEQ ID NO: 131249 - RNA, 1701 nt, Artificial Sequence; identical to SEQ ID NO: 130585
  derived and/or modified CDS sequence (opt3) from hemagglutinin__InfluenzaA__ACU80388

SEQ ID NO: 131250 - RNA, 1701 nt, Artificial Sequence; identical to SEQ ID NO: 130482
  derived and/or modified CDS sequence (opt3) from hemagglutinin__InfluenzaA__ACU80399

SEQ ID NO: 131251 - RNA, 1698 nt, Artificial Sequence
  derived and/or modified CDS sequence (opt3) from hemagglutinin__InfluenzaA__ACU80410
augaaggugaaacugcucguccuucugugcaccuucacagccacuuacgcugacacgaucuguauuggcuaucacgcaaacaauagcaccgauacaguugacacuguguuggagaagaacguaaccgugacacauuccgucaauuuacuggaaaacucucacaaugggaaacuaugccuccugaagggaauagcgccccuucagcuggguaacuguucaguggccggcuggaucuuggggaauccugagugcgaacuccugauuaguaaagagagcugguccuacaucguugaaaagccaaacccggagaauggaaccuguuaucccggccauuuugcugauuacgaggaacugagagagcaacucucuucggugagcucauucgaaagguuugagauuuucccuaaggagaguuccuggccaaaccacacugucacaggugugucugccagcugcucccauaauggggaaucaaguuuuuaucggaacuuacuguggcuuaccggcaaaaauggauuguaccccaaccugagcaagucuuaugcaaauaacaaagagaaggaaguucuaguacucuggggcgugcaccacccuccaaacaucggggaccagaaagcccuguaccauacggagaaugcuuacgucuccguggugucaagccacuauagucgcaaguucacucccgaaauagcaaagcgaccuaaaguccgugaucaggagggaagaaucaacuacuauuggacccuucuggagccaggugacacaauuaucuuugaagccaauggcaacuugauugcuccgagguacgccuucgcgcucucucggggguuuggauccggcaucauaaauagcaacgcacccauggauaagugugacgccaaaugccagacuccucaaggugcuauuaauucgucucugccauuccagaacguucaucccgugaccaucggggaguguccuaaguauguacgcuccgccaaauuaagaauggugacaggacugaggaauauuccaucaauccagagucggggccucuuuggcgcaaucgcuggguucauugaaggagguuggaccggcauggucgaugggugguacggauaucaccaccagaacgagcaaggcagcgguuacgccgcggaccagaaguccacgcagaaugccauaaacgggaucacuaauaaagugaacucuguuauugaaaagaugaauacacaguuuaccgcagugggcaaggaguucaacaaacuugagcgccgaauggaaaaccugaauaagaaagucgaugacggauucaucgauauauggacuuacaacgcugaguugcuagugcugcucgaaaaugagagaacacuggacuuucaugacagcaacguaaagaaucuuuaugaaaaaguuaagaaccaacugaagaauaacgccaaagagauuggcaaugggugcuucgaguuuuaccacaaguguaacgaugaaugcauggagucagugaaaaauggaaccuaugacuaccccaaguauagugaagaguccaaauugaacagggagaagaucgauggugucaagcucgaaagcaugggcguguaccagauccuggcuauuuauucuacggucgccucaaguuuagugcugcuaguuagccucggggcaaucuccuucuggaugugcucuaauggaucgcugcagugucggauuugcauauga

SEQ ID NO: 131252 - RNA, 1701 nt, Artificial Sequence
  derived and/or modified CDS sequence (opt3) from hemagglutinin__InfluenzaA__ACU80424
augaagaccaucauugcccugagcuacauacucugccuuguguucgcucagaaauuucccggcaacgacaauuccacagcaacucuguguuuggggcaccaugccgucccuaacggaacgaucguuaagaccauuacaaaugaucaaaucgaggugacuaacgcgaccgaauuaguacagucuucaaguacaggugagauuugcgacagcccacaccagauccuggauggcgaaaauuguacccuaauagacgcucuccugggggauccgcagugcgacggauuccaaaacaaaaauugggaucuuuuuguggagagauccaaggccuauucuaacuguuaccccuaugacgucccugauuacgcaucgcugaggucauugguggccagcaguggcacucucgaguucaauaacgaauccuuuaauuggacagguguuacccagaacgggacgucuagcgcuugcauccggcgcuccaauaacucauucuuuagucgacugaauuggcugacucauagcaaauucaaguauccagcacucaacgugaccaugcccaacaaugagaacuuugacaaguuauacauuuggggaguccaccauccuggcacagauaaugaccagaucuuccuguaugcccaggcuucuggccguauuacuguguccaccaaaagaucacaacagacaguaaucccaaacauagggagcaggccccggguucgcaauauuccuaguagaaucucuauuuacuggaccaucgugaagccaggagauauccuuuugauuaacuccacggguaaucugauagccccgaggggcuacuuuaaaauccggagcgggaagucgucuauuaugcgcuccgacgcgcccaucggaaaauguaacuucgaaugcauaacuccuaauggcucaauuccaaacgacaagcccuuucagaaugucaaccgaaucacauauggugcauguccuagauacgugaagcagaauacccuaaaacucgccacugggaugaggaacgugccagagaagcaaacacggggaaucuucggcgcuauugccggcuucaucgaaaaugggugggagggaauggucgaugguugguauggcuuucgucaccagaacagugaggggauuggacaggcagcugaccugaaaagcacccaagccgcgauagaucagaucaacggcaaacuuaaucgccugauugguaagacgaacgaaaaguuccaccagaucgagaaagaauuuuccgagguugaagggagaauccaggacuuggagaaguacguggaggauaccaagauugaccucuggucuuauaaugccgaacuguuaguagcacuggagaaccaacauacaauagaucucacugacagcgaaaugaauaaacuuuucgagaagaccaggaaacagcugcgggaaaacgcugaggauaugggcaauggaugcuuuaagaucuaccacaaaugugacaacgccugcauuggcucaauccgaaaugggacauaugaucaugacguguaccgcgacgaggcuuugaacaauagauuccagauuaagggagucgaacuaaagagugguuacaaagauuggauccuguggauauccuuugccaucagcugcuuccuccuguguauugcacuucugggcuuuaucaugugggccugccagaaggggaacauuagguguaauaucugcauauga

SEQ ID NO: 131253 - RNA, 1701 nt, Artificial Sequence; identical to SEQ ID NO: 131252
  derived and/or modified CDS sequence (opt3) from hemagglutinin__InfluenzaA__ACU80435

SEQ ID NO: 131254 - RNA, 1698 nt, Artificial Sequence
  derived and/or modified CDS sequence (opt3) from hemagglutinin__InfluenzaA__ACU80446
augaaggugaaacugcucguccuucugugcaccuucacagccacuuacgcugacacgaucuguauuggcuaucacgcaaacaauagcaccgauacaguugacacuguguuggagaagaacguaaccgugacacauuccgucaauuuacuggaaaacucucacaaugggaaacuaugccuccugaagggaauagcgccccuucagcuggguaacuguucaguggccggcuggaucuuggggaauccugagugcgaacuccugauuaguaaagagagcugguccuacaucguugaaaagccaaacccggagaauggaaccuguuaucccggccauuuugcugauuacgaggaacugagagagcaacucucuucggugagcucauucgaaagguuugagauuuucccuaaggagaguuccuggccaaaccacacugucacaggugugucugccagcugcucccauaauggggaaucaaguuuuuaucggaacuuacuguggcuuaccggcaaaaauggauuguaccccaaccugagcaagucuuaugcaaauaacaaagagaaggaaguucuaguacucuggggcgugcaccacccuccaaacaucggggaccagaaaacgcuguaccauacugagaaugccuacgucuccguggugucaagccacuauagucgcaaguucacccccgaaauagcuaagcgaccuaaaguccgugaucaggagggaagaaucaacuacuauuggacacuucuggagccaggugacacuauuaucuuugaagcaaauggcaacuugauugccccgagguacgcuuucgcccucucucggggguuuggauccggcaucauaaauagcaacgcgcccauggauaagugugacgcaaaaugccagaccccucaaggugccauuaauucgucucugccauuccagaacguucaucccgugacaaucggggaguguccuaaguauguacgcuccgcuaaauuaagaauggugaccggacugaggaauauuccaucaauccagagucggggccucuuuggcgccaucgcaggguucauugaaggagguuggacgggcauggucgaugggugguacggauaucaccaccagaacgagcaaggcagcgguuacgcugccgaccagaaguccacucagaaugcgauaaacgggaucacaaauaaagugaacucuguuauugaaaagaugaauacccaguuuacugccgugggcaaggaguucaacaaacuugagcgccgaauggaaaaccugaauaagaaagucgaugacggauucaucgauauauggacauacaacgcagaguugcuagugcugcucgaaaaugagagaacccuggacuuucaugacagcaacguaaagaaucuuuaugaaaaaguuaagucacaacugaagaacaaugcuaaagagauuggcaacgggugcuucgaguuuuaccacaaguguaaugaugaaugcauggagagugugaaaaacggaacguaugacuaccccaaguauuccgaagagagcaaauugaauagggagaagaucgauggugucaagcucgaaucuauggagguguaccagauccuggccauuuauucaaccgucgcuaguagcuuagugcugcuaguuucccucggcgccaucucuuucuggaugugcucgaacgggagccugcagugucggauuugcauauga

SEQ ID NO: 131255 - RNA, 1701 nt, Artificial Sequence; identical to SEQ ID NO: 130482
  derived and/or modified CDS sequence (opt3) from hemagglutinin__InfluenzaA__ACU80458

SEQ ID NO: 131256 - RNA, 1701 nt, Artificial Sequence; identical to SEQ ID NO: 130482
  derived and/or modified CDS sequence (opt3) from hemagglutinin__InfluenzaA__ACU80470

SEQ ID NO: 131257 - RNA, 1701 nt, Artificial Sequence; identical to SEQ ID NO: 130585
  derived and/or modified CDS sequence (opt3) from hemagglutinin__InfluenzaA__ACU80600

SEQ ID NO: 131258 - RNA, 1701 nt, Artificial Sequence; identical to SEQ ID NO: 131252
  derived and/or modified CDS sequence (opt3) from hemagglutinin__InfluenzaA__ACU80611

SEQ ID NO: 131259 - RNA, 1701 nt, Artificial Sequence; identical to SEQ ID NO: 130585
  derived and/or modified CDS sequence (opt3) from hemagglutinin__InfluenzaA__ACU80622

SEQ ID NO: 131260 - RNA, 1701 nt, Artificial Sequence; identical to SEQ ID NO: 130482
  derived and/or modified CDS sequence (opt3) from hemagglutinin__InfluenzaA__ACU80633

SEQ ID NO: 131261 - RNA, 1701 nt, Artificial Sequence
  derived and/or modified CDS sequence (opt3) from hemagglutinin__InfluenzaA__ACU80644
augaagaccaucauugcccugagcuacauacucugccuuguguucgcucagaaacugcccggcaacgacaauuccacagcaacuuuguguuuagggcaccaugccgucccuaacggaacgaucguuaagaccauuacaaaugaucaaaucgaggugacuaacgcgaccgaacugguacagucuucaaguacaggugagauuugcgacagcccacaccagauccuagauggcgaaaauuguacccucauagacgcucugcuuggggauccgcagugcgacggauuucaaaacaaaaagugggaucuguucguggagagauccaaagccuauucuaauuguuaccccuaugacgucccugauuacgcaucguugaggucacucguggccagcaguggcacucuggaauuuaacaaugaguccuucaacuggacagguguuacccagaaugggacgucuagcgcuugcauccggcgcuccaacaauucauuuuucagucgacugaacuggcucacucauagcaaguuuaaguauccagcauuaaaugugaccaugcccaacaacgaggaguucgacaaacuguacauuuggggaguccaccauccuggcacagauaaugaccagaucuuucuuuaugcccaggcuucuggccguauuacuguguccaccaagagaucacaacagacaguaaucccaaacauagggagcaggccccggguucgcaauauuccuaguagaaucucuauuuacuggaccaucgugaaaccaggagauaucuugcugauuaacuccacggguaaucuaauagccccgaggggcuacuucaagauccggagcgggaaaucgucuauuaugcgcuccgacgcgcccaucggaaaguguaacucagaaugcauaacuccuaauggcaguauuccaaacgacaagcccuuucagaaugucaaccgaaucacauauggugcauguccuagauacgugaaacagaauacccucaagcuggccacugggaugaggaacgugccagaaaaacaaacacggggaaucuucggcgcuauugccggcuuuaucgagaaugggugggagggaauggucgaugguugguauggcuuccgucaccagaacagcgaagggauuggacaggcagcugaccuuaaguccacccaagccgcgauagaucagaucaauggcaaacugaaccgcuugauugguaagacgaacgagaaauuccaccagaucgaaaaggaguuuucugaaguugaggggagaauccaggaccucgagaaguacguggaagauaccaaaauugaccuguggagcuauaaugccgaguuacugguagcacucgaaaaccaacauacaauagaucuuacugacucagagaugaauaagcuguucgagaaaaccaagaaacaguugagggaaaacgcugaggauaugggcaauggaugcuuuaagaucuaccacaagugugacaacgccugcauuggcaguauccggaaugggacauaugaucaugacguguaccgagacgaagcucuaaacaaucgcuuccagauuaaaggagucgagcugaaguccgguuacaaagauuggauccucuggaucagcuuugccauaucuugcuuccugcuuuguguggcacuguugggcuuuauuaugugggccugccagaaggggaacaucagauguaauauuugcaucuga

SEQ ID NO: 131262 - RNA, 1701 nt, Artificial Sequence; identical to SEQ ID NO: 130482
  derived and/or modified CDS sequence (opt3) from hemagglutinin__InfluenzaA__ACU80655

SEQ ID NO: 131263 - RNA, 1701 nt, Artificial Sequence; identical to SEQ ID NO: 130482
  derived and/or modified CDS sequence (opt3) from hemagglutinin__InfluenzaA__ACU80666

SEQ ID NO: 131264 - RNA, 1701 nt, Artificial Sequence; identical to SEQ ID NO: 129976
  derived and/or modified CDS sequence (opt3) from hemagglutinin__InfluenzaA__ACU80677

SEQ ID NO: 131265 - RNA, 1701 nt, Artificial Sequence; identical to SEQ ID NO: 130482
  derived and/or modified CDS sequence (opt3) from hemagglutinin__InfluenzaA__ACU80688

SEQ ID NO: 131266 - RNA, 1701 nt, Artificial Sequence; identical to SEQ ID NO: 130585
  derived and/or modified CDS sequence (opt3) from hemagglutinin__InfluenzaA__ACU80699

SEQ ID NO: 131267 - RNA, 1701 nt, Artificial Sequence; identical to SEQ ID NO: 130585
  derived and/or modified CDS sequence (opt3) from hemagglutinin__InfluenzaA__ACU80710

SEQ ID NO: 131268 - RNA, 1701 nt, Artificial Sequence
  derived and/or modified CDS sequence (opt3) from hemagglutinin__InfluenzaA__ACU80721
augaagaccaucauugcccugagcuacauacucugccuuguguucgcucagaaacugcccggcaacgacaauuccacagcaacuuuguguuuagggcaccaugccgucccuaacggaacgaucguuaagaccauuacaaaugaucaaacugaggugaccaacgcgacagaacugguacagucuucaaguaccggugagaucugcgacagcccacaccagauucuagauggcgaaaauuguacucucaucgacgcucugcuuggggauccgcagugcgacggauuucaaaacaaaaagugggaucuguucguggagagauccaaagccuauucuaauuguuaccccuaugacgucccugauuacgcaucguugaggucacucguggccagcaguggcacacuggaauuuaacaaugaguccuucaacuggaccgguguuacgcagaaugggacuucuagcgcuugcauacggcgcuccaacaauucauuuuucagucgacugaacuggcucacccauuuaaaguuuaaguauccagcacugaaugugacaaugcccaacaacgagcaguucgacaaacuuuacaucuggggaguccaccauccuggcacugauaaugaccagaucuuuuuguaugcccaagcuagcggccguauuaccgugucuacaaagagaucccagcagaccguaauuccaaacaucgggucaaggccccggguucgcaauauaccuagcagaauuaguaucuacuggacgauugugaaaccaggagauauccugcuaaucaacucuacugguaaucucauugccccgaggggcuacuucaagauacgguccgggaaaagcucgaucaugcgcucugacgcgcccauuggaaaguguaacuccgaaugcaucacaccuaauggcucaauaccaaacgacaagcccuuucagaaugucaaccgaauuaccuauggugcauguccuagauacgugaaacaaaauacucugaagcuggccacagggaugaggaacgugccagagaaacagacccggggaaucuucggcgcuaucgccggcuuuauugaaaaugggugggagggaauggucgaugguugguauggcuuccgucaccagaacagugaggggcgcggacaagcagcugaccuuaagagcacgcaggccgcgaucgaucagauuaauggcaaauugaacagacucauagguaagaccaacgaaaaauuccaccagaucgagaaggaauuuuccgagguugaagggaggauucaagaccuggagaaguacguggaggauacaaaaaucgacuuauggucuuauaaugccgaacugcucguagcacuugagaaccagcauacuaucgaucugaccgacagcgaaaugaauaaguuguucgagaaaacaaagaaacagcuacgggaaaacgcugaggauaugggcaauggaugcuuuaagauuuaccacaagugugacaacgccugcauaggcucaauccgaaaugggacuuaugaucaugacguguaccgcgacgaggcucugaacaauagauuccagauuaaaggagucgaacucaagagugguuacaaagauuggauccuguggauuuccuuugccaucagcugcuuccuucuguguguggcauugcucggcuuuauaaugugggccugccaaaaggggaacaucagguguaauauuugcaucuga

SEQ ID NO: 131269 - RNA, 1701 nt, Artificial Sequence; identical to SEQ ID NO: 130482
  derived and/or modified CDS sequence (opt3) from hemagglutinin__InfluenzaA__ACU80732

SEQ ID NO: 131270 - RNA, 1701 nt, Artificial Sequence; identical to SEQ ID NO: 130482
  derived and/or modified CDS sequence (opt3) from hemagglutinin__InfluenzaA__ACU80743

SEQ ID NO: 131271 - RNA, 1701 nt, Artificial Sequence
  derived and/or modified CDS sequence (opt3) from hemagglutinin__InfluenzaA__ACU80754
augaagaccaucauugcccugagcuacauacucugccuuguguucgcucagaaacugcccggcaacgacaauuccacagcaacuuuguguuuagggcaccaugccgucccuaacggaacgaucguuaagaccauuacaaaugaucaaaucgaggugacuaacgcgaccgaacugguacagucuucaaguacaggugagauuugcgacagcccacaccagauccuagauggcgaaaauuguacccucauagacgcucugcuuggggauccgcagugcgacggauuucaaaacaaaaagugggaucuguucguggagagauccaaagccuauucuaauuguuaccccuaugacgucccugauuacgcaucguugaggucacucguggccagcaguggcacucuggaauuuaacaaugaguccuucaacuggacagguguuacccagaaugggacgucuagcgcuugcauccggcgcuccaacaauucauuuuucagucgacugaacuggcucacucauuuaaaguuuaaguauccagcacugaaugugaccaugcccaacaacgagcaguucgacaaacuuuacauuuggggaguccaccauccuggcacagauaaugaccagaucuuuuuguaugcccaagcuagcggccguauuacugugucuaccaagagaucccagcagacaguaaucccaaacauagggucaaggccccggguucgcaauauuccuagcagaaucaguauuuacuggaccaucgugaaaccaggagauauccugcuaauuaacucuacggguaaucucauagccccgaggggcuacuucaagauccgguccgggaaaagcucgauuaugcgcucugacgcgcccaucggaaaguguaacuccgaaugcauaacuccuaauggcucaauuccaaacgacaagcccuuucagaaugucaaccgaaucacauauggugcauguccuagauacgugaaacaaaauacccugaagcuggccacugggaugaggaacgugccagagaaacagacacggggaaucuucggcgcuauugccggcuuuaucgaaaaugggugggagggaauggucgaugguugguauggcuuccgucaccagaacagugaggggcgcggacaagcagcugaccuuaagagcacccaggccgcgauugaucagauaaauggcaaauugaacagacucaucgguaagacgaacgaaaaauuccaccagauugagaaggaauuuuccgagguugaagggaggauccaagaccuggagaaguacguggaggauaccaaaaucgacuuauggucuuauaaugccgaacugcucguagcacuugagaaccagcauacaauugaucugacugacagcgaaaugaauaaguuguucgagaaaaccaagaaacagcuacgggaaaacgcugaggauaugggcaauggaugcuuuaagauauaccacaagugugacaacgccugcaucggcucaauucgaaaugggacauaugaucaugacguguaccgcgacgaggcucugaacaauagauuccagaucaaaggagucgaacucaagagugguuacaaagauuggauucuguggaucuccuuugccauaagcugcuuccuucugugugugguuuugcucggcuuuaucaugugggcaugccaaaaggggaacauuagguguaauaucugcauuuga

SEQ ID NO: 131272 - RNA, 1701 nt, Artificial Sequence
  derived and/or modified CDS sequence (opt3) from hemagglutinin__InfluenzaA__ACU80765
augaagaccaucauugcccugagcuacauacucugccuuguguucgcucagaaacugcccggcaacgacaauuccacagcaacuuuguguuuagggcaccaugccgucccuaacggaacgaucguuaagaccauuacaaaugaucaaaucgaggugacuaacgcgaccgaacugguacagucuucaaguacaggugagauuugcgacagcccacaccagauccuagauggcgaaaauuguacccucauagacgcucugcuuggggauccgcagugcgacggauuucaaaacaaaaagugggaucuguucguggagagauccaaagccuauucuaauuguuaccccuaugacgucccugauuacgcaucguugaggucacucguggccagcaguggcacucuggaauuuaacaaugaguccuucaacuggacagguguuacccagaaugggacgucuagcgcuugcauccggcgcuccaacaauucauuuuucagucgacugaacuggcucacucauagcaaguuuaaguauccagcauuaaaugugaccaugcccaacaacgaggaguucgacaaacuguacauuuggggaguccaccauccuggcacagauaaugaccagaucuuucuuuaugcccaggcuucuggccguauuacuguguccaccaagagaucacaacagacaguaaucccaaacauagggagcaggccccggguucgcaauauuccuaguagaaucucuauuuacuggaccaucgugaaaccaggagauaucuugcugauuaacuccacggguaaucuaauagccccgaggggcuacuucaagauccggagcgggaaaucgucuauuaugcgcuccgacgcgcccaucggaaaguguaacucagaaugcauaacuccuaauggcaguauuccaaacgacaagcccuuucagaaugucaaccgaaucacauauggugcauguccuagauacgugaaacagaauacccucaagcuggccacugggaugaggaacgugccagaaaaacaaacacggggaaucuucggcgcuauugccggcuuuaucgagaaugggugggagggaauggucgaugguugguauggcuuccgucaccagaacagcgaagggauuggacaggcagcugaccuuaaguccacccaagccgcgauagaucagaucaauggcaaacugaaccgcuugauugguaagacgaacgagaaauuccaccagaucgaaaaggaguuuucugaaguugaggggagaauccaggaccucgagaaguacguggaagauaccaaaauugaccuguggagcuauaaugccgaguuacugguagcacucgaaaaccaacauacaauagaucuuacugacucagagaugaauaagcuguucgagaaaaccaagaaacaguugagggaaaacgcugaggauaugggcaauggaugcuuuaagaucuaccacaagugugacaacgccugcauuggcaguauccggaaugggacauaugaucaugacguguaccgagacgaagcucuaaacaaucgcuuccagauuaaaggagucgagcugaaguccgguuacaaagauuggauccucuggaucagcuuugccauaucuugcuuccugcuuuguauugcacuguugggcuuuaucaugugggccugccagaaggggaacauuagauguaauaucugcauauga

SEQ ID NO: 131273 - RNA, 1701 nt, Artificial Sequence
  derived and/or modified CDS sequence (opt3) from hemagglutinin__InfluenzaA__ACU80787
augaagaccaucauugcccugagcuacauacucugccuuguguucgcucagaaacugcccggcaacgacaauuccacagcaacuuuguguuuagggcaccaugccgucccuaacggaacgaucguuaagaccauuacaaaugaucaaaucgaggugacuaacgcgaccgaacugguacagucuucaaguacaggugagauuugcgacagcccacaccagauccuagauggcgaaaauuguacccucauagacgcucugcuuggggauccgcagugcgacggauuucaaaacaaaaagugggaucuguucguggagagauccaaagccuauucuaauuguuaccccuaugacgucccugauuacgcaucguugaggucacucguggccagcaguggcacucuggaauuuaacaaugaguccuucaacuggacagguguuacccagaaugggacgucuagcgcuugcauccggcgcuccaacaauucauuuuucagucgacugaacuggcucacucauuuaaaguuuaaguauccagcacugaaugugaccaugcccaacaacgagcaguucgacaaacuuuacauuuggggaguccaccauccuggcacagauaaugaccagaucuuuuuguaugcccaagcuagcggccguauuacugugucuaccaagagaucccagcagacaguaaucccaaacauagggucaaggccccggguucgcaauauuccuagcagaaucaguauuuacuggaccaucgugaaaccaggagauauccugcuaauuaacucuacggguaaucucauagccccgaggggcuacuucaagauccgguccgggaaaagcucgauuaugcgcucugacgcgcccaucggaaaguguaacuccgaaugcauaacuccuaauggcucaauuccaaacgacaagcccuuucagaaugucaaccgaaucacauauggugcauguccuagauacgugaaacaaaauacccugaagcuggccacugggaugaggaacgugccagagaaacagacacggggaaucuucggcgcuauugccggcuuuaucgaaaaugggugggagggaaugauggaugguugguauggcuuccgucaccagaacagugaggggcgcggacaagcagcugaccuuaagagcacccaggccgcgauugaucagauaaauggcaaauugaacagacucaucgguaagacgaacgaaaaauuccaccagauugagaaggaauuuuccgaggucgaagggaggauccaagaccuggagaaguacguugaggauaccaaaaucgacuuauggucuuauaaugccgaacugcucguggcacuugagaaccagcauacaauugaucugacugacagcgaaaugaauaaguuguucgagaaaaccaagaaacagcuacgggaaaacgcugaggauaugggcaauggaugcuuuaagauauaccacaagugugacaacgccugcaucggcucaauucgaaaugggacauaugaucaugacguauaccgcgacgaggcucugaacaauagauuccagaucaaaggaguggaacucaagagugguuacaaagauuggauucuguggaucuccuuugccauaagcugcuuccuucugugugucgcauugcucggcuuuaucaugugggccugccaaaaggggaacauuagguguaauaucugcauuuga

SEQ ID NO: 131274 - RNA, 1701 nt, Artificial Sequence; identical to SEQ ID NO: 130482
  derived and/or modified CDS sequence (opt3) from hemagglutinin__InfluenzaA__ACU80798

SEQ ID NO: 131275 - RNA, 1701 nt, Artificial Sequence; identical to SEQ ID NO: 130482
  derived and/or modified CDS sequence (opt3) from hemagglutinin__InfluenzaA__ACU81103

SEQ ID NO: 131276 - RNA, 1701 nt, Artificial Sequence
  derived and/or modified CDS sequence (opt3) from hemagglutinin__InfluenzaA__ACU87270
augaaggccauccuggugguccuccuuuacaccuucgcuacagcaaacgccgacacucugugcauuggcuaucacgcgaauaacagcacggauaccguugacacaguguuggagaagaauguaacugugacccauuccgucaacuuacuggaagauaagcacaaugggaaacuauguaagcucagaggaguggcuccccugcaucuugguaaaugcaacauagccggcuggauccuggggaauccugagugugaaucuuugucaacagcaaguagcugguccuacauuguugagaccucuucgucagacaacggaacuugcuauccaggcgauuuuaucgacuacgaggagcucagggagcagcugagcaguguguccucuuucgaacgguuugagauuuucccgaagacaagcuccuggcccaaucacgauucaaacaagggugucaccgccgcuuguccucaugcaggggccaaaaguuuuuauaagaaucugaucuggcucgugaaaaagggaaacagcuacccaaaauuaucuaaguccuauauaaaugacaagggcaaagaaguacugguucuuuggggcauccaccaccccucaacgagcgcugaucaacagaguuuguaccagaacgccgacgcguacguguucgucgggacuucucgcuauuccaagaaauuuaagccugagauugcaauccgaccaaaagugcgugauagagagggaaggaugaauuacuauuggacccugauugaacccggugacaagaucacauucgaggccacuggcaaccuaguggucccucgguacgcuuuugccauggaacgcaacgcagggagcggaauaauuaucucggauaccccaguucaugacugcaauacaaccugucagacgccgaaaggcgcuauuaacacuucucuccccuuccaaaauauccacccuaucacaauugguaagugcccaaaguaugugaaauccaccaagcugagacuugccacugggcugaggaacguacccucaauacagagucggggauuguuuggcgcgaucgccggcuucauugaagggggauggacagguaugguggacggcugguacggguaucaucaccagaaugaacagggaagcggcuacgcagcugaucucaaauccacccaaaacgccaucgacgagauaacgaauaaggucaacucugugauugagaaaaugaauacccaguuuacagcuguugguaaggaguucaaccaccuggaaaagcgcaucgaaaauuuaaacaaaaagguggaugacggguuccuggauaucuggacuuacaaugccgagcuccuuguccuguuggaaaacgagcgaacccuagacuaucaugauagcaaugugaaaaaccuguacgagaagguaagaucacagcucaaaaacaaugcaaaggaaauuggcaacggauguuuugaguucuaucacaagugcgacaauacauguauggaaaguguuaaaaacggcacuuacgauuauccuaaguacuccgaggaagccaaacugaauagggaggagaucgacggggugaaacuugaaagcacccggauuuaucagauacuggcuaucuacucuacagucgcgucaaguuuggugcucgucgugagccugggagcaauuuccuuuuggaugugcucuaacgguucguuacaaugccguaucuguaucuga

SEQ ID NO: 131277 - RNA, 1701 nt, Artificial Sequence; identical to SEQ ID NO: 130717
  derived and/or modified CDS sequence (opt3) from hemagglutinin__InfluenzaA__ACV04228

SEQ ID NO: 131278 - RNA, 1701 nt, Artificial Sequence; identical to SEQ ID NO: 130717
  derived and/or modified CDS sequence (opt3) from hemagglutinin__InfluenzaA__ACV04238

SEQ ID NO: 131279 - RNA, 1701 nt, Artificial Sequence
  derived and/or modified CDS sequence (opt3) from hemagglutinin__InfluenzaA__ACV04248
auggaggccauccuggugguccuccuuuacaccuucgcuacagcaaacgccgacacucugugcauuggcuaucacgcgaauaacagcacggauaccguugacacaguguuggaaaagaauguaacugugacccauuccgucaacuuacuggaggauaaacacaaugggaagcuauguaaacucagaggaguggcuccccugcaucuugguaagugcaacauagccggcuggauccuggggaauccugaaugugagucuuugucaacagcaaguagcugguccuacauuguugaaaccucuucgucagacaacggaacuugcuauccaggcgauuuuaucgacuacgaggagcucagggaacagcugagcaguguguccucuuucgagcgguuugaaauuuucccgaaaacaagcuccuggcccaaucacgauucaaacaaggguaucaccgccgcuuguccucaugcaggggccaagaguuuuuauaaaaaucugauauggcucgucaagaaaggaaacagcuacccaaaguuaucuaaauccuauaucaaugacaagggcaaggaggugcugguacuuuggggcauucaccaccccucaacgagcgcugaucaacagaguuuguaccagaacgccgacgcguacguuuucguggggucuucccgcuauagcaaaaaguuuaaaccugagaucgcaauucgaccaaagguccgugaucaggaaggaagaaugaauuacuauuggacucugguggagcccggugacaaaaucaccuucgaagccacaggcaaccuaguggucccuagguacgcuuuugccauggagcggaacgcagggucgggaauaauuaucucugauacuccaguucaugacugcaauaccacaugucaaaccccgaagggcgcuauuaacacgucccuccccuuccacaauauccauccuaucacuauugguaaaugcccaaaguaugugaagucaacaaaacugcgccuugccaccgggcugagaaacguacccaguauacagagcaggggauuguuuggcgcgaucgccggcuucauugaagggggauggacugguaugguggacggcugguacggguaucaccaccagaaugagcagggauccggcuacgcagcugaucucaagucuacacaaaacgccaucgacgagauaaccaauaaagucaacagcgugauugaaaagaugaauacgcaguuuaccgcuguugguaaagaguucaaccaucuggaaaagcggaucgagaauuuaaacaagaaaguggaugacggguuccuggauaucuggacauacaaugccgaacuccuuguccuguuggagaacgagcgcacucuagacuaucacgauucaaaugugaagaaccuguacgaaaaaguacgaagucagcucaagaacaaugcaaaagagauuggcaacggauguuuugaguucuaucauaagugcgacaauaccuguauggaauccguuaagaacggcacauacgauuauccuaaauacagcgaagaggccaagcugaauagagaggaaaucgacggggugaaacuugagucuacuaggauuuaucagauacuggcuaucuacucaaccgucgcgaguagcuuggugcucgucgugucccugggagcaauuucuuuuuggaugugcucgaacgguagcuuacaaugccggaucuguaucuga

SEQ ID NO: 131280 - RNA, 1701 nt, Artificial Sequence; identical to SEQ ID NO: 130717
  derived and/or modified CDS sequence (opt3) from hemagglutinin__InfluenzaA__ACV04258

SEQ ID NO: 131281 - RNA, 1701 nt, Artificial Sequence; identical to SEQ ID NO: 130717
  derived and/or modified CDS sequence (opt3) from hemagglutinin__InfluenzaA__ACV04268

SEQ ID NO: 131282 - RNA, 1701 nt, Artificial Sequence; identical to SEQ ID NO: 130717
  derived and/or modified CDS sequence (opt3) from hemagglutinin__InfluenzaA__ACV04278

SEQ ID NO: 131283 - RNA, 1701 nt, Artificial Sequence; identical to SEQ ID NO: 130717
  derived and/or modified CDS sequence (opt3) from hemagglutinin__InfluenzaA__ACV04288

SEQ ID NO: 131284 - RNA, 1701 nt, Artificial Sequence
  derived and/or modified CDS sequence (opt3) from hemagglutinin__InfluenzaA__ACV04298
augaaggccauccuggugguccuccuuuacaccuucgcuacagcaaacgccgacacucugugcauuggcuaucacgcgaauaacagcacggauaccguugacacaguguuggagaagaauguaacugugacccauuccgucaacuuacuggaagauaagcacaaugggaaacuauguaagcucagaggaguggcuccccugcaucuugguaaaugcaacauagccggcuggauccuggggaauccugagugugaaucuuugucaacagcaaguagcugguccuacauuguugagaccucuucgucagacaacggaacuugcuauccaggcgauuuuaucgacuacgaggagcucagggagcagcugagcaguguguccucuuucgaacgguuugagauuuucccgaagacaagcuccuggcccaaucacgauucaaacaagggugucaccgccgcuuguccucaugcaggggccaaaaguuuuuauaagaaucugaucuggcucgugaaaaagggaaacagcuacccaaaauuaucuaaguccuauauaaaugacaagggcaaagaaguacugguucuuuggggcauccaccaccccucaacgagcgcugaucaacagaguuuguaccagaacgccgacgcguacguguucgucgggacuucucgcuauuccaagaaauuuaagccugagauugcaauccgaccaaaagugcgugaucaggagggaagaaugaauuacuauuggacccugguggaacccggugacaagauuacauucgaggccacuggcaaccuagucguuccuagguacgcuuuugccauggaacggaacgcagggagcggaaucauaauuucggauaccccagugcaugacugcaauacaaccugucaaacgccgaaaggcgcuaucaacacuucucuccccuuccagaauauucacccuguaacaaucgguaagugcccaaaguaugugaaauccaccaagcugcgccuugccacugggcugagaaacguccccucaauccagaguaggggauuguuuggcgcgauugccggcuucauagaagggggauggacagguaugguggacggcugguacggguaucaucaccagaaugaacaaggaagcggcuacgcagcugaucucaaauccacccagaacgccaucgacgagauuacgaauaagguuaacucugugaucgagaaaaugaauacccaguuuacagcugucgguaaggaguucaaccaccuggaaaagcggauagaaaauuuaaacaaaaagguggaugacggguuccuggauauuuggacuuacaaugccgagcuccuuguacuguuggaaaacgagcgcacccuagacuaucaugauagcaauguuaaaaaccuguacgagaaggugcgaucacagcucaaaaacaaugcaaaggaaaucggcaacggauguuuugaguucuaucacaagugcgacaauacauguauggaaagugucaaaaacggcacuuacgauuauccuaaguacuccgaggaagccaaacugaauagagaggagaucgacggggugaaacuugaaagcaccaggauuuaucaaauccuggcuauuuacucuacagucgcgucaaguuuggugcucguugugagccugggagcaauauccuuuuggaugugcucuaacgguucguuacagugccggaucuguauuuga

SEQ ID NO: 131285 - RNA, 1701 nt, Artificial Sequence; identical to SEQ ID NO: 130717
  derived and/or modified CDS sequence (opt3) from hemagglutinin__InfluenzaA__ACV04308

SEQ ID NO: 131286 - RNA, 1701 nt, Artificial Sequence
  derived and/or modified CDS sequence (opt3) from hemagglutinin__InfluenzaA__ACV04318
augaaggccauccuggugguccuccuuuacaccuucgcuacagcaaacgccgacacucugugcauuggcuaucacgcgaauaacagcacggauaccguugacacaguguuggagaagaauguaacugugacccauuccgucaacuuacuggaagauaagcacaaugggaaacuauguaagcucagaggaguggcuccccugcaucuugguaaaugcaacauagccggcuggauccuggggaauccugagugugaaucuuugucaacagcaaguagcugguccuacauuguugagaccucuucgucagacaacggaacuugcuauccaggcgauuuuaucgacuacgaggagcucagggagcagcugagcaguguguccucuuucgaacgguuugagauuuucccgaagacaagcuccuggcccaaucacgauucaaacaagggugucaccgccgcuuguccucaugcaggggccaaaaguuuuuauaagaaucugaucuggcucgugaaaaagggaaacagcuacccaaaauuaucuaaguccuauauaaaugacaagggcaaagaaguacugguucuuuggggcauccaccaccccucaacgagcgcugaucaacagaguuuguaccagaacgccgacgcguacguguucgucgggacuucucgcuauuccaagaaauuuaagccugagauugcaauccgaccaaaagugcgugaucaggagggaagaaugaauuacuauuggacccugguggaacccggugacaagauuacauucgaggccacuggcaaccuagucguuccuagguacgcuuuugccauggaacggaacgcagggagcggaaucauaauuucggauaccccagugcauaauugcaacacaaccugucaaacgccgaaaggcgcuaucaauacuucucuccccuuccagaacauucacccuaucacaaucgguaagugcccaaaguauguaaaauccaccaagcugcgccuugccacugggcugagaaaugugcccucaauucagaguaggggauuguuuggcgcgauagccggcuucaucgaagggggauggacagguauggucgacggcugguacggguaucaucaccagaacgaacaaggaagcggcuacgcagcugaccucaaauccacccagaaugccauugaugagaucacgaacaagguaaauucuguuauagagaaaaugaacacccaguuuacagcuguggguaaggaguucaaucaccuggaaaagcggauugaaaacuuaaauaaaaaggucgacgauggguuccuggacaucuggacuuacaacgccgagcuccuugugcuguuggaaaaugagcgcacccuagauuaucaugacagcaacgugaaaaaccuguacgagaagguucgaucacagcucaaaaauaacgcaaaggaaaucggcaauggauguuuugaguucuaucacaagugcgauaacacauguauggaaagugugaaaaauggcacuuacgacuauccuaaguacuccgaggaagccaaacugaacagagaggagauugauggggucaaacuugaaagcaccaggaucuaucaaauucuggcuauauacucuacaguggcgucaaguuugguccucgugguuagccugggagcaaucuccuuuuggaugugcucuaaugguucguuacagugccggauuuguaucuga

SEQ ID NO: 131287 - RNA, 1701 nt, Artificial Sequence; identical to SEQ ID NO: 130717
  derived and/or modified CDS sequence (opt3) from hemagglutinin__InfluenzaA__ACV04328

SEQ ID NO: 131288 - RNA, 1701 nt, Artificial Sequence; identical to SEQ ID NO: 130717
  derived and/or modified CDS sequence (opt3) from hemagglutinin__InfluenzaA__ACV04338

SEQ ID NO: 131289 - RNA, 1701 nt, Artificial Sequence; identical to SEQ ID NO: 130959
  derived and/or modified CDS sequence (opt3) from hemagglutinin__InfluenzaA__ACV04358

SEQ ID NO: 131290 - RNA, 1701 nt, Artificial Sequence
  derived and/or modified CDS sequence (opt3) from hemagglutinin__InfluenzaA__ACV04368
augaaggccauccuggugguccuccuuuacaccuucgcuacagcaaacgccgacacucugugcauuggcuaucacgcgaauaacagcacggauaccguugacacaguguuggagaaaaauguaacugugacccauuccgucaacuuacuggaagauaagcacaaugggaaacuaugucagcucagaggaguggcuccccugcaucuugguaagugcaacauagccggcuggauccuggggaauccugagugugaaucuuugucaacagcaaguagcugguccuacauuguugagaccucuucgucagacaacggaacuugcuauccaggcgauuuuaucgacuacgaggagcucagggagcaacugagcaguguguccucuuucgaacgguuugagauuuucccgaaaacaagcuccuggcccaaucacgauucaaacaagggugucaccgccgcuuguccucaugcaggggccaagaguuuuuauaaaaaucugaucuggcucgugaagaaaggaaacagcuacccaaaguuaucuaaauccuauauaaaugacaagggcaaggaaguacugguucuuuggggcauccaccaccccucaacgagcgcugaucagcagaguuuguaccagaacgccgacgcguacguguucgucgggacuucucgcuauuccaaaaaguuuaaaccugagauugcaauccgaccaaaggugcgugaucaagagggaagaaugaauuacuauuggacccugguggaacccggugacaaaauuacauucgaggccacuggcaaccuagucguuccuagguacgcuuuugccauggaacggaacgcagggagcggaaucauaauuucggauaccccagugcaugacugcaauacaaccugucagacgccgaagggcgcuaucaacacuucucuccccuuccagaauauucacccuaucacaaucgguaaaugcccaaaguauguaaaguccaccaaacugcgccuugccacugggcugagaaacgugcccucaauucagaguaggggauuguuuggcgcgauagccggcuucaucgaagggggauggacagguauggucgacggcugguacggguaucaucaccaaaaugaacagggaagcggcuacgcagcugaucucaaguccacccagaacgccauugacgagaucacgaauaaagugaacucuguuauagagaagaugaauacccaguuuacagcuguggguaaagaguucaaccaccuggaaaagcggauugaaaauuuaaacaagaaagucgaugacggguuccuggauaucuggacuuacaaugccgagcuccuugugcuguuggaaaacgagcgcacccuagacuaucaugauagcaauguaaagaaccuguacgagaaaguucgaucacaacucaagaacaaugcaaaagaaaucggcaacggauguuuugaguucuaucacaagugcgacaauacauguauggaaagugugaagaacggcacuuacgauuauccuaaauacuccgaggaagccaagcugaauagagaggagauugacggggucaaacuugaaagcaccaggaucuaucagauucuggcuauauacucuacaguggcgucaaguuugguccucgugguuagccugggagcaaucuccuuuuggaugugcucuaacgguucguuacagugccggauuuguaucuga

SEQ ID NO: 131291 - RNA, 1701 nt, Artificial Sequence
  derived and/or modified CDS sequence (opt3) from hemagglutinin__InfluenzaA__ACV04378
augaaggccauccuggugguccuccuuuacaccuucgcuacagcaaacgccgacacucugugcauuggcuaucacgcgaauaacagcacggauaccguugacacaguguuggagaagaauguaacugugacccauuccgucaacuuacuggaagauaagcacaaugggaaacuauguaagcucagaggaguggcuccccugcaucuugguaaaugcaacauagccggcuggauccuggggaauccugagugugaaucuuugucaacagcaaguagcugguccuacauuguugagaccucuucgucagacaacggaacuugcuauccaggcgauuuuaucgacuacgaggagcucagggagcagcugagcaguguguccucuuucgaacgguuugagauuuucccgaagacaagcuccuggcccaaucacgauucaaacaagggugucaccgccgcuuguccucaugcaggggccaaaaguuuuuauaagaaucugaucuggcucgugaaaaagggaaacagcuacccaaaauuaucuaaguccuauauaaaugacaagggcaaagaaguacugguucuuuggggcauccaccaccccucaacgagcgcugaucaacagaguuuguaccagaacgccgacgcguacguguucgucgggacuucucgcuauuccaagaaauuuaagccugagauugcaauccgaccaaaagugcgugaucaggagggaagaaugaauuacuauuggacccugguggaacccggugacaagauuacauucgaggccacuggcaaccuagucguuccuagguacgcuuuugccauggaacggaacgcagggagcggaaucauaauuucggauaccccagugcaugacugcaauacaaccugucaaacgccgaaaggcgcuaucaacacuucucuccccuuccagaauauucacccuaucacaaucgguaagugcccaaaguauguaaaauccaccaagcugcgccuugccacugggcugagaaacauucccucaauacagaguaggggauuguuuggcgcgaucgccggcuucauugaagggggauggacagguaugguggacggcugguacggguaucaucaccagaaugaacaaggaagcggcuacgcagcugaucucaaauccacccagaacgccaucgacgagauaacgaauaaggucaacucugugauugagaaaaugaauacccaguuuacagcuguugguaaggaguucaaccaccuggaaaagcggaucgaaaauuuaaacaaaaagguggaugacggguuccuggauaucuggacuuacaaugccgagcuccuuguccuguuggaaaacgagcgcacccuagacuaucaugauagcaaugugaaaaaccuguacgagaagguacgaucacagcucaaaaacaaugcaaaggaaauuggcaacggauguuuugaguucuaucacaagugcgacaauacauguauggaaaguguuaaaaacggcacuuacgauuauccuaaguacuccgaggaagccaaacugaauagagaggagaucgacggggugaaacuugaaagcaccaggauuuaucaaauacuggcuaucuacucuacagucgcgucaaguuuggugcucauugucagccugggagcaaucuccuuuuggaugugcucuaacgguucguuacagugccggaucuguauuuga

SEQ ID NO: 131292 - RNA, 1701 nt, Artificial Sequence; identical to SEQ ID NO: 130959
  derived and/or modified CDS sequence (opt3) from hemagglutinin__InfluenzaA__ACV04388

SEQ ID NO: 131293 - RNA, 1701 nt, Artificial Sequence; identical to SEQ ID NO: 130717
  derived and/or modified CDS sequence (opt3) from hemagglutinin__InfluenzaA__ACV04398

SEQ ID NO: 131294 - RNA, 1701 nt, Artificial Sequence; identical to SEQ ID NO: 130961
  derived and/or modified CDS sequence (opt3) from hemagglutinin__InfluenzaA__ACV04408

SEQ ID NO: 131295 - RNA, 1701 nt, Artificial Sequence; identical to SEQ ID NO: 130717
  derived and/or modified CDS sequence (opt3) from hemagglutinin__InfluenzaA__ACV04489

SEQ ID NO: 131296 - RNA, 1701 nt, Artificial Sequence; identical to SEQ ID NO: 130717
  derived and/or modified CDS sequence (opt3) from hemagglutinin__InfluenzaA__ACV04499

SEQ ID NO: 131297 - RNA, 1701 nt, Artificial Sequence; identical to SEQ ID NO: 130897
  derived and/or modified CDS sequence (opt3) from hemagglutinin__InfluenzaA__ACV04509

SEQ ID NO: 131298 - RNA, 1701 nt, Artificial Sequence; identical to SEQ ID NO: 130717
  derived and/or modified CDS sequence (opt3) from hemagglutinin__InfluenzaA__ACV04519

SEQ ID NO: 131299 - RNA, 1701 nt, Artificial Sequence; identical to SEQ ID NO: 130717
  derived and/or modified CDS sequence (opt3) from hemagglutinin__InfluenzaA__ACV04529

SEQ ID NO: 131300 - RNA, 1701 nt, Artificial Sequence; identical to SEQ ID NO: 130717
  derived and/or modified CDS sequence (opt3) from hemagglutinin__InfluenzaA__ACV04549

SEQ ID NO: 131301 - RNA, 1701 nt, Artificial Sequence; identical to SEQ ID NO: 130717
  derived and/or modified CDS sequence (opt3) from hemagglutinin__InfluenzaA__ACV04559

SEQ ID NO: 131302 - RNA, 1701 nt, Artificial Sequence; identical to SEQ ID NO: 130717
  derived and/or modified CDS sequence (opt3) from hemagglutinin__InfluenzaA__ACV04579

SEQ ID NO: 131303 - RNA, 1701 nt, Artificial Sequence
  derived and/or modified CDS sequence (opt3) from hemagglutinin__InfluenzaA__ACV04751
auggaggccauccugguggucaugcucuacaccuucgcuacagcaaacgccgacacucuuugcauuggcuaucacgcgaauaacagcacggauaccguugacacagugcuggaaaagaauguaacugugacccauuccgucaacuuguuagaggauaaacacaaugggaagcuguguaaacuaagaggaguggcuccccucaggcuggguaagugcaacauagccggcuggauccuugggaauccugaaugugagucucugucaacagcaaguagcugguccuacauuguugaaaccucuucgucagacaacggaacuugcuauccaggcgauuuuaucgacuacgaggaguugcgggaacagcucagcaguguguccucuuucgagcgcuuugaaauuuucccgaaaacaagcuccuggcccaaucaugauucaaacaagggugucaccgccgcuuguccucacgcaggggccaagaguuuuuauaaaaaucugaucuggcuggugaagaaaggaaacagcuacccaaagcucucuaaauccuauauaaaugacaagggcaaggagguauuaguucuguggggcauccaucaccccucaacgagcgcugaucaacagagucuuuaccagaacgccgacgcguacguguucgucgggacuucucgauauuccaaaaaguuuaaaccugagauugcaauccguccaaaggugagagaucaggaaggaaggaugaauuacuauuggaccuugguggagcccggugacaaaauuacauucgaagccacuggcaaccuggucguuccucgguacgcuuuugccauggagcgcaacgcagggagcggaaucauaauuucggauaccccagugcacaauugcaacacaaccugucaaacgccgaagggcgcuaucaauacuucucuacccuuccagaacauucauccuaucacaaucgguaaaugcccaaaguauguaaaguccaccaaacucagacuggccacugggcuuaggaaugugcccucaauucagagucggggacuguuuggcgcgauagccggcuucaucgaagggggauggacagguauggucgacggcugguacggguaucaccaucagaacgagcaaggaagcggcuacgcagcugacuugaaguccacccagaaugccauugaugagaucacgaacaaaguuaauucugugauagaaaagaugaacacccaguuuacagcuguggguaaagaguucaaucaccucgaaaagcgcauugagaaccugaauaagaaagucgacgauggguucuuagacaucuggacuuacaacgccgaacugcucgugcuucuggagaaugagcgaaccuuggauuaucacgacagcaacguaaagaaccuauacgaaaaaguuagaucacagcugaagaauaacacaaaagagaucggcaauggauguuuugaguucuaucauaagugcgauaacacuuguauggaaagugugaagaauggcaccuacgacuauccuaaauacuccgaagaggcaaagcucaacagggaggaaauugauggggucaaacuggagagcacacggaucuaucaaauucuugccauauacucuaccguggcuucaagucuggucuuggugguuagccucggagcgaucuccuuuuggaugugcucuaaugguucgcugcagugccguauuuguaucuga

SEQ ID NO: 131304 - RNA, 1701 nt, Artificial Sequence
  derived and/or modified CDS sequence (opt3) from hemagglutinin__InfluenzaA__ACV04752
auggaggccauccuggugguccuccuuuacaccuucgcuacagcaaacgccgacacucugugcauuggcuaucacgcgaauaacagcacggauaccguugacacaguguuggaaaagaauguaacugugacccauuccgucaacauauuagaggauaaacacaaugggaagcuguguaaacuaagaggaguggcuccccuccaucuggguaagugcaacaucgccggcuggauucuugaaaauccugagugugaaucucugucaacagcaaguagcugguccuacaucguugagaccucuucgucagacaacgggacuugcuauccaggagauuuuauugacuacgaggaauugagggagcagcucagcaguguguccucuuucgaacgguuugagaucuucccgaaaacaagcuccuggcccaaucacgauucaaacaagggcgucaccgccgcuuguccucaugcaggcgccaagaguuuuuauaaaaaucugauauggcuggugaagaaagggaacagcuacccaaagcucucuaaauccuauaucaaugacaagggaaaggagguauuaguucuguggggcauucaccaccccucaacgagcgcugaucaacagagucuuuaccagaacgccgacgcguacguguucgucgguucuucccgcuauagcaaaaaguuuaaaccugaaaucgcaauucgaccaaaggugcgugaucaggaggggagaaugaauuacuauuggacuuugguggaacccggagacaaaaucaccuucgaggccacagguaaccuggucguuccuagguacgcuuuugccauggaacggaacgcaggcucggggauaauuaucucugauacuccagugcaugacugcaauaccacaugucaaaccccgaagggagcuauuaacacgucccuacccuuccacaauauccauccuaucacuauuggcaaaugcccaaaguauguaaagucaacaaaacuccgccuggccaccggucuuagaaacgugcccaguauacagagcagggggcuguuuggagcgaucgccggcuucauugagggcggguggacuggaauggucgacgguugguacggcuaucaccaccagaaugagcagggguccggauacgcagcugauuugaagucuacacaaaacgccaucgacgaaauaaccaauaaagugaacagcguuauugagaagaugaauacgcaguuuaccgcugugggcaaagaguucaaccaucucgaaaagcggaucgaaaaucugaacaagaaagucgaugacgguuucuuagauaucuggacauacaaugccgagcugcucgugcuucuggagaacgaacgcacuuuggacuaucacgauucaaauguaaagaaccuauacgagaaaguucgaagucagcugaagaacaaugcaaaagaaauugggaacggcuguuuugaguucuaucauaagugcgacaauaccuguauggaauccgugaagaacggaacauacgauuauccuaaauacagcgaggaggccaagcucaauagagaagagaucgacggcgucaaacuggaaucuacuaggauuuaucagauacuugcuaucuacucaaccguggcgaguagccuggucuuggugguuucccucggggcaauuucuuuuuggaugugcucgaacggaagccugcaaugccggaucuguaucuga

SEQ ID NO: 131305 - RNA, 1701 nt, Artificial Sequence
  derived and/or modified CDS sequence (opt3) from hemagglutinin__InfluenzaA__ACV04753
auggaggccauccuggugguccuccuuuacaccuucgcuacagcaaacgccgacacucugugcauuggcuaucacgcgaauaacagcacggauaccguugacacaguguuggaaaagaauguaacugugacccauuccgucaacuuacuggaggauaaacacaaugggaagcuauguaaacucagaggaguggcuccccugcaucuugguaagugcaacauagccggcuggauccuggggaauccugaaugugagucuuugucaacagcaaguagcugguccuacauuguugaaaccucuucgucagacaacggaacuugcuauccaggcgauuuuaucgacuacgaggagcucagggaacagcugagcaguguguccucuuucgagcgguuugaaauuuucccgaaaacaagcuccuggcccaaucacgauucaaacaagggugucaccgccgcuuguccucaugcaggggccaagaguuuuuauaaaaaucugaucuggcucgugaagaaaggaaacagcuacccaaaguuaucuaaauccuauauaaaugacaagggcaaggagguacugguucuuuggggcauccaccaccccucaacgagcgcugaucaacagaguuuguaccagaacgccgacgcguacguguucgucgggacuucucgcuauuccaaaaaguuuaaaccugagauugcaauccgaccaaaggugcgugauagagaaggaaggaugaauuacuauuggacccugguggagcccggugacaaaauuacauucgaagccacuggcaaccuagucguuccucgguacgcuuuugccauggagcgcaacgcagggagcggaaucauaauuucggauaccccagugcaugacugcaauacaaccugucagacgccgaagggcgcuaucaacacuucucuccccuuccaaaauauucacccuaucacaaucgguaaaugcccaaaguauguaaaguccaccaaacugagacuugccacugggcugaggaacgugcccucaauucagagucggggauuguuuggcgcgauagccggcuucaucgaagggggauggacagguauggucgacggcugguacggguaucaucaccagaaugagcagggaagcggcuacgcagcugaucucaaguccacccaaaacgccauugacgagaucacgaauaaagugaacucuguuauagaaaagaugaauacccaguuuacagcuguggguaaagaguucaaccaccuggaaaagcgcauugagaauuuaaacaagaaagucgaugacggguuccuggauaucuggacuuacaaugccgaacuccuugugcuguuggagaacgagcgaacccuagacuaucaugauagcaauguaaagaaccuguacgaaaaaguuagaucacagcucaagaacaaugcaaaagagaucggcaacggauguuuugaguucuaucacaagugcgacaauacauguauggaaagugugaagaacggcacuuacgauuauccuaaauacuccgaagaggccaagcugaauagggaggaaauugacggggucaaacuugagagcacccggaucuaucagauucuggcuauauacucuacaguggcgucaaguuugguccucgugguuagccugggagcaaucuccuuuuggaugugcucuaacgguucguuacaaugccguauuuguaucuga

SEQ ID NO: 131306 - RNA, 1701 nt, Artificial Sequence
  derived and/or modified CDS sequence (opt3) from hemagglutinin__InfluenzaA__ACV04754
auggaggccauccuggugguccuccuuuacaccuucgcuacagcaaacgccgacacucugugcauuggcuaucacgcgaauaacagcacggauaccguugacacaguguuggaaaagaauguacccgugacucauuccgucaacuuacugaaagauaagcacaaugggaaacuauguaagcucagaggaguggcuccucugcaucuugguaaaugcaacauagccggcuggauccuggggaauccagagugugaaucuuugucaaccgcaaguagcugguccuacauuguugagacaucuucgucagacaacggaaccugcuauccgggcgauuuuaucgacuacgaagaacucagggagcagcugagcaguguguccucuuucgaacgguuugagauuuuccccaagacuagcuccuggccuaaucacgaaucaaacaagggugucacagccgcuuguccacaugcaggggccaaaaguuuuuauaagaaucugaucuggcucgugaaaaagggaaacagcuaccccaaauuaucuaaguccuauauaaaugauaagggcaaagagguacugguucuuuggggcauccaccacccuucaaccagcgcugaccaacagaguuuguaccagaacgccgaugcguacguguucgucgggacgucucgcuauuccaagaaauuuaagccagagauugcaauccgacccaaagugcgugaccaggaaggaagaaugaauuacuauuggacucugguggagccuggugauaagauuaccuucgaagccacaggcaaccuagucguuccaagguacgcuuuugccauggagcggaacgcagggagcggaaucauaauuucggacacuccggugcaugauugcaauaccacaugucaaacccccaaaggcgcuaucaacacgucucucccuuuccagaauauucacccaaucacuaucgguaagugccccaaguauguaaaauccacaaagcugcgccuugccaccgggcugagaaacgugccuucaauucagaguaggggagucuuuggcgcgauagccggcuucaucgaagggggauggacugguaugguggacggcugguacggguaucaucaccagaaugagcaaggaagcggcuacgcagcugacuugaaauccacacagaacgccauugaugagaucaccaauaagguuaacucugugauagagaaaaugaauacgcaguuuaccgcugucgguaaggaguucaaccaccucgaaaagcggauugagaaucugaacaaaaagguggacgauggguucuuagacaucuggacauacaaugccgaacugcucguacuucuggagaacgagcgcacuuuggauuaucaugacagcaauguuaaaaaccuauacgaaaaggugcgaucacagcugaaaaacaaugcaaaggagaucggcaacggauguuuugaguucuaucacaagugcgauaauaccuguauggaaagugucaaaaacggcacauacgacuauccaaaguacuccgaagaggccaaacucaauagagaggaaauugauggggugaagcuggagagcacuaggaucuaucaaauucuugcuauauacucuaccgucgcgucaagucugguguugguugugagccucggagcaaucuccuuuuggaugugcucuaacgguucgcugcagugccggauuuguaucuga

SEQ ID NO: 131307 - RNA, 1701 nt, Artificial Sequence; identical to SEQ ID NO: 131202
  derived and/or modified CDS sequence (opt3) from hemagglutinin__InfluenzaA__ACV04755

SEQ ID NO: 131308 - RNA, 1701 nt, Artificial Sequence; identical to SEQ ID NO: 130897
  derived and/or modified CDS sequence (opt3) from hemagglutinin__InfluenzaA__ACV33084

SEQ ID NO: 131309 - RNA, 1701 nt, Artificial Sequence; identical to SEQ ID NO: 130717
  derived and/or modified CDS sequence (opt3) from hemagglutinin__InfluenzaA__ACV33094

SEQ ID NO: 131310 - RNA, 1701 nt, Artificial Sequence; identical to SEQ ID NO: 130717
  derived and/or modified CDS sequence (opt3) from hemagglutinin__InfluenzaA__ACV33104

SEQ ID NO: 131311 - RNA, 1701 nt, Artificial Sequence; identical to SEQ ID NO: 130717
  derived and/or modified CDS sequence (opt3) from hemagglutinin__InfluenzaA__ACV33114

SEQ ID NO: 131312 - RNA, 1701 nt, Artificial Sequence; identical to SEQ ID NO: 130717
  derived and/or modified CDS sequence (opt3) from hemagglutinin__InfluenzaA__ACV33124

SEQ ID NO: 131313 - RNA, 1701 nt, Artificial Sequence; identical to SEQ ID NO: 130717
  derived and/or modified CDS sequence (opt3) from hemagglutinin__InfluenzaA__ACV33134

SEQ ID NO: 131314 - RNA, 1701 nt, Artificial Sequence; identical to SEQ ID NO: 131279
  derived and/or modified CDS sequence (opt3) from hemagglutinin__InfluenzaA__ACV33144

SEQ ID NO: 131315 - RNA, 1701 nt, Artificial Sequence; identical to SEQ ID NO: 130717
  derived and/or modified CDS sequence (opt3) from hemagglutinin__InfluenzaA__ACV33154

SEQ ID NO: 131316 - RNA, 1701 nt, Artificial Sequence; identical to SEQ ID NO: 130717
  derived and/or modified CDS sequence (opt3) from hemagglutinin__InfluenzaA__ACV33164

SEQ ID NO: 131317 - RNA, 1701 nt, Artificial Sequence; identical to SEQ ID NO: 130717
  derived and/or modified CDS sequence (opt3) from hemagglutinin__InfluenzaA__ACV33174

SEQ ID NO: 131318 - RNA, 1701 nt, Artificial Sequence; identical to SEQ ID NO: 130704
  derived and/or modified CDS sequence (opt3) from hemagglutinin__InfluenzaA__ACV41981

SEQ ID NO: 131319 - RNA, 1701 nt, Artificial Sequence; identical to SEQ ID NO: 130743
  derived and/or modified CDS sequence (opt3) from hemagglutinin__InfluenzaA__ACV41991

SEQ ID NO: 131320 - RNA, 1701 nt, Artificial Sequence; identical to SEQ ID NO: 130743
  derived and/or modified CDS sequence (opt3) from hemagglutinin__InfluenzaA__ACV42001

SEQ ID NO: 131321 - RNA, 1701 nt, Artificial Sequence; identical to SEQ ID NO: 130717
  derived and/or modified CDS sequence (opt3) from hemagglutinin__InfluenzaA__ACV42008

SEQ ID NO: 131322 - RNA, 1701 nt, Artificial Sequence; identical to SEQ ID NO: 130717
  derived and/or modified CDS sequence (opt3) from hemagglutinin__InfluenzaA__ACV42018

SEQ ID NO: 131323 - RNA, 1701 nt, Artificial Sequence; identical to SEQ ID NO: 130364
  derived and/or modified CDS sequence (opt3) from hemagglutinin__InfluenzaA__ACV49501

SEQ ID NO: 131324 - RNA, 1701 nt, Artificial Sequence
  derived and/or modified CDS sequence (opt3) from hemagglutinin__InfluenzaA__ACV49512
augaagaccaucauugcccugagcuacauauucugccucgcucuuggccaggaccugcccgggaacgauaauuccacagcaacuuuguguuuaggacaccaugccgugccuaacgguacgcuggucaaaaccaucacagacgaucaaauugagguuacuaaugcgaccgaacuugugcagucuucaaguacaggcaagaucugcaacaauccacacaggauucucgacgggaucgauuguacccugauagacgcucuacugggagauccgcauugcgacguauuucagaacgagacuugggauuuguucguggaaagaagcaaagccuuuuccaauuguuaucccuacgacgucccugauuaugcaucucuccggucgcugguggccucaagcggcacacuggaguucaucaccgaagguuuuacguggacugggguuacccagaacggaggcaguaaugcuugcaagcgcggcccaggguccggauucuuuucucgacucaacugguuaacaaaaagcgguuccacuuaccccgugcugaaugucaccaugccuaacaaugacaacuucgauaaguuguauauuuggggcgugcaccauccaucaacaaaucaagagcagaccaguuuguacguacaggcaagcgggcguguuacggugucuacuagaaggucccagcaaacaaucauucccaacaucgagucacggccuuggguccgcggacugagcaguagaauaucuauuuauuggaccaucgugaagccaggcgacgugcuagucauuaacuccaaugguaaccucaucgccccgaggggguacuuuaaaaugcggacuggaaagagcucgaucaugcgcucugacgcucccauugauacauguauauccgaaugcaucaccccuaauggcucaauuccaaacgacaaacccuuccagaauguuaacaagaucacguacggcgccuguccuaaauaugugaagcagaauacccugaaacuugcgacagggaugcgaaacguaccagagaaacagacuagaggacuguuuggugcaauagccggcuucauugaaaaugggugggagggaaugaucgauggcugguacgguuuuaggcaccaaaacagugaggggaccggccaggcugccgaccuuaagagcacacaggcagcuaucgaucaaauuaauggaaaacucaaccgggugaucgaaaagacuaaugagaaauuccaccagauugaaaaggaguucuccgaagucgagggccguauacaggaccuggagaaauauguggaagauaccaagaucgacuuauggucuuacaacgccgagcugcucguugcgcuugaaaaucagcauacaauugaucugaccgacagcgagaugaacaaguuguuugaaaagacucgcagacaacuaagggagaacgccgaggauauggggaauggaugcuucaagaucuaucacaaaugugacaacgcaugcaucgaaucaauucggaaugguacguacgaccaugauguguaucgagacgaggcucugaacaaucgcuuucagauaaaggaugucgaacucaaaaguggcuacaaggacuggauccuguggauuuccuucgccaucagcugcuuucuucugugugugguauugcucggguucauuaugugggcuugccagagaggaaacaucagguguaauauaugcaucuga

SEQ ID NO: 131325 - RNA, 1701 nt, Artificial Sequence; identical to SEQ ID NO: 130377
  derived and/or modified CDS sequence (opt3) from hemagglutinin__InfluenzaA__ACV49523

SEQ ID NO: 131326 - RNA, 1698 nt, Artificial Sequence
  derived and/or modified CDS sequence (opt3) from hemagglutinin__InfluenzaA__ACV49545
augaaggccaaccugcucgugcuucugugcgcuuuggcagccgcggacgcugauaccaucuguauuggcuaccacgccaauaacagcacagacacugucgauacgguuuuagagaaaaaugugaccguaacacauuccgugaaccugcuagaagacucucacaaugggaagcucugcagacugaaaggaauagcaccccuucagcuggguaaguguaacaucgccggcugguugcucgggaauccugagugcgauccacugcugccggucaggucauggaguuauauuguggaaacucccaacagcgagaauggaaucuguuacccuggcgacuucauugauuaugaagaacuccgggagcaauuauccucuguuucgucauuugaacgcuucgagaucuuuccaaaagaaagcaguuggcccaaccauaauaccaacggugugacagcugcaugcucccacgaggggaagucuagcuucuaccgaaaucugcuuugguugaccgagaaggaaggauccuauccuaaacugaagaacucauacgucaauaaaaagggcaaagaggugcuaguacucuggggcauacaucacccacccaacaguaaggaacagcagaaccuguaucagaaugagaacgccuacguuagcguggucacuucuaauuacaaccguagauuuacaccugaaaucgcugagaggccaaaggugcgggaccaagccgggcgcaugaauuauuacuggacccuucugaaaccgggagauacgauuaucuucgaggcgaacgguaauuugauugcacccauguaugccuuugcucucuccagaggcuucgggucaggaaucauaacuagcaacgccaguaugcacgaauguaauaccaagugccagacaccucugggcgcaauuaacucuuccuuaccauaccagaauauccaucccgugacuauuggugaguguccuaaauaugucaggagcgcuaagcugcggaugguuaccgggcuccgcaacaucccaucgauccagucucgaggacuuuuuggcgccauugcgggcuucauagaagggggauggacagguaugaucgacggcugguacggguaucaccaucaaaaugagcagggauccggcuacgccgcagaucagaaaucaacccagaacgcuauuaaugguaucacgaacaaggugaacacuguaauagagaaaaugaauauucaauuuacagccguggggaaggaguucaacaagcuggagaaaagaauggaaaauuugaacaagaaagucgacgauggcuuucuagacaucuggaccuacaaugcugagcugcucgugcugcuugaaaacgagaggacucuggacuuccacgauaguaauguuaagaacuuguaugaaaaagucaagagccagcucaagaauaacgccaaagagaucggaaauggcugcuucgaguuuuaccacaagugugacaacgaaugcauggaguccgugcggaaugggacauaugauuaccccaaauauucugaagagagcaagcugaaccgugagaaaguggacggaguaaaguuagaaucaauggguauuuaccagauccuggcaauuuauaguaccguugccuccagccuagugcuccuggucucucuuggcgcuauaucauucuggaugugcaguaaugggagcuugcaaugucgcaucugcauuuga

SEQ ID NO: 131327 - RNA, 1701 nt, Artificial Sequence
  derived and/or modified CDS sequence (opt3) from hemagglutinin__InfluenzaA__ACV49556
augaaggccagacugcucauccuucugugcgcuuuggcagccaccgacgcggauacaauuuguauaggcuaccacgcuaacaauagcacugacacgguggauaccgucuuagagaaaaacguuacagugacucauuccguaaaucugcuagaagacucucacaacgggaagcucugcaggcugaaaggaaucgccccgcuucagcuggguaaguguaauauugcaggcuggaucuuggggaacccugagugcgauucacuccugccagccaguagcugguccuauauuguggaaacccccaauucuaaaaacggaaucuguuaccccggcgacuucauagauuaugaggaacugcgggagcaacucucgucagucagcaguuuugagcgcuucgaaaucuuuccuaaggaguccucuuggccaaagcauagcacaaccaaaggugugacugcugcaugcucccacgccgggaagucaaguuucuaccgaaauuuacuguggcuuaccaaaaaggaagacagcuaucccaaauugucuaacuccuacguuaauaagaagggaaaagaggugcugguccuauggggcgugcaucacccuucaagcaguaaggagcagcagacacucuaucagaacgaaaaugcuuacguaucuguuguguccagcaacuacaaucguagauuuauuccagagaucgccgaaaggcccgaggucaaagaucaagcgggccggauuaacuauuacuggacgcugcuugaaccuggggacacuaucauauucgaggcaaacggaaaucugguggccccaugguaugcuuuugccuugucgcgcgguuucggcucugggauuaucaccuccaacgcaucaaugcacgaguguaauacaaagugccagacuccgcagggagcuauuaacaguagccuccccuuucagaauauccauccugugaccaucggcgaauguccaaaauacgucaaguccgccaaacugagaaugguuacagguuuaaggaacauucccucuauacaaagccgggggcuguucggagcgaucgccggcuuuauugagggcggguggaccggaaugaucgaugguugguauggcuaccaccaucagaaugaacaggggucaggauaugcagcugaccagaagaguacgcaaaacgccauaaauggcauuacuaacaagguaaauuccgugaucgagaaaaugaacacacaguucaccgcuguggguaaggaauuuaauaaccucgagaaacgcauggagaaucuuaacaagaaagucgaugacggguuccuggacaucuggacuuacaacgccgaauugcuagugcugcucgagaaugaacgaacacuggauuuccacgacagcaacguuaagaaucuuuacgagaaggugaaaauucagcugaagaacaaugcaaaagaaaucggcaacggaugcuuugaguucuaucacaagugugauaaugagugcauggaaucugucagaaacggcaccuacgacuauccuaaauacucaaaggagaguaaguugaauagggagaaaauugauggggugaagcucgaaagcaugggaguauaucaaauacuggccaucuacuccacgguugcuucuucguuagugcugcuagucagccucggugcgauuuccuuuuggaugugcucaaacggcagucugcagugucggaucugcaucuga

SEQ ID NO: 131328 - RNA, 1701 nt, Artificial Sequence
  derived and/or modified CDS sequence (opt3) from hemagglutinin__InfluenzaA__ACV49567
augaaggccaaacugcucauccuucugugcgcuuugaccgcaacagacgccgauacuauuuguauaggcuaccacgcgaacaauagcacggacaccguggauacagucuuagagaagaacguuacugugacccauuccguaaaucugcuagaagacucucacaacgggaaacucugcagacugaagggaaucgcuccccuucagcuggguaaauguaauauugccggcuggaucuuggggaacccugagugcgaaucacuccugaguaagaggagcugguccuauauugcagagacaccaaauucugaaaacggagccuguuacccgggcgauuucgcugacuaugaggagcugcgggaacaacucucgucagugagcaguuuugagcgcuucgaaaucuuucccaaggagcgauccuggccuaaacauaauauaacccguggugucacugcagccugcucucacgcugggaaaagcuccuucuacaaaaacuuacuguggcuuacagagaccgauggaucauauccaaaguugaguaaaagcuacgugaauaacaaggaaaaggagguucuggugcuauggggcguccaucaccccucuaauaucgaagaccagaaaacgcucuauagaaaggagaacgccuacguguccguaguuucaagcaauuacaacaggcgguuuacuccugaaauugcggagcgcccaaaagugagaggccaggcagggaggaucaacuauuacuggacccugcuugagcccggagauacaauuaucuucgaagccaaugguaaccugauagcuccuugguaugccuuugcauugagucgggacuucggcucugggauuaucacuuccaaugcuagcauggaugagugugacaccaagugccagacaccacaaggagccauuaacucgucucucccguuucagaauauccaccccgucaccaucggcgaauguccuaaauacgugaaguccacgaaacugcgcauggugacugguuuacgaaacauuccaucaauacagaguagagggcuguucggagcgaucgccggcuuuauugagggcggguggacaggaaugaucgaugguugguauggcuaccaucaccagaaugaacaagggagcggauaugcagcugaccagaaguccacccagaacgccauaaauuggauuacuaacaaggucaauucuguuaucgagaaaaugaacacacaguucaccgcugugggcaaggaguuuaauaaacucgaaaagaggauggagaaccuuaauaaaaagguagacgaugguuuccuggacaucuggacguacaacgccgaauugcuagugcugcucgagaacgaacggacccuggauuuccaugacagcaaugucaagaaccuuuacgagaaagugaagaaucaacugcguaacaaugcaaaagagauugggaacggcugcuuugaguucuaucacaaguguaauaacgaaugcauggaaucaguuaaaaauggaacauacgauuaucccaaguacagugaggaguccaaguugaaccgcgaaaagaucgacggcgugaagcucgagagcaugggggucuaucagauucuggccauauacucuacuguggcuucaaguuuaguacugcuaguuagccucggagcgaucuccuuuuggaugugcucuaaugguucgcugcaguguagaauuugcaucuga

SEQ ID NO: 131329 - RNA, 1689 nt, Artificial Sequence
  derived and/or modified CDS sequence (opt3) from hemagglutinin__InfluenzaA__ACV49578
auggccaucauuuaccugauacuccuuuucaccgcugugagaggcgaccagaucugcauuggguaucacgcaaacaauagcacagagaaggucgauacuauccuggaaaggaacguuacggugacccaugccaaagacauuuuggagaagacacacaauggaaaauuauguaagcugaacgguauacccccucuagaacucggcgauugcuccaucgcgggguggcugcuuggaaauccagagugugaccggcuguugcgcguaccggaauggucuuacaucauggagaaagagaaccccaaguauucacucugcuacccuggcaguuuuaaugauuaugaggagcugaagcaucugcucagcuccgugaaacacuucgaaaaggucaaaauuuuaccaaaggaccgauggacucaacauaccacaaccggugggucucgugcuugugccgugucgggaaaccccucauuuuucagaaauaugguuuggcugacuaaaaagggcccuaacuacccaguggcaaagggcagcuauaauaacacaaguggggagcagaugcuuaucauuuggggaguccaccaccccaucgaugaggccgaacagauagcuuuguaccagaaaguggguaccuacguauccgcaucuacgagcacucugaauaagagguccaccccugagauugccgcucggccagaaguuaacggccuagggucacgcauggaguuuaguuggacacuccuggacaugugggauacuaucaauuucgaaagcaccggaaaccuuguggccccggaguauggcuuuaaaauuucuaagagagguuccucagggaucaugaaaacagagggaacccuggaaaacugcgagacgaagugucaaacucccuugggcgcgaucaauacaacccucccuuuccauaacguccacccacugacuauuggcgaaugccccaaauacgucaagagcgagaaguuagugcuggcaacagggcucaggaaugugccucagauagaaagucggggacuuuuuggugccaucgcuggcuucauugaagggggauggcagggcaugguugacgguugguauggguaccaucacucuaacgaucagggcuccggauaugccgcagacaaagagagcacccaaaaggcuuuugauggcaucacgaauaaagugaacucgguaauagaaaagaugaauacccaguucgaggccguggggaaagaauuuucuaaccuggagaagcgcuuggaaaaucuaaacaagaaaauggaggacggauuccuggacgucuggacauacaaugcggagcuccuggugcuuauggaaaacgagcgaacucuggauuuccacgacuccaauguuaagaacuuguaugauaaagugagaaugcagcucagggacaaugucaaggaacuggguaacggcuguuuugaguucuaccauaaaugcgaugacgaguguauggauucagugaagaacgggaccuacgacuauccaaaguacgaagaggaaaguaaauuaaaucggaacgagauuaagggaguaaaacugagcuccaugggcguuuaucagauccuagccaucuacgcaacaguggcugguucucucagccuggccauuaugauggcugggaucucauuuuggaugugcaguaauggcucccuucaaugccguauuuguauauga

SEQ ID NO: 131330 - RNA, 1689 nt, Artificial Sequence; identical to SEQ ID NO: 131329
  derived and/or modified CDS sequence (opt3) from hemagglutinin__InfluenzaA__ACV49589

SEQ ID NO: 131331 - RNA, 1689 nt, Artificial Sequence
  derived and/or modified CDS sequence (opt3) from hemagglutinin__InfluenzaA__ACV49600
auggccaucauuuaccugauacuccuuuucaccgcugugagaggcgaccagaucugcauuggguaucacgcaaacaauagcacagagaaggucgauacuauccuggaaaggaacguuacggugacccaugccaaagacauuuuggagaagacacacaauggaaaauuauguaagcugaacgguauacccccucuagaacucggcgauugcuccaucgcgggguggcugcuuggaaauccagagugugaccggcuguugucuguaccggaauggucauacaucauggagaaagagaacccccgcgauggccucugcuauccugguaguuuuaaugacuacgaggaacugaagcaucugcucagcuccgugaagcacuucgaaaaagucaagauuuuaccaaaagaucgauggacucaacauaccacaaccgggggaucucgugcuugugccgugucgggcaaccccucauuuuucagaaauaugguuuggcugacugagaagggcagcaacuauccuguggcaaaagggaguuacaauaacacauccggagagcagaugcuuaucauuugggguguccaccacccaaaugacgaaaccgagcagaggacguuguaucagaacgugggcacuuacguaucuguugggaccagcacacugaauaagcgguccacucccgaaaucgccacccgcccuaaggugaacggacaaggcgguagaauggaguuuucauggacacuacucgauaugugggacaccauaaacuucgaaaguacggggaaucugauugcuccagaguacggauuuaaaaucagcaagagggggucuuccggcauuaugaaaacugagggcacacuugaaaacugcgagaccaagugucagacuccgcugggagcaaucaauacaaccuugcccuuccauaacguccacccucucacgaucggugaaugcccaaaauaugugaagucagagaaacugguguuagccaccggccugcggaaugucccccagauugaaagccgcgggcucuuuggagcuauagccggcuucaucgaggguggguggcagggcaugguugauggaugguacggcuaucaucacaguaacgaccaagggucuggauacgcggcagauaaggaguccacacagaaggccuuugacgguauuacuaauaaagugaacagcguaaucgaaaagaugaauacccaguucgaggcugugggcaaagaauuuucgaaccuugagcgaagacuggaaaauuugaacaagaaaauggaggacggguuccuagaugucuggacauauaaugccgagcugcucgugcugauggaaaacgagaggacucuugacuuccacgauucuaauguuaagaaccuguacgacaaggugcggaugcaguugcgugauaacgucaaagaacucggaaauggcuguuuugaguucuaucauaagugcgacgaugaguguaugaacuccgugaaaaaugguaccuacgacuacccuaaguaugaagaggaaucaaaacugaaccgcaaugagauaaaggggguaaaguuaaguagcaugggcguuuaccaaauucuggcaaucuaugcuacaguggccggaucccuaucucucgcgaucaugauggccggcauuagcuuuuggaugugcucaaacgggagucugcagugcagaaucuguauuuga

SEQ ID NO: 131332 - RNA, 1689 nt, Artificial Sequence
  derived and/or modified CDS sequence (opt3) from hemagglutinin__InfluenzaA__ACV49611
auggccaucauuuaccugauacuccuuuucaccgcugugagaggcgaccagaucugcauuggguaucacgcaaacaauagcacagagaaggucgauacuauccuggaaaggaacguuacggugacccaugccaaagacauuuuggagaagacacacaauggaaaauuauguaagcugaacgguauacccccucuagaacucggcgauugcuccaucgcgggguggcugcuuggaaauccagagugugaccggcuguugucuguaccggaauggucauacaucauggagaaagagaacccccgcgauggccucugcuauccugguaguuuuaaugacuacgaagaacugaagcaucugcucagcuccgugaagcacuucgaaaaagucaagauuuuaccaaaagaucgauggacucaacauaccacaaccgggggaucucgugcuugugccgugucgggcaaccccucauuuuucagaaauaugguuuggcugacugagaagggcagcaacuauccuguggcaaaagggaguuacaauaacacauccggagagcagaugcuuaucauuugggguguccaccacccaaaugacgaaaccgagcagaggacguuguaucagaacgugggcacuuacguaucuguugggaccagcacacugaauaagcgguccacucccaagaucgccacccgcccuaaagugaacggacaaggcgguagaauggaauuuucauggacacuacucgauaugugggacaccauaaacuucgagaguacggggaaucugauugcuccagaauacggauuuaagaucagcaaaagggggucuuccggcauuaugaagacugagggcacacuugagaacugcgaaaccaaaugucagacuccgcugggagcaaucaauacaaccuugcccuuccauaacguccacccucucacgaucggugagugcccaaaguaugugaaaucagaaaagcugguguuagccaccggccugcggaaugucccccagauugagagccgcgggcucuuuggagcuauagccggcuucaucgaagguggguggcagggcaugguugauggaugguacggcuaucaucacaguaacgaccaagggucuggauacgcggcagauaaggaguccacacagaaagccuuugacgguauuacuaauaaggugaacagcguaaucgagaaaaugaauacccaguucgaagcugugggcaaggaguuuucgaaccuugaacgaagacuggagaauuugaacaaaaaggucgaagacggguuccuagauguguggacauauaaugccgagcugcucguucugauggagaacgaaaggacucuugacuuccacgauucuaaugugaagaaccuguacgacaaaguccggaugcaguugcgugauaacgugaaggagcucggaaauggcuguuuugaguucuaucauaaaugcgacgaugaguguaugaacuccguaaagaaugguaccuacgacuacccuaaauaugaggaagagucaaagcugaaccgcaaugaaauaaaggggguuaaauuaaguagcaugggcguguaccaaauucuggcaaucuaugcuacagucgccggaucccuaucucucgcgaucaugauggccggcauuagcuuuuggaugugcucaaacgggagucugcagugcagaaucuguauuuga

SEQ ID NO: 131333 - RNA, 1701 nt, Artificial Sequence
  derived and/or modified CDS sequence (opt3) from hemagglutinin__InfluenzaA__ACV49633
augaagaccaucauugcccugagcuacauacucugccuuguguucgcucagaaacugcccggcaacgacaauuccacagcaacuuuguguuuagggcaccaugccgucccuaacggaacgcugguuaagaccaucacaaaugaucaaauugaggugacuaacgcgaccgagcuaguacagucuucaaguacagguagaaucugcgacagcccacacaggauucucgauggcaaaaauuguacccugaucgacgcucugcugggggauccgcauugcgacggauuucagaacaaggaaugggauuuguucguggaacgguccaaagccuauucuaauuguuaccccuaugacgucccugauuacgcaucgcuccgcucacugguggccagcaguggcacucuggaguuuacaaacgaagguuucaauuggaccgggguugcucaggacggaacguccuaugcaugcaagcgaggcucugugaaguccuuuuucucccgucucaacugguuacacaaacuggaguacaaguauccagcccuuaaugucacuaugcccaacaaugauaaauuugacaaguuguacauauggggcgugcaucacccuucaaccgauaguguacaaacaagccuguacguucaggcuucugggagagugacugucuccaccaaaaggucacagcagacagugaucccaaacauuggaagccggcccugggugcgcgguaucaguucuagaauuuccaucuauuggaccauagucaagccuggcgacauucuacucaucaauagcacggggaaccugauugccccaaggggauacuucaagauccggucgggcaaaucuuccaucaugcgcucagacgcgccgauugguaacuguaauagugagugcauaacucccaacgggagcaucccuaaugauaagccauuucaaaacguuaaucgaauuacauauggagcaugucccagauacgugaaacagaacacccuuaagcuggccacuggcaugaggaauguaccugaaaaacagacacggggcaucuucggggcuauagccggauuuauugagaacgguugggaaggcaugguggacgggugguauggauuccgucaccagaauagcgagggcaccggucaagcagcugauuugaagucuacgcaggccgcgaucaaccagaucaaugggaaacucaaccgccugauugagaagaccaaugaaaaguuuccacaaaucgagaaagaguucagcgaagucgaaggcaggauucaggacuuagagaaguacguggaggauacaaaaauagaccuguggucauauaacgccgaacuccuuguugcacuggagaaucagcauacuaucgauuugaccgacagugaaaugaacaagcuauucgagagaacacggaaacagcugcgagaaaacgcugaggauaugggaaauggcugcuuuaagauuuaccacaagugugacaacgccugcaucggguccauccgcaauggaacuuacgaucaugacguguauagagacgaggcucucaacaauagguuccaaauuaaaggugucgaacuuaagagcggcuacaaagauuggauacuuuggaucucuuuugccauuucaugcuuccuguugugugugguacuccugggguuuaucaugugggcaugccagaagggaaacauucgguguaauaucugcauauga

SEQ ID NO: 131334 - RNA, 1701 nt, Artificial Sequence; identical to SEQ ID NO: 130404
  derived and/or modified CDS sequence (opt3) from hemagglutinin__InfluenzaA__ACV49644

SEQ ID NO: 131335 - RNA, 1698 nt, Artificial Sequence; identical to SEQ ID NO: 131223
  derived and/or modified CDS sequence (opt3) from hemagglutinin__InfluenzaA__ACV49676

SEQ ID NO: 131336 - RNA, 1701 nt, Artificial Sequence; identical to SEQ ID NO: 130704
  derived and/or modified CDS sequence (opt3) from hemagglutinin__InfluenzaA__ACV53450

SEQ ID NO: 131337 - RNA, 1701 nt, Artificial Sequence; identical to SEQ ID NO: 130704
  derived and/or modified CDS sequence (opt3) from hemagglutinin__InfluenzaA__ACV53460

SEQ ID NO: 131338 - RNA, 1701 nt, Artificial Sequence; identical to SEQ ID NO: 130704
  derived and/or modified CDS sequence (opt3) from hemagglutinin__InfluenzaA__ACV53480

SEQ ID NO: 131339 - RNA, 1701 nt, Artificial Sequence
  derived and/or modified CDS sequence (opt3) from hemagglutinin__InfluenzaA__ACV53490
auggaggccauccuggugguccuccuuuacaccuucgcuacagcaaacgccgacacucugugcauuggcuaucacgcgaauaacagcacggauaccguugacacaguguuggaaaagaauguaacugugacccauuccgucaacuuacuggaggauaaacacaaugggaagcuauguaaacucagaggaguggcuccccugcaucuugguaagugcgacauagccggcuggauccuggggaacccugaaugugagucuuugucaacagcaaguagcugguccuacauuguugaaaccucuucgucagauaauggaacuugcuauccaggcgacuuuaucgauuacgaggagcucagggaacagcugagcaguguguccucuuucgagcgguuugaaauuuucccgaaaacaagcuccuggcccaaccacgacucaaauaagggugucaccgccgcuuguccucaugcaggggccaagaguuuuuauaaaaaccugaucuggcucgugaagaaaggaaauagcuacccaaaguuaucuaaauccuauauaaacgauaagggcaaggagguacugguucuuuggggcauccaccaccccucaacgagcgcugaccaacagaguuuguaccagaaugccgaugcguacguguucgucgggucuucccgcuauagcaaaaaguuuaaaccugagauugcaauccgaccaaaggugcgugaccaggaaggaagaaugaacuacuauuggacucugguggagcccggugauaaaauuaccuucgaagccacaggcaaucuagucguuccuagguacgcuuuugccauggagcggaacgcagggucgggaaucauaauuucugacacuccagugcaugacugcaacaccacaugucaaaccccgaagggcgcuaucaauacgucccuccccuuccacaacauucauccuaucacuaucgguaaaugcccaaaguauguaaagucaacaaaacugcgccuugccaccgggcugagaaaugugcccaguauucagagcaggggauuguuuggcgcgauagccggcuucaucgaagggggauggacugguauggucgauggcugguacggguaucaccaccagaacgagcagggauccggcuacgcagcugaccucaagucuacacaaaaugccauugaugagaucaccaacaaagugaauagcguuauagaaaagaugaacacgcaguuuaccgcuguggguaaagaguucaaucaucuggaaacacggauugagaacuuaaauaagaaggucgacgauggguuccuggacaucuggacuuacaacgccgaacuccuugugcuguuggagaaugagcgcacccuagauuaucacgacucaaacguaaagaaucuguacgaaaagguucgaagucagcucaaaaacaacgcaaaggagaucggcaauggauguuuugaguucuaucauaaaugcgauaacacauguauggaauccgugaagaauggcacuuacgacuauccuaaguacagcgaagaggccaaacugaacagagaggaaauugauggggucaaacuugagucuaccaggaucuaucagauucuggcuauauacucaacaguggcgaguagcuugguccucgugguuucccugggagcaaucucuuuuuggaugugcucgaaugguagcuuacaaugccggauuuguaucuga

SEQ ID NO: 131340 - RNA, 1701 nt, Artificial Sequence
  derived and/or modified CDS sequence (opt3) from hemagglutinin__InfluenzaA__ACV53500
auggaggccauccuggugguccuccuuuacaccuucgcuacagcaaacgccgacacucugugcauuggcuaucacgcgaauaacagcacggauaccguugacacaguguuggaaaagaauguaacugugacccauuccgucaacuuacuggaggauaaacacaaugggaagcuauguaaacucagaggaguggcuccccugcaucuugguaagugcaacauagccggcuggauccuggggaauccugaaugugagucuuugucaacagcaaguagcugguccuacauuguugaaaccucuucgucagacaacggaacuugcuauccaggcgauuuuaucgacuacgaggagcucagggaacagcugagcaguguguccucuuucgagcgguuugaaauuuucccgaaaacaagcuccuggcccaaucacgauucaaacaagggugucaccgccgcuuguccucaugcaggggccaagaguuuuuauaaaaaucugaucuggcucgugaagaaaggaaacagcuacccaaaguuaucuaaauccuauauaaaugacaagggcaaggagguacugguucuuuggggcauccaccaccccucaacgagcgcugaucaacagaguuuguaccagaacgccgacgcguacguguucgucgggucuucccgcuauagcaaaaaguuuaaaccugagauugcaauccgaccaaaggugcgugaucaggaaggaagaaugaauuacuauuggacucugguggagcccggugacaaaauuaccuucgaagccacaggcaaccuagucguuccuagguacgcuuuugccauggagcggaacgcagggucgggaaucauaauuucugauacuccagugcaugacugcaauaccacaugucaaaccccgaagggcgcuaucaacacgucccuccccuuccacaauauucauccuaucacuaucgguaaaugcccaaaguauguaaagucaacaaaacugcgccuugccaccgggcugagaaacgugcccaguauucagagcaggggauuguuuggcgcgauagccggcuucaucgaagggggauggacugguauggucgacggcugguacggguaucaccaccagaaugagcagggauccggcuacgcagcugaucucaagucuacacaaaacgccauugacgagaucaccaauaaagugaacagcguuauagaaaagaugaauacgcaguuuaccgcuguggguaaagaguucaaccaucuggaaacacggauugagaauuuaaacaagaaggucgaugacggguuccuggauaucuggacuuacaaugccgaacuccuugugcuguuggagaacgagcgcacccuagacuaucacgauucaaauguaaagaaccuguacgaaaagguucgaagucagcucaaaaacaaugcaaaggagaucggcaacggauguuuugaguucuaucauaaaugcgacaauacauguauggaauccgugaagaacggcacuuacgauuauccuaaguacagcgaagaggccaaacugaauagagaggaaauugacggggucaaacuugagucuaccaggaucuaucagauucuggcuauauacucaacaguggcgaguagcuugguccucgugguuucccugggagcaaucucuuuuuggaugugcucgaacgguagcuuacaaugccggauuuguaucuga

SEQ ID NO: 131341 - RNA, 1701 nt, Artificial Sequence
  derived and/or modified CDS sequence (opt3) from hemagglutinin__InfluenzaA__ACV53880
augaaggccauccuggugguccuccuuuacaccuucgcuacagcaaacgccgacacucugugcauuggcuaucacgcgaauaacagcacggauaccguugacacaguguuggagaaaaauguaacugugacccauuccgucaacuuacuggaagauaagcacaaugggaaacuauguaagcucagaggaguggcuccccugcaucuugguaaaugcaacauagccggcuggauccuggggaauccugagugugaaucuuugucaacagcaaguagcugguccuacauuguugagaccucuucgucagacaacggaacuugcuauccaggcgauuuuaucgacuacgaggagcucagggagcagcugagcaguguguccucuuucgaacgguuugagauuuucccgaagacaagcuccuggcccaaucacgauucaaacaagggugucaccacggccuguccucaugcuggggcaaaaaguuuuuauaagaaucugaucuggcucgugaaaaagggaaacagcuacccaaaauuaucuaaguccuauauaaaugacaagggcaaagaaguacugguucuuuggggcauccaccaccccucaacuagcgccgaucaacagaguuuguaccagaacgcugacgccuacguguucgucgggaccucucgcuauuccaagaaauuuaagccugagauugcgauccgaccaaaagugcgugaucaggagggaagaaugaauuacuauuggacacugguggaacccggugacaagauuacuuucgaggcaaccggcaaccuagucguuccuagguacgccuuugcuauggaacggaacgccgggagcggaaucauaauuucggauacaccagugcaugacugcaauaccacgugucaaacuccgaaaggcgcaaucaacacaucucuccccuuccagaauauucacccuaucaccaucgguaagugcccaaaguauguaaaauccacuaagcugcgccuugcuacagggcugagaaacgugcccucaauucagaguaggggauuguuuggcgccauagcgggcuucaucgaagggggauggaccgguauggucgacggcugguacggguaucaucaccagaaugaacaaggaagcggcuacgccgcagaucucaaauccacgcagaacgcuauugacgagaucaccaauaaggugaacucuguuauagagaaaaugaauacacaguuuacugccguggguaaggaguucaaccaccuggaaaagcggauugaaaauuuaaacaaaaaggucgaugacggguuccuggauaucuggaccuacaaugcugagcuccuugugcuguuggaaaacgagcgcacacuagacuaucaugauagcaauguaaagaaccuguacgagaagguucgaucacagcucaaaaacaaugccaaggaaaucggcaacggauguuuugaguucuaucacaagugcgacaauacuuguauggaaagugugaaaaacggcaccuacgauuauccuaaguacuccgaggaagcaaaacugaauagagaggagauugacggggucaaacuugaaagcacaaggaucuaucaaauucuggccauauacucuaccguggcuucaaguuugguccucgugguuagccugggagcgaucuccuuuuggaugugcucuaacgguucguuacagugccggauuuguaucuga

SEQ ID NO: 131342 - RNA, 1701 nt, Artificial Sequence; identical to SEQ ID NO: 130717
  derived and/or modified CDS sequence (opt3) from hemagglutinin__InfluenzaA__ACV53881

SEQ ID NO: 131343 - RNA, 1701 nt, Artificial Sequence; identical to SEQ ID NO: 130704
  derived and/or modified CDS sequence (opt3) from hemagglutinin__InfluenzaA__ACV53882

SEQ ID NO: 131344 - RNA, 1701 nt, Artificial Sequence; identical to SEQ ID NO: 130717
  derived and/or modified CDS sequence (opt3) from hemagglutinin__InfluenzaA__ACV53883

SEQ ID NO: 131345 - RNA, 1701 nt, Artificial Sequence; identical to SEQ ID NO: 130717
  derived and/or modified CDS sequence (opt3) from hemagglutinin__InfluenzaA__ACV53885

SEQ ID NO: 131346 - RNA, 1701 nt, Artificial Sequence
  derived and/or modified CDS sequence (opt3) from hemagglutinin__InfluenzaA__ACV53899
augaaggccauccuggugguccuccuuuacaccuucgcuacagcaaacgccgacacucugugcauuggcuaucacgcgaauaacagcacggauaccguugacacaguguuggagaaaaauguaacugugacccauuccgucaacuuacuggaagauaagcacaaugggaaacuauguaagcucagaggaguggcuccccugcaucuugguaaaugcaacauagccggcuggauccuggggaauccugagugugaaucuuugucaacagcaaguagcugguccuacauuguugagaccucuucgucagacaacggaacuugcuauccaggcgauuuuaucgacuacgaagaacucagggagcagcugagcaguguguccucuuucgaacgguuugagauuuucccgaagacaagcuccuggcccaaucacgauucaaacaagggugucaccgccgcuuguccucaugcaggggccaaaaguuuuuauaagaaucugaucuggcucgugaaaaagggaaacagcuacccaaaauuaucuaaguccuauauaaaugacaagggcaaagaaguacugguucuuuggggcauccaccaccccucaacgagcgcugaucaacagaguuuguaccagaacgccgacgcguacguguucgucgggacuucucgcuauuccaagaaauuuaagccugagauugcaauccgaccaaaagugcgugaucaggagggaagaaugaauuacuauuggacccugguggaacccggugacaagauuacauucgaggccacuggcaaccuagucguuccuagguacgcuuuugccauggaacggaacgcagggagcggaaucauaauuucggauaccccagugcaugacugcaauacaaccugucaaacgccggagggcgcuaucaacacuucucuccccuuccagaauauucacccuaucacaaucgguaaaugcccaaaguauguaaaguccaccaaacugcgccuugccacugggcugagaaacgugcccucaauucagaguaggggauuguuuggcgcgauagccggcuucaucgaagggggauggacagguauggucgacggcugguacggguaucaucaccagaaugagcaaggaagcggcuacgcagcugaucucaaguccacccagaacgccauugacgagaucacgaauaaagugaacucuguuauagaaaagaugaauacccaguuuacagcuguggguaaagaguucaaccaccuggaaaagcggauugagaauuuaaacaagaaagucgaugacggguuccuggauaucuggacuuacaaugccgaacuccuugugcuguuggagaacgagcgcacccuagacuaucaugauagcaauguaaagaaccuguacgaaaaaguucgaucacagcucaagaacaaugcaaaagagaucggcaacggauguuuugaguucuaucacaagugcgacaauacauguauggagagugugaagaacggcacuuacgauuauccuaaauacuccgaagaggccaagcugaauagagaggaaauugacggggucaaacuugagagcaccaggaucuaucaaauucuggcuauauacucuacaguggcgucaaguuugguccucgugguuagccugggagcaaucuccuuuuggaugugcucuaacgguucguuacagugccggauuuguaucuga

SEQ ID NO: 131347 - RNA, 1701 nt, Artificial Sequence; identical to SEQ ID NO: 130717
  derived and/or modified CDS sequence (opt3) from hemagglutinin__InfluenzaA__ACV53909

SEQ ID NO: 131348 - RNA, 1701 nt, Artificial Sequence; identical to SEQ ID NO: 130717
  derived and/or modified CDS sequence (opt3) from hemagglutinin__InfluenzaA__ACV67220

SEQ ID NO: 131349 - RNA, 1701 nt, Artificial Sequence
  derived and/or modified CDS sequence (opt3) from hemagglutinin__InfluenzaA__ACV67221
augaaggccauccuggugguccuccuuuacaccuucgcuacagcaaacgccgacacucugugcauuggcuaucacgcgaauaacagcacggauaccguugacacaguguuggagaaaaauguaacugugacccauuccgucaacuuacuggaagauaagcacaaugggaaacuauguaagcucagaggaguggcuccccugcaucuugguaaaugcaacauagccggcuggauccuggggaauccugaguguggaucuuugucaacagcaaguagcugguccuacauuguugaaaccucuucgucagacaacggcacuugcuauccaggugauuuuaucgacuacgaggaacucagggagcagcugagcaguguguccucuuucgagcgguuugaaauuuucccgaagacaagcuccuggcccaaucacgauucaaacaagggggucaccgccgcuuguccucaugcaggagccaaaaguuuuuauaagaaucugaucuggcucgugaaaaagggcaacagcuacccaaaauuaucuaaguccuauauaaaugacaagggcaaagagguacugguucuuugggggauccaccaccccucaacgagcgcugaucaacagaguuuguaccagucugccgacgcguacguguucgucggaacuucccgcuauagcaagaaauuuaagccugaaauugcaauccgaccaaaagugcgugaucaggaggguagaaugaacuacuauuggacccugguggagcccggcgacaagauuacauucgaagccacugggaaucuagucguuccuagguacgcuuuugccauggagcggaacgcaggaucgggcaucauaauuucugauaccccagugcaugacugcaacacaaccugucaaacgccgaaaggugcuaucaauacuucccuccccuuccagaacauucacccuaucacaaucgggaagugcccaaaguauguaaaaucaaccaagcugcgccuugccacuggacugagaaaugugcccaguauucagagcaggggcuuguuuggcgcgauagccggguucaucgaaggagguuggacaggcauggucgacgggugguacggauaucaucaccagaacgagcaaggcuccgguuacgcagcugaucucaaaucuacccagaaugccauugacgaaaucacgaacaaggugaauagcguuauagagaaaaugaacacccaguuuacagcuguggggaaggaguucaaucaccuggaaaagcggauugagaacuuaaauaaaaaggucgaugacggcuuccuggauaucuggacuuacaacgccgaacuccuugugcuguuggagaaugaacgcacccuagacuaucaugauucaaacguaaagaaucuguacgagaagguucgaagucagcucaaaaacaacgcaaaggagaucggaaauggcuguuuugaguucuaucacaagugcgacaacacauguauggaauccgugaaaaaugggacuuacgauuauccuaaguacagcgaagaggccaaacugaacagagaagagauugacggagucaaacuugagucuaccaggaucuaucaaauucuggcuauauacucaacaguggcgaguagcuugguccucgugguuucccugggugcaaucucuuuuuggaugugcucgaauggcagcuuacagugccggauuuguaucuga

SEQ ID NO: 131350 - RNA, 1701 nt, Artificial Sequence; identical to SEQ ID NO: 130704
  derived and/or modified CDS sequence (opt3) from hemagglutinin__InfluenzaA__ACV67222

SEQ ID NO: 131351 - RNA, 1701 nt, Artificial Sequence; identical to SEQ ID NO: 130743
  derived and/or modified CDS sequence (opt3) from hemagglutinin__InfluenzaA__ACV67223

SEQ ID NO: 131352 - RNA, 1701 nt, Artificial Sequence; identical to SEQ ID NO: 130959
  derived and/or modified CDS sequence (opt3) from hemagglutinin__InfluenzaA__ACV67224

SEQ ID NO: 131353 - RNA, 1701 nt, Artificial Sequence; identical to SEQ ID NO: 130897
  derived and/or modified CDS sequence (opt3) from hemagglutinin__InfluenzaA__ACV67225

SEQ ID NO: 131354 - RNA, 1701 nt, Artificial Sequence; identical to SEQ ID NO: 130717
  derived and/or modified CDS sequence (opt3) from hemagglutinin__InfluenzaA__ACV67226

SEQ ID NO: 131355 - RNA, 1701 nt, Artificial Sequence
  derived and/or modified CDS sequence (opt3) from hemagglutinin__InfluenzaA__ACV67227
augaaggccauccuggugguccuccuuuacaccuucgcuacagcaaacgccgacacucugugcauuggcuaucacgcgaauaacagcacggauaccguugacacaguguuggagaagaauguaacugugacccauuccgucaacuuacuggaagauaagcacaaugggaaacuauguaagcucagaggaguggcuccccugcaucuugguaaaugcaacauagccggcuggauccuggggaauccugagugugaaucuuugucaacagcaaguagcugguccuacauuguugagaccucuucgucagacaacggaacuugcuauccaggcgauuuuaucgacuacgaggagcucagggagcagcugagcaguguguccucuuucgaacgguuugagauuuucccgaagacaagcuccuggcccaaucacgauucaaacaagggugucaccgccgcuuguccucaugcaggggccaaaaguuuuuauaagaaucugaucuggcucgugaaaaagggaaacagcuacccaaaauuaucuaaguccuauauaaaugacaagggcaaagaaguacugguucuuuggggcauccaccaccccucaacgagcgcugaucaacagaguuuguaccagaacgccgacgcguacguguucgucgggacuucucgcuauuccaagaaauuuaagccugagauugcaauccgaccaaaagugcgugaucaggagggaagaaugaauuacuauuggacccugguggaacccggugacaagauuacauucgaggccacuggcaaccuagucguuccuagguacgcuuuugccauggaacggaacgcagggagcggaaucauaauuucgaauaccccagugcaugauugcaacacaaccugucaaacgccgaaaggcgcuaucaauacuucucuccccuuccagaacauucacccuaucacaaucgguaagugcccaaaguauguaaaauccaccaagcugcgccuugccacugggcugagaaaugugcccucaauucagaguaggggauuguuuggcgcgauagccggcuucaucgaagggggauggacagguauggucgacggcugguacggguaucaucaccagaacgaacaaggaagcggcuacgcagcugaccucaaauccacccagaaugccauugaugagaucacgaacaagguaaauucuguuauagagaaaaugaacacccaguuuacagcuguggguaaggaguucaaucaccuggaaaagcggauugaaaacuuaaauaaaaaggucgacgauggguuccuggacaucuggacuuacaacgccgagcuccuugugcuguuggaaaaugagcgcacccuagauuaucaugacagcaacgugaaaaaccuguacgagaagguucgaucacagcucaaaaauaacgcaaaggaaaucggcaauggauguuuugaguucuaucacaagugcgauaacacauguauggaaagugugaaaaauggcacuuacgacuauccuaaguacuccgaggaagccaaacugaacagagaggagauugauggggucaaacuugaaagcaccaggaucuaucaaauucuggcuauauacucuacaguggcgucaaguuugguccucgugguuagccugggagcaaucuccuuuuggaugugcucuaaugguucguuacagugccggauuuguaucuga

SEQ ID NO: 131356 - RNA, 1701 nt, Artificial Sequence; identical to SEQ ID NO: 130959
  derived and/or modified CDS sequence (opt3) from hemagglutinin__InfluenzaA__ACV67228

SEQ ID NO: 131357 - RNA, 1701 nt, Artificial Sequence
  derived and/or modified CDS sequence (opt3) from hemagglutinin__InfluenzaA__ACV67229
augaaggccauccuggugguccuccuuuacaccuucgcuacagcaaacgccgacacucugugcauuggcuaucacgcgaauaacagcacggauaccguugacacaguguuggagaaaaauguaacugugacccauuccgucaacuuacuggaagauaagcacaaugggaaacuauguaagcucagaggaguggcuccccugcaucuugguaaaugcaacauagccggcuggauccuggggaauccugagugugaaucuuugucaacagcaaguagcugguccuacauuguugagaccucuucgucagacaacggaacuugcuauccaggcgauuuuaucgacuacgaggagcucagggagcagcugagcaguguguccucuuucgaacgguuugagauuuucccgaagacaagcuccuggcccaaucacgauucaaacaagggugucaccgccgcuuguccucaugcaggggccaaaaguuuuuauaagaaucugaucuggcucgugaaaaagggaaacagcuacccaaaauuaucuaaguccuauauaaaugacaagggcaaagaaguacugguucuuuggggcauccaccaccccucaacgagcgcugaucaacagaguuuguaccagaacgccgacgcguacguguucgucgggacuucucgcuauuccaagaaauuuaagccugagauugcaauccgaccaaaagugcgugaucaggagggaagaaugaauuacuauuggacccugguggaacccggugacaagauuacauucgaggccacuggcaaccuagucguuccuagguacgcuuuugccauggaacggaacgcagggagcggaaucauaauuucggauaccccagugcaugacugcaauacaaccugucaaacgccgaaaggcgcuaucaacacuucucuccccuuccagaauauucacccuaucacaaucgguaagugcccaaaguauguaaaauccaccaagcugcgccuugccacugggcugagaaacgugcccucaauucagaguaggggauuguuuggcgcgauagccggcuucaucgaagggggauggacagguauggucgacggcugguacggguaucaucaccagaaugaacaaggaagcggcuacgcagcugaucucaaauccacccagaacccuauugacgagaucacgaauaaggugaacucuguuauagagaaaaugaauacccaguuuacagccguggguaaggaguucaaccaccuggaaaagcggauugaaaauuuaaacaaaaaggucgaugacggguuccuggauaucuggacuuacaaugcugagcuccuugugcuguuggaaaacgagcgcacccuagacuaucaugauagcaauguaaagaaccuguacgagaagguucgaucacagcucaaaaacaaugccaaggaaaucggcaacggauguuuugaguucuaucacaagugcgacaauacauguauggaaagugugaaaaacggcacuuacgauuauccaaaguacuccgaggaagcaaaacugaauagagaggagauugacggggucaaacuugaaagcaccaggaucuaucaaauucuggccauauacucuacaguggcuucaaguuugguccucgugguuagccugggagcgaucuccuuuuggaugugcucuaacgguucguuacagugccggauuuguaucuga

SEQ ID NO: 131358 - RNA, 1701 nt, Artificial Sequence; identical to SEQ ID NO: 130704
  derived and/or modified CDS sequence (opt3) from hemagglutinin__InfluenzaA__ACV67230

SEQ ID NO: 131359 - RNA, 1701 nt, Artificial Sequence; identical to SEQ ID NO: 130717
  derived and/or modified CDS sequence (opt3) from hemagglutinin__InfluenzaA__ACV67231

SEQ ID NO: 131360 - RNA, 1701 nt, Artificial Sequence; identical to SEQ ID NO: 130717
  derived and/or modified CDS sequence (opt3) from hemagglutinin__InfluenzaA__ACV67232

SEQ ID NO: 131361 - RNA, 1701 nt, Artificial Sequence; identical to SEQ ID NO: 130704
  derived and/or modified CDS sequence (opt3) from hemagglutinin__InfluenzaA__ACV67233

SEQ ID NO: 131362 - RNA, 1701 nt, Artificial Sequence; identical to SEQ ID NO: 130959
  derived and/or modified CDS sequence (opt3) from hemagglutinin__InfluenzaA__ACV67234

SEQ ID NO: 131363 - RNA, 1701 nt, Artificial Sequence
  derived and/or modified CDS sequence (opt3) from hemagglutinin__InfluenzaA__ACV67235
augaaggccauccuggugguccuccuuuacaccuucgcuacagcaaacgccgacacucugugcauuggcuaucacgcgaauaacagcacggauaccguugacacaguguuggagaaaaauguaacugugacccauuccgucaacuuacuggaagauaagcacaaugggaaacuauguaagcucagaggaguggcuccccugcaucuugguaaaugcaacauagccggcuggauccuggggaauccugagugugaaucuuugucaacagcaaguagcugguccuacauuguugagaccucuucgucagacaacggaacuugcuauccaggcgauuuuaucgacuacgaggagcucagggagcagcugagcaguguguccucuuucgaacgguuugagauuuucccgaagacaagcuccuggcccaaucacgauucaaacaagggugucaccgccgcuuguccucaugcaggggccaaaaguuuuuauaagaaucugaucuggcucgugaaaaagggaaacagcuacccaaaauuaucuaaguccuauauaaaugacaagggcaaagaaguacugguucuuuggggcauccaccaccccucaacgagcgcugaucaacagaguuuguaccagaacgccgacgcguacguguucgucgggucuucccgcuauagcaagaaauuuaagccugagauugcaauccgaccaaaagugcgugaucaggagggaagaaugaauuacuauuggacucugguggaacccggugacaagauuaccuucgaggccacaggcaaccuagucguuccuagguacgcuuuugccauggaacggaacgcagggucgggaaucauaauuucugauacuccagugcaugacugcaauaccacaugucaaaccccgaaaggcgcuaucaacacgucccuccccuuccagaauauucacccuaucacuaucgguaagugcccaaaguauguaaaaucaacaaagcugcgccuugccaccgggcugagaaacgugcccaguauucagagcaggggauuguuuggcgcgauagccggcuucaucgaagggggauggacugguauggucgacggcugguacggguaucaucaccagaaugaacaaggauccggcuacgcagcugaucucaaaucuacacagaacgccauugacgagaucaccaauaaggugaacagcguuauagagaaaaugaauacgcaguuuaccgcuguggguaaggaguucaaccaccuggaaaagcggauugaaaauuuaaacaaaaaggucgaugacggguuccuggauaucuggacauacaaugccgagcuccuugugcuguuggaaaacgagcgcacucuagacuaucaugauucaaauguuaaaaaccuguacgagaagguacgaagucagcucaaaaacaaugcaaacgaaaucggcaauggauguuuugaguucuaucacaagugcgacaacaccuguauggaauccgugaagaauggcacauacgauuauccuaaauacagcgaggaagccaagcugaacagagaggagauugacggggucaaacuugaaucuacuaggaucuaucaaauucuggcuauauacucaaccguggcgaguagcuugguccucgugguuucccugggagcaaucucuuuuuggaugugcucgaaugguagcuuacagugccggauuuguaucuga

SEQ ID NO: 131364 - RNA, 1701 nt, Artificial Sequence; identical to SEQ ID NO: 130961
  derived and/or modified CDS sequence (opt3) from hemagglutinin__InfluenzaA__ACV67236

SEQ ID NO: 131365 - RNA, 1701 nt, Artificial Sequence; identical to SEQ ID NO: 130704
  derived and/or modified CDS sequence (opt3) from hemagglutinin__InfluenzaA__ACV67238

SEQ ID NO: 131366 - RNA, 1701 nt, Artificial Sequence
  derived and/or modified CDS sequence (opt3) from hemagglutinin__InfluenzaA__ACV67239
augaaggccauccuggugguccuccuuuacaccuucacaacugcuaacgcagacacgcugugcauuggcuaucacgccaauaacagcaccgauacaguugacacuguguuggagaaaaauguaaccgugacacauuccgucaacuuacuggaagauaagcacaaugggaaacuauguaagcucagaggaguggcgccccugcaucuugguaaaugcaacauagcuggcuggauccuggggaauccugagugugaaucuuugucaaccgccaguagcugguccuacauuguugagacuucuucgucagacaacggaacaugcuauccaggcgauuuuaucgacuacgaggagcucagggagcagcugagcaguguguccucuuucgaacgguuugagauuuucccgaagaccagcuccuggcccaaucacgauucaaacaagggugucacggcagccuguccucaugcuggggcaaaaaguuuuuauaagaaucugaucuggcucgugaaaaagggaaacagcuacccaaaauuaucuaaguccuauauaaaugacaagggcaaagaaguacugguucuuuggggcauccaccaccccucaacuagcgccgaucaacagaguuuguaccagaacgcugacgccuacguguucgucgggucuucccgcuauagcaagaaauuuaagccugagauugcgauccgaccaaaagugcgugaucaggagggaagaaugaauuacuauuggacccugguggaacccggugacaagauuacauucgaggcaacuggcaaccuagucguuccuagguacgccuuugcuauggaacggaacgccgggucgggaaucauaauuucugauaccccagugcaugacugcaauacaaccugucaaacgccgaaaggcgcaaucaacacuucccuccccuuccagaauauucacccuaucacaaucgguaagugcccaaaguauguaaaaucaaccaagcugcgccuugcuacugggcugagaaacgugcccaguauucagagcaggggauuguuuggcgccauagcgggcuucaucgaagggggauggacagguauggucgacggcugguacggguaucaucaccagaaugaacaaggauccggcuacgccgcagaucucaaaucuacccagaacgcuauugacgagaucacgaauaaggugaacagcguuauagagaaaaugaauacccaguuuacagccguggguaaggaguucaaccaccuggaaaagcggauugaaaauuuaaacaaaaaggucgaugacggguuccuggauaucuggacuuacaaugcugagcuccuugugcuguuggaaaacgagcgcacccuagacuaucaugauucaaauguaaagaaccuguacgagaagguucgaagucagcucaaaaacaaugccaaggaaaucggcaacggauguuuugaguucuaucacaagugcaauaacacauguauggaauccgugaaaaauggcacuuacgacuauccuaaguacagcgaggaagcaaaacugaacagagaggagauugauggggucaaacuugaaucuaccaggaucuaucaaauucuggccauauacucaacaguggcuaguagcuugguccucgugguuucccugggagcgaucucuuuuuggaugugcucgaaugguagcuuacagugccggauuuguaucuga

SEQ ID NO: 131367 - RNA, 1701 nt, Artificial Sequence; identical to SEQ ID NO: 130961
  derived and/or modified CDS sequence (opt3) from hemagglutinin__InfluenzaA__ACV67240

SEQ ID NO: 131368 - RNA, 1701 nt, Artificial Sequence
  derived and/or modified CDS sequence (opt3) from hemagglutinin__InfluenzaA__ACV67241
augaaggccauccuggugguccuccuuuacaccuucgcuacagcaaacgccgacacucugugcauuggcuaucacgcgaauaacagcacggauaccguugacacaguguuggagaaaaauguaacugugacccauuccgucaacuuacuggaagauaagcacaaugggaaacuauguaagcucagaggaguggcuccccugcaucuugguaaaugcaacauagccggcuggauccuggggaauccugagugugaaucuuugucaacagcaaguagcugguccuacauuguugagaccucuucgucagacaacggaacuugcuauccaggcgauuuuaucgacuacgaggagcucagggagcagcugagcaguguguccucuuucgaacgguuugagauuuucccgaagacaagcuccuggcccaaucacgauucaaacaagggugucaccgccgcuuguccucaugcaggggccaaaaguuuuuauaagaaucugaucuggcucgugaaaaacggaaauagcuacccaaaguuaucuaaauccuauauaaacgacaagggcaaggaaguacugguucuuuggggcauccaccaccccucaacgagcgcugaucaacagaguuuguaccagaaugccgacgcguacguguucgucgggacuucucgcuauuccaaaaaguuuaaaccugagauugcaauccgaccaaaggugcgugaucaggagggaagaaugaacuacuauuggacccugguggaacccggugacaaaauuacauucgaggccacuggcaaccuagucguuccuagguacgcuuuugccauggaacggaaugcagggagcggaaucauaauuucggauaccccagugcaugacugcaacacaaccugucaaacgccgaagggcgcuaucaauacuucucuccccuuccagaacauucacccuaucacaaucgguaaaugcccaaaguauguaaaguccaccaaacugcgccuugccacugggcugagaaaugugcccucaauucagaguaggggauuguuuggcgcgauagccggcuucaucgaagggggauggacagguauggucgacggcugguacggguaucaucaccagaacgaacaaggaagcggcuacgcagcugaucucaaguccacccagaaugccauugacgagaucacgaacaaaguuaauucugugauagagaagaugaacacccaguuuacagcuguggguaaagaguucaaucaccuggaaaagcggauugaaaacuuaaauaagaaagucgaugacggguuccuggauaucuggacuuacaacgccgagcuccuugugcuguuggaaaaugagcgcacccuagacuaucaugauagcaacguaaagaaccuguacgagaaaguucgaucacagcucaagaauaacgcaaaagaaaucggcaauggauguuuugaguucuaucacaagugcgacaacacauguauggaaagugugaagaauggcacuuacgauuauccuaaauacuccgaggaagccaagcugaacagagaggagauugacggggucaaacuugaaagcaccaggaucuaucaaauucuggcuauauacucuacaguggcgucaaguuugguccucgugguuagccugggagcaaucuccuuuuggaugugcucuaaugguucguuacagugccggauuuguaucuga

SEQ ID NO: 131369 - RNA, 1701 nt, Artificial Sequence; identical to SEQ ID NO: 130959
  derived and/or modified CDS sequence (opt3) from hemagglutinin__InfluenzaA__ACV67242

SEQ ID NO: 131370 - RNA, 1701 nt, Artificial Sequence; identical to SEQ ID NO: 130897
  derived and/or modified CDS sequence (opt3) from hemagglutinin__InfluenzaA__ACV67244

SEQ ID NO: 131371 - RNA, 1701 nt, Artificial Sequence; identical to SEQ ID NO: 130810
  derived and/or modified CDS sequence (opt3) from hemagglutinin__InfluenzaA__ACV67246

SEQ ID NO: 131372 - RNA, 1701 nt, Artificial Sequence; identical to SEQ ID NO: 131341
  derived and/or modified CDS sequence (opt3) from hemagglutinin__InfluenzaA__ACV67247

SEQ ID NO: 131373 - RNA, 1701 nt, Artificial Sequence; identical to SEQ ID NO: 130704
  derived and/or modified CDS sequence (opt3) from hemagglutinin__InfluenzaA__ACV70073

SEQ ID NO: 131374 - RNA, 1701 nt, Artificial Sequence; identical to SEQ ID NO: 130704
  derived and/or modified CDS sequence (opt3) from hemagglutinin__InfluenzaA__ACV70093

SEQ ID NO: 131375 - RNA, 1701 nt, Artificial Sequence; identical to SEQ ID NO: 130704
  derived and/or modified CDS sequence (opt3) from hemagglutinin__InfluenzaA__ACV70103

SEQ ID NO: 131376 - RNA, 1701 nt, Artificial Sequence; identical to SEQ ID NO: 130704
  derived and/or modified CDS sequence (opt3) from hemagglutinin__InfluenzaA__ACV70113

SEQ ID NO: 131377 - RNA, 1701 nt, Artificial Sequence; identical to SEQ ID NO: 130704
  derived and/or modified CDS sequence (opt3) from hemagglutinin__InfluenzaA__ACV70123

SEQ ID NO: 131378 - RNA, 1701 nt, Artificial Sequence; identical to SEQ ID NO: 130704
  derived and/or modified CDS sequence (opt3) from hemagglutinin__InfluenzaA__ACV70154

SEQ ID NO: 131379 - RNA, 1701 nt, Artificial Sequence
  derived and/or modified CDS sequence (opt3) from hemagglutinin__InfluenzaA__ACV70164
augaaggccauccuggugguccuccuuuacaccuucacaacugcuaacgcagacacgcugugcauuggcuaucacgccaauaacagcaccgauacaguugacacuguguuggagaaaaauguaaccgugacacauuccgucaacuuacuggaagauaagcacaaugggaaacuauguaagcucagaggaguggcgccccugcaucuugguaaaugcaacauagcuggcuggauccuggggaauccugagugugaaucuuugucaaccgccaguagcugguccuacauuguugagacuucuucgucagacaacggaacaugcuauccaggcgauuuuaucgacuacgaggagcucagggagcagcugagcaguguguccucuuucgaacgguuugagauuuucccgaagaccagcuccuggcccaaucacgauucaaacaagggugucacggcagccuguccucaugcuggggcaaaaaguuuuuauaagaaucugaucuggcucgugaaaaagggaaacagcuacccaaaauuaucuaaguccuauauaaaugacaagggcaaagaaguacugguucuuuggggcauccaccaccccucaacuagcgccgaucaacagaguuuguaccagaacgcugacgccuacguguucgucgggucuucccgcuauagcaagaaauuuaagccugagauugcgauccgaccaaaagugcgugaucaggagggaagaaugaauuacuauuggacccugguggaacccggugacaagauuacauucgaggcaacuggcaaccuagucguuccuagguacgccuuugcuauggaacggaacgccgggucgggaaucauaauuucugauaccccagugcaugacugcaauacaaccugucaaacgcucaaaggcgcaaucaacacuucccugccguuccagaauauucaccccaucacaaucgguaagugcccuaaguauguaaaaucaaccaaacuucgccuggcuacuggguugagaaacgugccaaguauucagagcaggggacucuuuggcgccauagcgggcuucaucgaagggggauggacagguauggucgacggcugguacggguaucaucaccagaaugaacaaggauccggcuacgccgcagaucugaaaucuacccagaacgcuauugacgagaucacgaauaaggugaacagcguuauagagaaaaugaauacccaguuuacagccguggguaaggaguucaaccacuuagaaaagcggauugaaaaucugaacaaaaaggucgaugacggguuccucgauaucuggacuuacaaugcugagcuucugguguugcuagaaaacgagcgcacccuggacuaucaugauucaaauguaaagaaccucuacgagaagguucgaagucagcugaaaaacaaugccaaggaaaucggcaacggauguuuugaguucuaucacaagugcgacaauacauguauggaauccgugaaaaacggcacuuacgauuaucccaaguacagcgaggaagcaaaacuuaauagagaggagauugacggggucaagcuggaaucuaccaggaucuaucaaauuuuggccauauacucaacaguggcuaguagccucguccuggugguuuccuuaggagcgaucucuuuuuggaugugcucgaacgguagccugcagugccggauuuguaucuga

SEQ ID NO: 131380 - RNA, 1701 nt, Artificial Sequence; identical to SEQ ID NO: 130704
  derived and/or modified CDS sequence (opt3) from hemagglutinin__InfluenzaA__ACV70174

SEQ ID NO: 131381 - RNA, 1701 nt, Artificial Sequence; identical to SEQ ID NO: 130704
  derived and/or modified CDS sequence (opt3) from hemagglutinin__InfluenzaA__ACV70184

SEQ ID NO: 131382 - RNA, 1701 nt, Artificial Sequence; identical to SEQ ID NO: 130704
  derived and/or modified CDS sequence (opt3) from hemagglutinin__InfluenzaA__ACV70194

SEQ ID NO: 131383 - RNA, 1701 nt, Artificial Sequence; identical to SEQ ID NO: 130704
  derived and/or modified CDS sequence (opt3) from hemagglutinin__InfluenzaA__ACV70204

SEQ ID NO: 131384 - RNA, 1701 nt, Artificial Sequence; identical to SEQ ID NO: 130704
  derived and/or modified CDS sequence (opt3) from hemagglutinin__InfluenzaA__ACV70214

SEQ ID NO: 131385 - RNA, 1701 nt, Artificial Sequence; identical to SEQ ID NO: 130704
  derived and/or modified CDS sequence (opt3) from hemagglutinin__InfluenzaA__ACV70224

SEQ ID NO: 131386 - RNA, 1701 nt, Artificial Sequence; identical to SEQ ID NO: 130704
  derived and/or modified CDS sequence (opt3) from hemagglutinin__InfluenzaA__ACV70234

SEQ ID NO: 131387 - RNA, 1701 nt, Artificial Sequence; identical to SEQ ID NO: 130704
  derived and/or modified CDS sequence (opt3) from hemagglutinin__InfluenzaA__ACV70254

SEQ ID NO: 131388 - RNA, 1701 nt, Artificial Sequence; identical to SEQ ID NO: 130704
  derived and/or modified CDS sequence (opt3) from hemagglutinin__InfluenzaA__ACV70264

SEQ ID NO: 131389 - RNA, 1701 nt, Artificial Sequence; identical to SEQ ID NO: 130704
  derived and/or modified CDS sequence (opt3) from hemagglutinin__InfluenzaA__ACV70274

SEQ ID NO: 131390 - RNA, 1701 nt, Artificial Sequence; identical to SEQ ID NO: 130704
  derived and/or modified CDS sequence (opt3) from hemagglutinin__InfluenzaA__ACV70284

SEQ ID NO: 131391 - RNA, 1701 nt, Artificial Sequence; identical to SEQ ID NO: 130704
  derived and/or modified CDS sequence (opt3) from hemagglutinin__InfluenzaA__ACV70294

SEQ ID NO: 131392 - RNA, 1701 nt, Artificial Sequence; identical to SEQ ID NO: 130704
  derived and/or modified CDS sequence (opt3) from hemagglutinin__InfluenzaA__ACV70304

SEQ ID NO: 131393 - RNA, 1701 nt, Artificial Sequence; identical to SEQ ID NO: 131379
  derived and/or modified CDS sequence (opt3) from hemagglutinin__InfluenzaA__ACV70314

SEQ ID NO: 131394 - RNA, 1701 nt, Artificial Sequence
  derived and/or modified CDS sequence (opt3) from hemagglutinin__InfluenzaA__ACV70324
augaaggccauccuggugguccuccuuuacaccuucgcuacagcaaacgccgacacucugugcauuggcuaucacgcgaauaacagcacggauaccguugacacaguguuggagaaaaauguaacugugacccauuccgucaacuuacuggaagauaagcacaaugggaaacuauguaagcucagaggaguggcuccccugcaucuugguaaaugcaacauagccggcuggauccuggggaauccugagugugaaucuuuguuuacagcaucaaguuggagcuacauuguugagaccuccucuucggacaacggaacuugcuauccaggcgauuucaucgacuacgaggagcucagggagcagcugucaagcgugaguuccuuugaacgguucgagauuuuuccgaagacaucuagcuggcccaaucacgauuccaacaagggugucaccgccgcuuguccucaugcaggggccaaaucauucuauaagaaucugaucuggcucgugaaaaagggaaacaguuacccaaaauuaagcaagucuuauauaaaugacaagggcaaagaaguacugguucuuuggggcauccaccaccccuccacgucagcugaucaacagagcuuguaccagaacgccgacgcguacguguuugucgggaguucucgcuauuccaagaaauucaagccugagauugcaauccgaccaaaagugcgugaucaggagggaagaaugaauuacuauuggacucugguggaacccggugacaagauuaccuuugaggccacaggcaaccuagucguuccuagguacgcuuucgccauggaacggaacgcagggagcggaaucauaauuucggauacuccagugcaugacugcaauaccacaugucaaaccccgaaaggcgcuaucaacacgucucuccccuuucagaauauucacccuaucacuaucgguaagugcccaaaguauguaaaauccacaaagcugcgccuugccaccgggcugagaaacgugcccucaauucagaguaggggauuguucggcgcgauagccggcuuuaucgaagggggauggacugguauggucgacggcugguacggguaucaucaccagaaugaacaaggaagcggcuacgcagcugaucucaaauccacacagaacgccauugacgagaucaccaauaaggugaacucuguuauagagaaaaugaauacgcaguucaccgcuguggguaaggaguucaaccaccuggaaaagcggauugaaaauuuaaacaaaaaggucgaugacggguuucuggauaucuggacauacaaugccgagcuccuugugcuguuggaaaacgagcgcacucuagacuaucaugauagcaauguaaagaaccuguacgagaagguucgaucacagcucaaaaacaaugcaaaggaaaucggcaacggauguuucgaguuuuaucacaagugcgacaauaccuguauggaaagugugaaaaacggcacauacgauuauccuaaguacuccgaggaagccaaacugaauagagaggagauugacggggucaaacuugaaagcacuaggaucuaucaaauucuggcuauauacucuaccguggcgucaaguuugguccucgugguuagccugggagcaaucuccuucuggaugugcucuaacgguucguuacagugccggauuuguaucuga

SEQ ID NO: 131395 - RNA, 1701 nt, Artificial Sequence; identical to SEQ ID NO: 130704
  derived and/or modified CDS sequence (opt3) from hemagglutinin__InfluenzaA__ACV70334

SEQ ID NO: 131396 - RNA, 1701 nt, Artificial Sequence; identical to SEQ ID NO: 130704
  derived and/or modified CDS sequence (opt3) from hemagglutinin__InfluenzaA__ACV70344

SEQ ID NO: 131397 - RNA, 1701 nt, Artificial Sequence; identical to SEQ ID NO: 130704
  derived and/or modified CDS sequence (opt3) from hemagglutinin__InfluenzaA__ACV70354

SEQ ID NO: 131398 - RNA, 1701 nt, Artificial Sequence; identical to SEQ ID NO: 130704
  derived and/or modified CDS sequence (opt3) from hemagglutinin__InfluenzaA__ACV70364

SEQ ID NO: 131399 - RNA, 1701 nt, Artificial Sequence; identical to SEQ ID NO: 130704
  derived and/or modified CDS sequence (opt3) from hemagglutinin__InfluenzaA__ACV70374

SEQ ID NO: 131400 - RNA, 1701 nt, Artificial Sequence; identical to SEQ ID NO: 130704
  derived and/or modified CDS sequence (opt3) from hemagglutinin__InfluenzaA__ACV70384

SEQ ID NO: 131401 - RNA, 1701 nt, Artificial Sequence; identical to SEQ ID NO: 130704
  derived and/or modified CDS sequence (opt3) from hemagglutinin__InfluenzaA__ACV70394

SEQ ID NO: 131402 - RNA, 1701 nt, Artificial Sequence; identical to SEQ ID NO: 130704
  derived and/or modified CDS sequence (opt3) from hemagglutinin__InfluenzaA__ACV70404

SEQ ID NO: 131403 - RNA, 1701 nt, Artificial Sequence; identical to SEQ ID NO: 131379
  derived and/or modified CDS sequence (opt3) from hemagglutinin__InfluenzaA__ACV70414

SEQ ID NO: 131404 - RNA, 1701 nt, Artificial Sequence; identical to SEQ ID NO: 130704
  derived and/or modified CDS sequence (opt3) from hemagglutinin__InfluenzaA__ACV70424

SEQ ID NO: 131405 - RNA, 1701 nt, Artificial Sequence; identical to SEQ ID NO: 130704
  derived and/or modified CDS sequence (opt3) from hemagglutinin__InfluenzaA__ACV70434

SEQ ID NO: 131406 - RNA, 1701 nt, Artificial Sequence; identical to SEQ ID NO: 130704
  derived and/or modified CDS sequence (opt3) from hemagglutinin__InfluenzaA__ACV70444

SEQ ID NO: 131407 - RNA, 1701 nt, Artificial Sequence; identical to SEQ ID NO: 130704
  derived and/or modified CDS sequence (opt3) from hemagglutinin__InfluenzaA__ACV70454

SEQ ID NO: 131408 - RNA, 1701 nt, Artificial Sequence; identical to SEQ ID NO: 130704
  derived and/or modified CDS sequence (opt3) from hemagglutinin__InfluenzaA__ACV70464

SEQ ID NO: 131409 - RNA, 1701 nt, Artificial Sequence; identical to SEQ ID NO: 130704
  derived and/or modified CDS sequence (opt3) from hemagglutinin__InfluenzaA__ACV70474

SEQ ID NO: 131410 - RNA, 1701 nt, Artificial Sequence; identical to SEQ ID NO: 130704
  derived and/or modified CDS sequence (opt3) from hemagglutinin__InfluenzaA__ACV70484

SEQ ID NO: 131411 - RNA, 1701 nt, Artificial Sequence; identical to SEQ ID NO: 130704
  derived and/or modified CDS sequence (opt3) from hemagglutinin__InfluenzaA__ACV70494

SEQ ID NO: 131412 - RNA, 1701 nt, Artificial Sequence; identical to SEQ ID NO: 130704
  derived and/or modified CDS sequence (opt3) from hemagglutinin__InfluenzaA__ACV70504

SEQ ID NO: 131413 - RNA, 1701 nt, Artificial Sequence; identical to SEQ ID NO: 130704
  derived and/or modified CDS sequence (opt3) from hemagglutinin__InfluenzaA__ACV70514

SEQ ID NO: 131414 - RNA, 1701 nt, Artificial Sequence; identical to SEQ ID NO: 130704
  derived and/or modified CDS sequence (opt3) from hemagglutinin__InfluenzaA__ACV70524

SEQ ID NO: 131415 - RNA, 1701 nt, Artificial Sequence; identical to SEQ ID NO: 130897
  derived and/or modified CDS sequence (opt3) from hemagglutinin__InfluenzaA__ACV70534

SEQ ID NO: 131416 - RNA, 1701 nt, Artificial Sequence; identical to SEQ ID NO: 130704
  derived and/or modified CDS sequence (opt3) from hemagglutinin__InfluenzaA__ACV70544

SEQ ID NO: 131417 - RNA, 1701 nt, Artificial Sequence; identical to SEQ ID NO: 130704
  derived and/or modified CDS sequence (opt3) from hemagglutinin__InfluenzaA__ACV70564

SEQ ID NO: 131418 - RNA, 1701 nt, Artificial Sequence; identical to SEQ ID NO: 130704
  derived and/or modified CDS sequence (opt3) from hemagglutinin__InfluenzaA__ACV70584

SEQ ID NO: 131419 - RNA, 1701 nt, Artificial Sequence; identical to SEQ ID NO: 131379
  derived and/or modified CDS sequence (opt3) from hemagglutinin__InfluenzaA__ACV70594

SEQ ID NO: 131420 - RNA, 1701 nt, Artificial Sequence; identical to SEQ ID NO: 130704
  derived and/or modified CDS sequence (opt3) from hemagglutinin__InfluenzaA__ACV70604

SEQ ID NO: 131421 - RNA, 1701 nt, Artificial Sequence; identical to SEQ ID NO: 130704
  derived and/or modified CDS sequence (opt3) from hemagglutinin__InfluenzaA__ACV70614

SEQ ID NO: 131422 - RNA, 1701 nt, Artificial Sequence; identical to SEQ ID NO: 130704
  derived and/or modified CDS sequence (opt3) from hemagglutinin__InfluenzaA__ACV70624

SEQ ID NO: 131423 - RNA, 1701 nt, Artificial Sequence; identical to SEQ ID NO: 130704
  derived and/or modified CDS sequence (opt3) from hemagglutinin__InfluenzaA__ACV70634

SEQ ID NO: 131424 - RNA, 1701 nt, Artificial Sequence; identical to SEQ ID NO: 130704
  derived and/or modified CDS sequence (opt3) from hemagglutinin__InfluenzaA__ACV70644

SEQ ID NO: 131425 - RNA, 1701 nt, Artificial Sequence; identical to SEQ ID NO: 130704
  derived and/or modified CDS sequence (opt3) from hemagglutinin__InfluenzaA__ACV70654

SEQ ID NO: 131426 - RNA, 1701 nt, Artificial Sequence; identical to SEQ ID NO: 130704
  derived and/or modified CDS sequence (opt3) from hemagglutinin__InfluenzaA__ACV70664

SEQ ID NO: 131427 - RNA, 1701 nt, Artificial Sequence; identical to SEQ ID NO: 130704
  derived and/or modified CDS sequence (opt3) from hemagglutinin__InfluenzaA__ACV70674

SEQ ID NO: 131428 - RNA, 1701 nt, Artificial Sequence; identical to SEQ ID NO: 130704
  derived and/or modified CDS sequence (opt3) from hemagglutinin__InfluenzaA__ACV70684

SEQ ID NO: 131429 - RNA, 1701 nt, Artificial Sequence; identical to SEQ ID NO: 130704
  derived and/or modified CDS sequence (opt3) from hemagglutinin__InfluenzaA__ACV70694

SEQ ID NO: 131430 - RNA, 1701 nt, Artificial Sequence; identical to SEQ ID NO: 130704
  derived and/or modified CDS sequence (opt3) from hemagglutinin__InfluenzaA__ACV70704

SEQ ID NO: 131431 - RNA, 1701 nt, Artificial Sequence; identical to SEQ ID NO: 130704
  derived and/or modified CDS sequence (opt3) from hemagglutinin__InfluenzaA__ACV70714

SEQ ID NO: 131432 - RNA, 1701 nt, Artificial Sequence; identical to SEQ ID NO: 130704
  derived and/or modified CDS sequence (opt3) from hemagglutinin__InfluenzaA__ACV70724

SEQ ID NO: 131433 - RNA, 1701 nt, Artificial Sequence; identical to SEQ ID NO: 131341
  derived and/or modified CDS sequence (opt3) from hemagglutinin__InfluenzaA__ACV70734

SEQ ID NO: 131434 - RNA, 1701 nt, Artificial Sequence; identical to SEQ ID NO: 130704
  derived and/or modified CDS sequence (opt3) from hemagglutinin__InfluenzaA__ACV70744

SEQ ID NO: 131435 - RNA, 1701 nt, Artificial Sequence; identical to SEQ ID NO: 130704
  derived and/or modified CDS sequence (opt3) from hemagglutinin__InfluenzaA__ACV70754

SEQ ID NO: 131436 - RNA, 1701 nt, Artificial Sequence; identical to SEQ ID NO: 130704
  derived and/or modified CDS sequence (opt3) from hemagglutinin__InfluenzaA__ACV70764

SEQ ID NO: 131437 - RNA, 1701 nt, Artificial Sequence; identical to SEQ ID NO: 130704
  derived and/or modified CDS sequence (opt3) from hemagglutinin__InfluenzaA__ACV70784

SEQ ID NO: 131438 - RNA, 1701 nt, Artificial Sequence
  derived and/or modified CDS sequence (opt3) from hemagglutinin__InfluenzaA__ACV70794
augaaggccauccuggugguccuccuuuacaccuucgcuacagcaaacgccgacacucugugcauuggcuaucacgcgaauaacagcacggauaccguugacacaguguuggagaagaauguaacugugacccauuccgucaacuuacuggaagauaagcacaaugggaaacuauguaagcucagaggaguggcuccccugcaucuugguaaaugcaacauagccggcuggauccuggggaauccugagugugaaucuuugucaacagcaaguagcugguccuacauuguugagaccucuucgucagacaacggaacuugcuauccaggcgauuuuaucgacuacgaagaacucagggagcagcugagcaguguguccucuuucgaacgguuugagauuuucccgaagacaagcuccuggcccaaucacgauucaaacaagggugccaccgcugcauguccucaugccggggcuaaaggauuuuauaagaaucugaucuggcucgucaaaaagggcaacaguuacccaaaauuaagcaagucuuauauaaaugacaagggcaaagaagugcugguacuuugggggauccaccaccccuccacgucagccgaucaacagagcuuguaccagaacgcggacgcauacguuuucgugggaaguucucgcuauuccaagaaauuuaagccugagauugccauccgaccaaaaguccgugaucaggaggguagaaugaauuacuauuggacucugguggaacccggcgacaagauuaccuucgaggcuacagggaaccuaguggucccuagguacgccuuugcaauggaacggaacgcuggaagcggcaucauaauuucggauacuccaguucaugacugcaauaccacaugucaaaccccgaaaggugccaucaacacgucucuccccuuccagaauauucacccuaucacuaucgggaagugcccaaaguaugugaaauccacaaagcugcgccuugcgaccggacugagaaacguacccucaauucagaguaggggcuuguuuggcgccauagcaggguucaucgagggagguuggacuggcaugguggacgggugguacggauaucaucaccagaaugaacaaggcagcgguuacgcugccgaucucaaauccacacagaacgcuauugacgagaucaccaauaaggucaacucugugauagagaaaaugaauacgcaguuuaccgccguugggaaggaguucaaccaccuggagaagcggauugaaaauuuaaacaaaaagguggaugacggcuuccuggauaucuggacauacaaugcagagcuccuuguccuguuggaaaacgagcgcacucuagacuaucaugauagcaaugugaaaaaccuguacgagaagguacgaucacagcucaaaaacaaugccaaggaaaucggaaacggcuguuuugaguucuaucacaagugcgacaauaccuguauggaaaguguuaaaaacgggacauacgauuauccuaaguacuccgaggaagcuaaacugaauagagaggagauugacggagugaaacuugaaagcacuaggaucuaucaaauucuggcgauauacucuaccgucgcaucaaguuuggugcucgucgugagccugggugccaucuccuuuuggaugugcucuaacggcucguuacagugccggauuuguaucuga

SEQ ID NO: 131439 - RNA, 1701 nt, Artificial Sequence; identical to SEQ ID NO: 130704
  derived and/or modified CDS sequence (opt3) from hemagglutinin__InfluenzaA__ACV70804

SEQ ID NO: 131440 - RNA, 1701 nt, Artificial Sequence; identical to SEQ ID NO: 131379
  derived and/or modified CDS sequence (opt3) from hemagglutinin__InfluenzaA__ACV70824

SEQ ID NO: 131441 - RNA, 1701 nt, Artificial Sequence; identical to SEQ ID NO: 130704
  derived and/or modified CDS sequence (opt3) from hemagglutinin__InfluenzaA__ACV70834

SEQ ID NO: 131442 - RNA, 1701 nt, Artificial Sequence
  derived and/or modified CDS sequence (opt3) from hemagglutinin__InfluenzaA__ACV70844
augaaggccauccuggugguccuccuuuacaccuucgcuacagcaaacgccgacacucugugcauuggcuaucacgcgaauaacagcacggauaccguugacacaguguuggagaaaaauguaacugugacccauuccgucaacuuacuggaagauaagcacaaugggaaacuauguaagcucagaggaguggcuccccugcaucuugguaaaugcaacauagccggcuggauccuggggaauccugagugugaaucuuugucaacagcaaguagcugguccuacauuguugagaccucuucgucagacaacggaacuugcuauccaggcgauuuuaucgacuacgaagaacucagggagcagcugagcaguguguccucuuucgaacgguuugagauuuucccgaagacaagcuccuggcccaaucacgauucaaacaagggugucaccgccgcuuguccucaugcaggggccaaaggauuuuauaagaaucugaucuggcucgugaaaaagggcaacaguuacccaaaauuaagcaagucuuauauaaaugacaagggcaaagaaguacugguucuuugggggauccaccaccccuccacgucagcugaucaacagagcuuguaccagaacgccgacgcguacguguucgucggaaguucucgcuauuccaagaaauuuaagccugagauugcaauccgaccaaaagugcgugaucaggaggguagaaugaauuacuauuggacucugguggaacccggcgacaagauuaccuucgaggccacagggaaccuacucgucccuagguacgcuuuugccauggaacggaacgcaggaagcggcaucauaauuucggauacuccaguucaugacugcaauaccacaugucaaaccccgaaaggugcuaucaacacgucucugcccuuccagaauauucacccuaucacuaucgggaagugcccaaaguaugugaaauccacaaaacuucgccuggccaccggauugagaaacguacccucaauucagaguaggggccucuuuggcgcgauagccggguucaucgagggagguuggacuggcaugguggacgggugguacggauaucaucaccagaaugaacaaggcagcgguuacgcagcugaucugaaguccacacagaacgccauugacgagaucaccaauaaggucaacucugugauagagaaaaugaauacgcaguuuaccgcuguugggaaggaguucaaccacuuagagaagcggauugaaaaucugaacaaaaagguggaugacggcuuccucgauaucuggacauacaaugccgagcuucuggucuugcuagaaaacgagcgcacucuggacuaucaugauagcaaugugaaaaaccucuacgagaagguacgaucacagcugaaaaacaaugcaaaggaaaucggaaacggcuguuuugaguucuaucacaagugcgacaauaccuguauggaaaguguuaaaaacgggacauacgauuauccuaaguacuccgaggaagccaaacuuaauagagaggagauugacggagugaagcuggaaagcacuaggaucuaucaaauuuuggcuauauacucuaccgucgcgucaagucucgugcuggucgugagcuuaggugcaaucuccuuuuggaugugcucuaacggcucgcugcagugccggauuuguaucuga

SEQ ID NO: 131443 - RNA, 1701 nt, Artificial Sequence; identical to SEQ ID NO: 130704
  derived and/or modified CDS sequence (opt3) from hemagglutinin__InfluenzaA__ACV70854

SEQ ID NO: 131444 - RNA, 1701 nt, Artificial Sequence
  derived and/or modified CDS sequence (opt3) from hemagglutinin__InfluenzaA__ACV70864
augaaggccauccuggugguccuccuuuacaccuucgcuacagcaaacgccgacacucugugcauuggcuaucacgcgaauaacagcacggauaccguugacacaguguuggagaaaaauguaacugugacccauuccgucaacuuacuggaagauaagcacaaugggaaacuauguaagcucagaggaguggcuccccugcaucuugguaaaugcaacauagccggcuggauccuggggaauccugagugugaaucuuugucaacagcaaguagcugguccuacauuguugagaccucuucgucagacaacggaacuugcuauccaggcgauuuuaucgacuacgaggagcucagggagcagcugagcaguguguccucuuucgaacgguuugagauuuucccgaagacaagcuccuggcccaaucacgauucaaacaagggugucaccgccgcuuguccucaugcaggggccaaaaguuuuuauaagaaucugaucuggcucgugaaaaagggaacgagcuacccaaaauuaucuaaguccuauauaaacgacaagggcaaagaaguacugguucuuuggggcauccaccaccccucaacuagcgcugaucaacagaguuuguaccagaaugccgacgcguacguguucgucgggucuucccgcuauagcaagaaauuuaagccugagauugcaauccgaccaaaagugcgugaucaggagggaagaaugaacuacuauuggacccugguggaacccggugacaagauuacauucgaggccacuggcaaucuagucguuccuagguacgcuuuugccauggaacggaacgcagggucgggaaucauaauuucugauaccccagugcaugacugcaacacaaccugucaaacgccgaaaggcgcuaucaauacuucccuccccuuccagaacauucacccuaucacaaucgguaagugcccaaaguauguaaaaucaaccaagcugcgccuugccacugggcugagaaaugugcccaguauucagagcaggggauuguuuggcgcgauagccggcuucaucgaagggggauggacagguauggucgacggcugguacggguaucaucaccagaacgaacaaggauccggcuacgcagcugaucucaaaucuacccagaaugccauugacgagaucacgaacaaggugaauagcguuauagagaaaaugaacacccaguuuacagcuguggguaaggaguucaaucaccuggaaaagcggauugaaaacuuaaauaaaaaggucgaugacggguuccuggauaucuggacuuacaacgccgagcuccuugugcuguuggaaaaugagcgcacccuagacuaucaugauucaaacguaaagaaucuguacgagaagguucgaagucagcucaaaaacaacgcaaaggaaaucggcaauggauguuuugaguucuaucacaagugcgacaacacauguauggaauccgugaaaaauggcacuuacgauuauccuaaguacagcgaggaagccaaacugaacagagaggagauugacggggucaaacuugaaucuaccaggaucuaucaaauucuggcuauauacucaacaguggcgaguagcuugguccucgugguuucccugggagcaaucucuuuuuggaugugcucgaaugguagcuuacagugccggauuuguaucuga

SEQ ID NO: 131445 - RNA, 1701 nt, Artificial Sequence; identical to SEQ ID NO: 130704
  derived and/or modified CDS sequence (opt3) from hemagglutinin__InfluenzaA__ACV70874

SEQ ID NO: 131446 - RNA, 1701 nt, Artificial Sequence; identical to SEQ ID NO: 130897
  derived and/or modified CDS sequence (opt3) from hemagglutinin__InfluenzaA__ACV70884

SEQ ID NO: 131447 - RNA, 1701 nt, Artificial Sequence
  derived and/or modified CDS sequence (opt3) from hemagglutinin__InfluenzaA__ACV70904
augaaggccauccuggugguccuccuuuacaccuucgcuacagcaaacgccgacacucugugcauuggcuaucacgcgaauaacagcacggauaccguugacacaguguuggagaagaauguaacugugacccauuccgucaacuuacuggaagauaagcacaaugggaaacuauguaagcucagaggaguggcuccccugcaucuugguaaaugcaacauagccggcuggauccuggggaauccugagugugaaucuuugucaacagcaaguagcugguccuacauuguugagaccucuucgucagacaacggaacuugcuauccaggcgauuuuaucgacuacgaggagcucagggagcagcugagcaguguguccucuuucgaacgguuugagauuuucccgaagacaagcuccuggcccaaucacgauucaaacaagggugucaccgccgcuuguccucaugcaggggccaaaaguuuuuauaagaaucugaucuggcucgugaaaaagggaaacagcuacccaaaauuaucuaaguccuauauaaaugacaagggcaaagaaguacugguucuuuggggcauccaccaccccucaacgagcgcugaucaacagaguuuguaccagaacgccgacgcguacguguucgucgggucuucccgcuauagcaagaaauuuaagccugagauugcaauccgaccaaaagugcgugaucaggagggaagaaugaauuacuauuggacucugguggaacccggugacaagauuaccuucgaggccacaggcaaccuagucguuccuagguacgcuuuugccauggaacggaacgcagggucgggaaucauaauuucugauacuccagugcaugacugcaauaccacaugucaaaccccgaaaggcgcuaucaacacgucccuccccuuccagaauauucacccuaucacuaucgguaagugcccaaaguauguaaaaucaacaaagcugcgccuugccaccgggcugagaaacauucccaguauacagagcaggggauuguuuggcgcgaucgccggcuucauugaagggggauggacugguaugguggacggcugguacggguaucaucaccagaaugaacaaggauccggcuacgcagcugaucucaaaucuacacagaacgccaucgacgagauaaccaauaaggucaacagcgugauugagaaaaugaauacgcaguuuaccgcuguugguaaggaguucaaccaccuggaaaagcggaucgaaaauuuaaacaaaaagguggaugacggguuccuggauaucuggacauacaaugccgagcuccuuguccuguuggaaaacgagcgcacucuagacuaucaugauucaaaugugaaaaaccuguacgagaagguacgaagucagcucaaaaacaaugcaaaggaaauuggcaacggauguuuugaguucuaucacaagugcgacaauaccuguauggaauccguuaaaaacggcacauacgauuauccuaaguacagcgaggaagccaaacugaauagagaggagaucgacggggugaaacuugaaucuacuaggauuuaucaaauacuggcuaucuacucaaccgucgcgaguagcuuggugcucgucgugucccugggagcaauuucuuuuuggaugugcucgaacgguagcuuacagugccggaucuguaucuga

SEQ ID NO: 131448 - RNA, 1701 nt, Artificial Sequence; identical to SEQ ID NO: 130704
  derived and/or modified CDS sequence (opt3) from hemagglutinin__InfluenzaA__ACV70914

SEQ ID NO: 131449 - RNA, 1701 nt, Artificial Sequence; identical to SEQ ID NO: 130704
  derived and/or modified CDS sequence (opt3) from hemagglutinin__InfluenzaA__ACV70924

SEQ ID NO: 131450 - RNA, 1701 nt, Artificial Sequence; identical to SEQ ID NO: 130704
  derived and/or modified CDS sequence (opt3) from hemagglutinin__InfluenzaA__ACV70934

SEQ ID NO: 131451 - RNA, 1701 nt, Artificial Sequence; identical to SEQ ID NO: 130704
  derived and/or modified CDS sequence (opt3) from hemagglutinin__InfluenzaA__ACV70944

SEQ ID NO: 131452 - RNA, 1701 nt, Artificial Sequence
  derived and/or modified CDS sequence (opt3) from hemagglutinin__InfluenzaA__ACV70954
augaaggccauccuggugguccuccuuuacaccuucgcuacagcaaacgccgacacucugugcauuggcuaucacgcgaauaacagcacggauaccguugacacaguguuggagaaaaauguaacugugacccauuccgucaacuuacuggaagauaagcacaaugggaaacuauguaagcucagaggaguggcuccccugcaucuugguaaaugcaacauagccggcuggauccuggggaauccugagugugaaucuuugucaacagcaaguagcugguccuacauuguugagaccucuucgucagacaacggaacuugcuauccaggcgauuuuaucgacuacgaggagcucagggagcagcugagcaguguguccucuuucgaacgguuugagauuuucccgaagacaagcuccuggcccaaucacgauucaaacaagggugucaccgccgcuuguccucaugcaggggccaaaaguuuuuauaagaaucugaucuggcucgugaaaaagggaaacagcuacccaaaauuaucuaaguccuauauaaaugacaagggcaaagaaguacugguucuuuggggcauccaccaccccucaacgagcgcugaucaacagaguuuguaccagaacgccgacgcguacguguucgucgggucuucccgcuauagcaagaaauuuaagccugagauugcaauccgaccaaaagugcgugaucaggagggaagaaugaauuacuauuggacucugguggaacccggugacaagauuaccuucgaggccacaggcaaccuacucgucccuagguacgcuuuugccauggaacggaacgcagggucgggaaucauaauuucugauacuccaguucaugacugcaauaccacaugucaaaccccgaaaggcgcuaucaacacgucccugcccuuccagaauauucacccuaucacuaucgguaagugcccaaaguaugugaaaucaacaaaacuucgccuggccaccggguugagaaacguacccaguauucagagcaggggacucuuuggcgcgauagccggcuucaucgaagggggauggacugguaugguggacggcugguacggguaucaucaccagaaugaacaaggauccggcuacgcagcugaucugaagucuacacagaacgccauugacgagaucaccaauaaggucaacagcgugauagagaaaaugaauacgcaguuuaccgcuguugguaaggaguucaaccacuuagaaaagcggauugaaaaucugaacaaaaagguggaugacggguuccucgauaucuggacauacaaugccgagcuucuggucuugcuagaaaacgagcgcacucuggacuaucaugauucaaaugugaaaaaccucuacgagaagguacgaagucagcugaaaaacaaugcaaaggaaaucggcaacggauguuuugaguucuaucacaagugcgacaauaccuguauggaauccguuaaaaacggcacauacgauuauccuaaguacagcgaggaagccaaacuuaauagagaggagauugacggggugaagcuggaaucuacuaggaucuaucaaauuuuggcuauauacucaaccgucgcgaguagccucgugcuggucguguccuuaggagcaaucucuuuuuggaugugcucgaacgguagccugcagugccggauuuguaucuga

SEQ ID NO: 131453 - RNA, 1701 nt, Artificial Sequence; identical to SEQ ID NO: 130704
  derived and/or modified CDS sequence (opt3) from hemagglutinin__InfluenzaA__ACV70964

SEQ ID NO: 131454 - RNA, 1701 nt, Artificial Sequence; identical to SEQ ID NO: 130704
  derived and/or modified CDS sequence (opt3) from hemagglutinin__InfluenzaA__ACV70974

SEQ ID NO: 131455 - RNA, 1701 nt, Artificial Sequence; identical to SEQ ID NO: 131447
  derived and/or modified CDS sequence (opt3) from hemagglutinin__InfluenzaA__ACV70984

SEQ ID NO: 131456 - RNA, 1701 nt, Artificial Sequence; identical to SEQ ID NO: 131452
  derived and/or modified CDS sequence (opt3) from hemagglutinin__InfluenzaA__ACV70994

SEQ ID NO: 131457 - RNA, 1701 nt, Artificial Sequence; identical to SEQ ID NO: 130704
  derived and/or modified CDS sequence (opt3) from hemagglutinin__InfluenzaA__ACV71004

SEQ ID NO: 131458 - RNA, 1701 nt, Artificial Sequence
  derived and/or modified CDS sequence (opt3) from hemagglutinin__InfluenzaA__ACV82230
augaagaccaucauugcccugagcuacauacucugccuuguguucgcucagaaacugcccggcaacgacaauuccacagcaacuuuguguuuagggcaccaugccgucccuaacggaacgaucguuaagaccauuacaaaugaucaaaucgaggugacuaacgcgaccgaacugguacagucuucaaguacaggugagauuugcgacagcccacaccagauccuagauggcaaaaauuguacccucauagacgcucugcuuggggauccgcagugcgacggauuucaaaacaagaaaugggaucuguucguggaaagaucccaggccuauucuaauuguuaccccuaugacgucccugauuacgcaucguugaggucacucguggccagcaguggcacucuggaguuuaacaaugaauccuucaacuggacagguguuacccagaaugggacgucuagcgcuugcauccggcgcuccaagaacucauuuuucagucgacugaauuggcucacucauuuaaacuuuaaguaucaggcacugaaugugaccaugccaaacaacgagcaauucgacaaacuuuacauuuggggaguccaccaucccggcacagauaaggaccagaucuuuuuguaugcccaggcuagcggccguauuacugugucuaccaaaagaucccagcaaacaguaaucccuaauauagggucaaggccacggguucgcaacauucccagcagaaucaguauuuacuggaccaucgugaagccuggagauauccugcuaauuaauucuacggguaaccucauagccccaaggggcuacuucaaaauccaguccggaaagagcucgauuaugcggucugacgcgccgaucgggaaguguaauuccgagugcauaacucccaacggcucaauuccuaaugacaaaccauuucagaacgucaaucgcaucacauauggugcauguccccgauacgugaagcaaaacacccugaaacuugccacugggaugagaaaugugccugaaaagcagacaaggggaaucuucggcgcuauugccggcuuuaucgagaacgggugggaaggaauggucgaugguugguauggcuuccggcaccagaauagugaggggcguggacaggcagcugaccugaaaagcacccaagccgcgauugaucagauaaacggcaaguugaaucgccucaucgguaaaacgaacgagaaguuccaccagauugaaaaggaguuuuccgaaguugaggggagaauccaggaccuggaaaaauacguggaggauaccaagaucgacuuauggucuuauaacgccgagcugcucguagcacuugaaaaucaacauacaauugaucugacugacagcgagaugaacaaauuguucgaaaagaccaaaaagcagcuaagggagaaugcugaagauaugggcaacggaugcuuuaagauauaccacaaaugugacaaugccugcaucggcucaauucggaacgggacauaugaucaugacguguaccgagacgaggcucugaauaaccgcuuccagaucaagggagucgagcucaaaagugguuacaaggauuggauucuguggaucuccuuugccauaagcugcuuccuucuguguguggcauugcucggcuuuaucaugugggccugccagaaagggaauauuagauguaacaucugcauuuga

SEQ ID NO: 131459 - RNA, 1701 nt, Artificial Sequence
  derived and/or modified CDS sequence (opt3) from hemagglutinin__InfluenzaA__ACV82232
augaagaccaucauugcccugagcuacauacucugccuuguguucgcucagaaacugcccggcaacgacaauuccacagcaacuuuguguuuagggcaccaugccgucccuaacggaacgaucguuaagaccauuacaaaugaucaaaucgaggugacuaacgcgaccgaacugguacagucuucaaguacaggugagauuugcgacagcccacaccagauccuagauggcgaaaauuguacccucauagacgcucugcuuggggauccgcagugcgacggauuucaaaacaaaaagugggaucuguucguggagagauccaaagccuauucuaauuguuaccccuaugacgucccugauuacgcaucguugaggucacucguggccagcaguggcacucuggaauuuaacaaugaguccuucaacuggacagguguuacccagaaugggacgucuagcgcuugcauccggcgcuccaacaauucauuuuucagucgacugaacuggcucacucauuuaaauuuuaaguauccagcacugaacgugaccaugcccaacaaugagcaguucgacaagcuguacauuuggggaguccaccauccuggcacagauaaagaccagaucuuuuuguaugcccaagcuagcggccguauuacugugucuaccaagagaucccagcaggccguaaucccaaacauagggucaaggccccggguucgcaauauuccuagcagaaucaguauuuacuggacaaucgugaaaccaggagauauccugcuaauuaacucuaccgguaaucucauagcgccgaggggcuacuucaagauccgguccgggaaaagcucgauuaugcgcucugacgcacccaucggaaaguguaacuccgaaugcauaacgccuaauggcucaauuccaaacgacaagcccuuucagaaugucaaccgaaucacuuauggugccuguccuagauacgugaaacaaaauacacugaaacuugcuaccgggaugaggaacgugccagagaagcagacucggggaaucuucggcgccauugcaggcuuuaucgaaaaugggugggagggaauggucgaugguugguauggcuuccgucaccagaacagugaggggcgcggacaagcugccgaccuuaagagcacacaggcggccauugaucagauaaauggcaaauugaacagacucaucgguaagaccaacgaaaaauuccaccagauugagaaggaauuuuccgagguugaagggaggauccaagaccuggagaaguacguggaggauacgaaaaucgacuuauggucuuauaaugcagaacugcucguagcucuugagaaccagcauaccauugaucugacagacagcgaaaugaauaaguuguucgagaaaacuaagaaacagcuacgggaaaacgccgaggauaugggcaauggaugcuuuaagauauaccacaagugugacaacgcuugcaucggcucaauucgaaaugggaccuaugaucaugacguguaccgcgacgaggcccugaacaauagauuccagaucaaaggagucgaacucaagagugguuacaaagauuggauucuguggaucuccuuugcaauaagcugcuuccuucuguguguggccuugcucggcuuuaucaugugggcuugccaaaaggggaacauuagguguaauaucugcauuuga

SEQ ID NO: 131460 - RNA, 1698 nt, Artificial Sequence
  derived and/or modified CDS sequence (opt3) from hemagglutinin__InfluenzaA__ACV82233
augaaggugaaacugcucguccuucugugcaccuucacagccacuuacgcugacacgaucuguauuggcuaucacgcaaacaauagcaccgauacaguugacacuguguuggagaagaacguaaccgugacacauuccgucaauuuacuggaaaacaaucacaacgggaaacuaugccuccugaagggaauagcgccccuucagcuggguaauuguucuguggccggcuggaucuuggggaacccugagugcgaacuccugauuucaaaagagaguuggagcuacaucguugaaaagccaaauccggagaacggaaccuguuaucccggccauuuugcugauuacgaggaacugagagagcaacucuccucugugucgucauucgaaagguuugagauuuucccuaaggagagcaguuggccaaaucacacugucacagguguguccgccucuugcagccauaacggggaaaauuccuuuuaucggaacuuacuguggcuuaccggcaaaaauggauuguaccccaaccugucaaagaguuaugcaaacaauaaagagaaggaaguucuaguacucuggggcgugcaccacccuccaaacaucgccgaccagaaaacgcuguaccauacugagaaugcuuacgucagcguggugucuucccacuauucacgcaaguucacccccgaaauagcaaagcgaccuaaaauccgugaucaggaggggagaauuaacuacuauuggacacuucuggagccaggagacacuaucauuuuugaagccaaugguaacuugaucgcuccgagguacgccuucgcgcucagccggggcuuugggaguggaauaauuaauucuaacgcacccauggauaagugugacgccaaaugccagaccccucaaggcgcuaucaauuccagccugccauuccagaacguccaucccguuacaauuggugaguguccuaaguaugugcgcucggccaaauuaagaaugguaaccgggcugaggaauaucccaucuauccagucccggggacucuuuggcgcaauugcuggcuucauagaagggggauggacggguaugguggauggcugguacggguaucaccaccagaacgagcaaggaucaggcuacgccgcggaccagaagaguacucagaaugccaucaacgguauuacaaauaaagucaacagcgugaucgaaaagaugaacacccaguuuacugcaguugggaaggaguucaauaaacuugagcgccgaauggaaaaccugaauaagaaaguggaugacggcuucauagauauuuggacauacaacgcugaguugcuaguccugcucgaaaaugagagaacccuggacuuucaugacuccaacgugaagaaucuuuaugaaaaaguaaagucucaacugaagaacaaugccaaagagaucggaaacggcugcuucgaguuuuaccacaaguguaaugaugaaugcauggagagcguuaaaaacgggacguaugacuaccccaaguauucagaagagaguaaauugaauagggagaagaucgauggagugaagcucgaauccaugggugucuaccagauucuggcuaucuauagcaccguggccucuucauuaguccugcuagugagucucggcgcaauuagcuucuggaugugcuccaacgggucucugcagugucggauaugcaucuga

SEQ ID NO: 131461 - RNA, 1701 nt, Artificial Sequence
  derived and/or modified CDS sequence (opt3) from hemagglutinin__InfluenzaA__ACV83662
augaaggccauccuggugguccuccuuuacaccuucgcuacagcaaacgccgacacucugugcauuggcuaucacgcgaauaacagcacggauaccguugacacaguguuggagaagaauguaacugugacccauuccgucaacuuacuggaagauaagcacaaugggaaacuauguaagcucagaggaguggcuccccugcaucuugguaaaugcaacauagccggcuggauccuggggaauccugagugugaaucuuugucaacagcaaguagcugguccuacauuguugagaccucuucgucagacaacggaacuugcuauccaggcgauuuuaucgacuacgaagaacucagggagcagcugagcaguguguccucuuucgaacgguuugagauuuucccgaagacaagcuccuggcccaaucacgauucaaacaagggugucaccgccgcuuguccucaugcaggggccaaaaguuuuuauaagaaucugaucuggcucgugaaaaagggaaacagcuacccaaaauuaucuaaguccuauauaaaugacaagggcaaagaaguacugguucuuuggggcauccaccaccccucaacgagcgcugaucaacagaguuuguaccagaacgccgacgcguacguguucgucgggacuucucgcuauuccaagaaauuuaagccugagauugcaauccgaccaaaagugcgugauagagagggaaggaugaauuacuauuggacccugguggaacccggugacaagauuacauucgaggccacuggcaaccuagucguuccucgguacgcuuuugccauggugcgcaacgcagggagcggaaucauaauuucggauaccccaguacaugacugcaauacaaccugucagacgccgaaaggcgcuaucaacacuucucuccccuuccaaaauauucacccuaucacaaucgguaagugcccaaaguaugugaaauccaccaagcugagacuugccacugggcugaggaacguccccucaauucagagucggggauuguuuggcgcgauagccggcuucaucgaagggggauggacagguaugguggacggcugguacggguaucaucaccagaaugagcagggaagcggcuacgcagcugaucucaaauccacccaaaacgccauugacgaaaucacgaauaagguuaacucugugauagagaaaaugaauacccaguuuacagcugucgguaaggaguucaaccaccuggaaaagcgcauugagaauuuaaacaaaaagguggaugacggguuccuggauaucuggacuuacaaugccgaacuccuuguacuguuggagaacgaacgaacccuagacuaucaugauagcaauguuaaaaaccuguacgagaaggugagaucacagcucaaaaacaaugcaaaggagaucggcaacggauguuuugaguucuaucacaagugcgacaauacauguauggagagugucaaaaacggcacuuacgauuauccuaaguacuccgaagaggccaaacugaauagggaagagauugacggggugaaacuugagagcacccggaucuaucagauucuggcuauauacucuacagucgcgucaaguuuggugcucguugugagccugggagcaaucuccuuuuggaugugcucuaacgguucguuacaaugccguauuuguaucuga

SEQ ID NO: 131462 - RNA, 1701 nt, Artificial Sequence
  derived and/or modified CDS sequence (opt3) from hemagglutinin__InfluenzaA__ACV83663
augaaggccauccuggugguccuccuuuacaccuucgcuacagcaaacgccgacacucugugcauuggcuaucacgcgaauaacagcacggauaccguugacacaguguuggagaaaaauguaacugugacccauuccgucaacuuacuggaagauaagcacaaugggaaacuauguaagcucagaggaguggcuccccugcaucuugguaaaugcaacauagccggcuggauccuggggaauccugagugugaaucuuugucaacagcaaguagcugguccuacauuguugagaccucuucgucagacaacggaacuugcuauccaggcgauuuuaucgacuacgaagaacucagggagcagcugagcaguguguccucuuucgaacgguuugagauuuucccgaagacaagcuccuggcccaaucacgauucaaacaagggugucaccgccgcuuguccucaugcaggggccaaaaguuuuuauaagaaucugaucuggcucgugaaaaagggaaacagcuacccaaaauuaucuaaguccuauauaaaugacaagggcaaagaaguacugguucuuuggggcauccaccaccccucaacgagcgcugaucaacagaguuuguaccagaacgccgacgcguacguguucgucgggacuucucgcuauuccaagaaauuuaagccugagauugcaauccgaccaaaagugcguggacaggaggguagaaugaauuacuauuggacccugguggaacccggcgauaagauuacauucgaggccacugggaaccuagucguuccuagguacgcuuuugccauggaacggaacgcaggaagcggcaucauaauuucggacaccccagugcaugauugcaauacaaccugucaaacgccgaaaggugcuaucaacacuucucuccccuuccagaauauucacccuaucacaaucgggaagugcccaaaguauguaaaauccaccaagcugcgccuugccacuggacugagaaacgugcccucaauucagaguaggggcuuguuuggcgcgauagccggguucaucgagggagguuggacaggcauggucgacgggugguacggauaucaucaccagaaugaacaaggcagcgguuacgcagcugaccucaaauccacccagaacgccauugaugagaucacgaauaaggugaacucuguuauagagaaaaugaauacccaguuuacagcuguggggaaggaguucaaccaccuggagaagcggauugaaaauuuaaacaaaaaggucgacgauggcuuccuggacaucuggacuuacaaugccgagcuccuugugcuguuggaaaacgagcgcacccuagauuaucaugacagcaauguaaagaaccuguacgagaagguucgaucacagcucaaaaacaaugcaaaggaaaucggaaacggcuguuuugaguucuaucacaagugcgauaauacauguauggaaagugugaaaaacgggacuuacgacuauccuaaguacuccgaggaagccaaacugaauagagaggagauugauggagucaaacuugaaagcaccaggaucuaucaaauucuggcuauauacucuacaguggcgucaaguuugguccucgugguuagccugggugcaaucuccuuuuggaugugcucuaacggcucguuacagugccggauuuguaucuga

SEQ ID NO: 131463 - RNA, 1701 nt, Artificial Sequence; identical to SEQ ID NO: 131462
  derived and/or modified CDS sequence (opt3) from hemagglutinin__InfluenzaA__ACV83664

SEQ ID NO: 131464 - RNA, 1701 nt, Artificial Sequence
  derived and/or modified CDS sequence (opt3) from hemagglutinin__InfluenzaA__ACV83665
auggaggccauccuggugguccuccuuuacaccuucgcuacagcaaacgccgacacucugugcauuggcuaucacgcgaauaacagcacggauaccguugacacaguguuggaaaagaauguaacugugacccauuccgucaacuuacuggaggauaaacacaaugggaagcuauguaaacucagaggaguggcuccccugcaucuugguaagugcaacauagccggcuggauccuggggaauccugaaugugagucuuugucaacagcaaguagcugguccuacauuguugaaaccucuucgucagacaacggaacuugcuauccaggcgauuuuaucgacuacgaggagcucagggaacagcugagcaguguguccucuuucgagcgguuugaaauuuucccgaaaacaagcuccuggcccaaucacgauucaaacaagggugucaccgccgcuuguccucaugcaggggccaagaguuuuuauaaaaaucugaucuggcucgugaagaaaggaaacagcuacccaaaguuaucuaaauccuauauaaaugacaagggcaaggagguacugguucuuuggggcauccaccaccccucaacgauugcugaucaacagagcuuguaccagaacgccgacgcguacguguucgucgggaguucucgcuauuccaaaaaguuuaaaccugagaucgcaauucgaccaaaggugcgugaucaggaaggaagaaugaauuacuauuggacucugguggagcccggugacaaaaucaccuucgaagccacaggcaaccuagucguuccuagguacgcuuuugccauggagcggaacgcagggagcggaauaauuaucucggauacuccagugcaugacugcaauaccacaugucaaaccccgaagggcgcuauuaacacgucucuccccuuccacaauauccauccuaucacuauugguaaaugcccaaaguauguaaaguccacaaaacugcgccuugccaccgggcugagaaacgugcccucaauacagaguaggggauuguuuggcgcgaucgccggcuucauugaagggggauggacugguauggucgacggcugguacggguaucaccaccagaaugagcagggaagcggcuacgcagcugaucucaaguccacacaaaacgccaucgacgagauaaccaauaaagugaacucuguuauugaaaagaugaauacgcaguuuaccgcuguggguaaagaguucaaccaucuggaaaagcggaucgagaauuuaaacaagaaagucgaugacggguuccuggauaucuggacauacaaugccgaacuccuugugcuguuggagaacgagcgcacucuagacuaucacgauagcaauguaaagaaccuguacgaaaaaguucgaucacagcucaagaacaaugcaaaagagauuggcaacggauguuuugaguucuaucauaagugcgacaauaccuguauggaaagugugaagaacggcacauacgauuauccuaaauacuccgaagaggccaagcugaauagagaggaaaucgacggggucaaacuugagagcacuaggauuuaucagauacuggcuaucuacucuaccguggcgucaaguuugguccucgugguuagccugggagcaauuuccuuuuggaugugcucuaacgguucguuacaaugccggaucuguaucuga

SEQ ID NO: 131465 - RNA, 1701 nt, Artificial Sequence
  derived and/or modified CDS sequence (opt3) from hemagglutinin__InfluenzaA__ACV83667
augaaggccauccuggugguccuccuuuacaccuucgcuacagcaaacgccgacacucugugcauuggcuaucacgcgaauaacagcacggauaccguugacacaguguuggagaagaauguaacugugacccauuccgucaacuuacuggaagauaagcacaaugggaaacuauguaagcucagaggaguggcuccccugcaucuugguaaaugcaacauagccggcuggauccuggggaauccugagugugaaucuuugucaacagcaaguagcugguccuacauuguugagaccucuucgucagacaacggaacuugcuauccaggcgauuuuaucgacuacgaggagcucagggagcagcugagcaguguguccucuuucgaacgguuugagauuuucccgaagacaagcuccuggcccaaucacgauucaaacaagggugucaccgccgcuuguccucaugcaggggccaaaaguuuuuauaagaaucugaucuggcucgugaaaaagggaaacagcuacccaaaauuaucuaaguccuauauaaaugacaagggcaaagaaguacugguucuuuggggcauccaccaccccucaacgagcgcugaucaacagaguuuguaccagaacgccgacgcguacguguucgucgggacuucucgcuauuccaagaaauuuaagccugagauugcaauccgaccaaaagugcguaaucaggagggaagaaugaacuacuauuggacccugguggaacccggugauaagauuacauucgaggccacuggcaaccuagucguuccuagguacgcuuuugccauggaacggaaugcagggagcggaaucauaauuucggacaccccagugcaugauugcaacacaaccugucaaacgccgaaaggcgcuaucaauacuucucuccccuuccagaacauucacccuaucacaaucgguaagugcccaaaguauguaaaauccaccaagcugcgccuugccacugggcugagaaaugugcccucaauucagaguaggggauuguuuggcgcgauagccggcuucaucgaagggggauggacagguauggucgacggcugguacggguaucaucaccagaacgaacaaggaagcggcuacgcagcugaccucaaauccacccagaaugccauugaugagaucacgaacaagguaaauucuguuauagagaaaaugaacacccaguuuacagcuguggguaaggaguucaaucaccuggaaaagcggauugaaaacuuaaauaaaaaggucgacgauggguuccuggacaucuggacuuacaacgccgagcuccuugugcuguuggaaaaugagcgcacccuagauuaucaugacagcaacgugaaaaaccuguacgagaagguucgaucacagcucaaaaauaacgcaaaggaaaucggcaauggauguuuugaguucuaucacaagugcgauaacacauguauggaaagugugaaaaauggcacuuacgacuauccuaaguacuccgaggaagccaaacugaacagagaggagauugauggggucaaacuugaaagcaccaggaucuaucaaauucuggcuauauacucuacaguggcgucaaguuugguccucgugguuagccugggagcaaucuccuuuuggaugugcucuaaugguucguuacagugccggauuuguaucuga

SEQ ID NO: 131466 - RNA, 1701 nt, Artificial Sequence; identical to SEQ ID NO: 130717
  derived and/or modified CDS sequence (opt3) from hemagglutinin__InfluenzaA__ACV83668

SEQ ID NO: 131467 - RNA, 1701 nt, Artificial Sequence; identical to SEQ ID NO: 130717
  derived and/or modified CDS sequence (opt3) from hemagglutinin__InfluenzaA__ACV83670

SEQ ID NO: 131468 - RNA, 1701 nt, Artificial Sequence; identical to SEQ ID NO: 130959
  derived and/or modified CDS sequence (opt3) from hemagglutinin__InfluenzaA__ACV83671

SEQ ID NO: 131469 - RNA, 1701 nt, Artificial Sequence; identical to SEQ ID NO: 131279
  derived and/or modified CDS sequence (opt3) from hemagglutinin__InfluenzaA__ACV88399

SEQ ID NO: 131470 - RNA, 1701 nt, Artificial Sequence; identical to SEQ ID NO: 131279
  derived and/or modified CDS sequence (opt3) from hemagglutinin__InfluenzaA__ACV88409

SEQ ID NO: 131471 - RNA, 1701 nt, Artificial Sequence; identical to SEQ ID NO: 130704
  derived and/or modified CDS sequence (opt3) from hemagglutinin__InfluenzaA__ACV88419

SEQ ID NO: 131472 - RNA, 1698 nt, Artificial Sequence; identical to SEQ ID NO: 131326
  derived and/or modified CDS sequence (opt3) from hemagglutinin__InfluenzaA__ACV89502

SEQ ID NO: 131473 - RNA, 1701 nt, Artificial Sequence
  derived and/or modified CDS sequence (opt3) from hemagglutinin__InfluenzaA__ACV89516
augaaggccagacugcucauccuucugugcgcuuuggcagccaccgacgcggauacaauuuguauaggcuaccacgcuaacaauagcacugacacgguggauaccgucuuagagaaaaacguuacagugacucauuccguaaaucugcuagaagacucucacaacgggaagcucugcaggcugaaaggaaucgccccgcuucagcuggguaaguguaauauugcaggcuggaucuuggggaacccugagugcgauucacuccugccagccaguagcugguccuauauuguggaaacccccaauucuaaaaacggaaucuguuaccccggcgacuucauagauuaugaggaacugcgggagcaacucucgucagucagcaguuuugagcgcuucgaaaucuuuccuaaggaguccucuuggccaaagcauagcacaaccaaaggugugacugcugcaugcucccacgccgggaagucaaguuucuaccgaaauuuacuguggcuuaccaaaaagggagacagcuaucccaaauugucuaacuccuacguuaauaagaagggcaaagaagugcugguccuauggggcgugcaucacccuucaagcaguaaggagcagcagacacucuaucagaacgagaaugcuuacguaucuguuguguccagcaacuacaaucguagauuuauuccagaaaucgccgagaggcccgaagucaaagaucaagcggggcggauuaacuauuacuggacgcugcuugagccuggagacacuaucauauucgaagcaaacgguaaucugguggccccaugguaugcuuuugccuugucgcgcggcuucgggucuggaauuaucaccuccaacgcaucaaugcacgaguguaauacaaagugccagacuccgcagggcgcuauuaacaguagccuccccuuucagaauauccauccugugaccaucggugaguguccaaaauacgucaaguccgccaaacugagaaugguuacaggguuaaggaacauucccucuauacaaagccggggacuguucggcgcgaucgccggcuuuauugaagggggauggaccgguaugaucgauggcugguauggguaccaccaucagaaugagcagggaucaggcuaugcagcugaccagaagaguacgcaaaacgccauaaaugguauuacuaacaagguaaauuccgugaucgagaaaaugaacacacaguucaccgcuguggggaaggaauuuaauaaccucgaaaaacgcauggagaaucuuaacaagaaagucgaugacggcuuccuggacaucuggacuuacaacgccgaguugcuagugcugcucgaaaaugagcgaacacuggauuuccacgacagcaacguuaagaaucuuuacgaaaaggugaaaauucagcugaagaacaaugcaaaagagaucggaaacggcugcuuugaguucuaucacaagugugauaaugaaugcauggagucugucagaaacgggaccuacgacuauccuaaauacucaaaggaaaguaaguugaauagggagaaaauugauggagugaagcucgaaagcauggguguauaucaaauacuggccaucuacuccacgguugcuucuucguuagugcugcuagucagccucggcgcgauuuccuuuuggaugugcucaaacgggagucugcagugucggaucugcaucuga

SEQ ID NO: 131474 - RNA, 1698 nt, Artificial Sequence
  derived and/or modified CDS sequence (opt3) from hemagglutinin__InfluenzaA__ACV90512
augaacgugaagcugcucguccuucugugcaccuucacagccacuuacgcugacacgaucuguauuggcuaucacgcaaauaacagcaccgauacaguugacacuguguuggagaaaaauguaaccgugacacauuccgucaacuuacuggaaaauucucacaacgggaagcuaugccuccugaaaggaauagcgccccuucagcuggguaauuguucaguggccggcuggaucuuggggaacccugagugcgaacuccugauuaguaaggagagcugguccuacaucguugaaaaaccaaauccggagaacggaaccuguuaucccggccauuuugcugauuacgaggaacugagagagcaacucucuucggugagcucauucgaaagguuugagauuuucccuaaggagaguuccuggccaaaucacacugucacaggugugucugccagcugcucccauaacggggaaaauucauuuuaucggaacuuacuguggcuuaccggaaagaauggcuuguaccccaaccugaguaaaagcuaugcaaacaauaaggagaaagaaguucuaguacucuggggcgugcaccacccuccaaacaucgccgaccagaagacgcuguaccauacugagaaugcuuacgucucugugguguccucacacuauagccgcaaauucacccccgaaauagcaaagcgaccuaagguccgugaucaggaggggagaaucaacuacuauuggacacuucuggagccaggagacacuauuaucuuugaagccaaugguaacuugauugcuccgagguacgccuucgcgcucagucggggcuuugggucuggaaucauaaauuccaacgcacccauugauaaaugggacgccaagugucagaccccucaaggcgcuaucaauagcucgcugccauuccagaacguucaucccgugacaauuggugaguggccuaaauauguacgcucugccaaguuaagaauggugaccgggcugaggaauaucccauccauccagucacggggacucuuuggcgcaauugcuggcuucauagaagggggauggacggguauggucgauggcugguacggguaucaccaccagaacgagcaaggaaguggcuacgccgcggaccagaaaagcacucagaaugccaucaacgguauuacaaauaagaugaacuccgugaucgaaaagaugaacacccaguuuacugcaguugggaaggaguucaauaaacuugagcgccgaauggaaaaccugaauaaaaagguggaugacggcuucauagauauuuggacauacaacgcugaguugcuaguccugcucgaaaaugagagaacccuggacuuucaugacucuaacgugaaaaaucuuuaugaaaagguaaaaagccaacugaagaacaaugccaaggagaucggaaacggcugcuucgaguuuuaccacaaauguaaugaugaaugcauggagucaguuaagaacgggacguaugacuaccccaaauauagugaagaguccaaguugaauagggagaaaaucgauggagugacccucgaaagcaugggugucuaccagauucuggcuaucuauucuacaguggccucaaguuuaguccugcuagugagccucggcgcaauuuccuucuggauguguucuaacgggucgcugcagugccggauaugcaucuga

SEQ ID NO: 131475 - RNA, 1701 nt, Artificial Sequence; identical to SEQ ID NO: 130717
  derived and/or modified CDS sequence (opt3) from hemagglutinin__InfluenzaA__ACV91672

SEQ ID NO: 131476 - RNA, 1701 nt, Artificial Sequence; identical to SEQ ID NO: 130717
  derived and/or modified CDS sequence (opt3) from hemagglutinin__InfluenzaA__ACV91676

SEQ ID NO: 131477 - RNA, 1701 nt, Artificial Sequence; identical to SEQ ID NO: 130717
  derived and/or modified CDS sequence (opt3) from hemagglutinin__InfluenzaA__ACV91680

SEQ ID NO: 131478 - RNA, 1701 nt, Artificial Sequence
  derived and/or modified CDS sequence (opt3) from hemagglutinin__InfluenzaA__ACX31591
augaagaccaucauugcccugagcuacauacucugccuuguguucgcucagaaacugcccggcaacgacaauuccacagcaacuuuguguuuagggcaccaugccgucccuaacggaacgaucguuaagaccauuacaaaugaucaaaucgaggugacuaacgcgaccgaacugguacagucuucaaguacaggugagauuugcgacagcccacaccagauccuagauggcaaaaauuguacccucauagacgcucugcuuggggauccgcagugcgacggauuucaaaacaagaaaugggaucuguucguggaaagauccaaggccuauucuaauuguuaccccuaugacgucccugauuacgcaucguugaggucacucguggccagcaguggcacucuggaguuuaacaaugaauccuucaacuggacagguguuacccagaaugggacgucuagcgcuugcauccggcgcuccaagaacucauuuuucagucgacugaauuggcucacucauuuaaacuuuaaauaucaggcacugaaugugaccaugccaaacaacgagcaguucgacaagcuguacauuuggggaguccaccaucccggcacagauaaagaccaaaucuuuuuguaugcccaggcuagcggccguauuacugugucuaccaagagaucccagcagacaguaaucccuaauauagggucaaggccacggguucgcaacauucccagcagaaucaguauuuacuggaccaucgugaaaccuggagauauccugcuaauuaauucuacggguaaccucauagccccaaggggcuacuucaagauccaauccggaaagagcucgauuaugcggucugacgcgccgaucgggaaauguaauuccgagugcauaacucccaacggcucaauuccuaaugacaagccauuucagaacgucaaucgcaucacauauggugcauguccccgauacgugaaacagaacacccugaaacuugccacugggaugagaaaugugccugaaaaacaaacaaggggaaucuucggcgcuauugccggcuuuaucgagaacgggugggaaggaauggucgaugguugguauggcuuccggcaccagaauagugaggggcguggacaggcagcugaccuuaagagcacccaggccgcgauugaucaaauaaacggcaaauugaaucgccucaucgguaagacgaacgagaaguuccaccagauugaaaaagaguuuuccgaaguugaggggagaauccaggaccuggaaaaguacguggaggauaccaaaaucgacuuauggucuuauaacgccgagcugcucguagcacuugaaaaucagcauacaauugaucugacugacagcgagaugaacaaguuguucgaaaagaccaagaagcaacuaagggagaaugcugaagauaugggcaacggaugcuuuaaaauauaccacaagugugacaaugccugcaucggcucaauucggaacgggacauaugaucaugacguguaccgagacgaggcucugaauaaccgcuuccagaucaaaggagucgagcucaagagugguuacaaagauuggauucuguggaucuccuuugccauaagcugcuuccuucuguguguggcauugcucggcuuuaucaugugggccugccagaaggggaauauuagauguaacaucugcauuuga

SEQ ID NO: 131479 - RNA, 1701 nt, Artificial Sequence
  derived and/or modified CDS sequence (opt3) from hemagglutinin__InfluenzaA__ACX31933
augaaggccauccuggugguccuccuuuacaccuucgcuacagcaaacgccgacacucugugcauuggcuaucacgcgaauaacagcacggauaccguugacacaguguuggagaaaaauguaacugugacccauuccgucaacuuacuggaagauaagcacaaugggaaacuauguaagcucagaggaguggcuccccugcaucuugguaaaugcaacauagccggcuggauccuggggaauccugagugugaaucuuugucaacagcaaguagcugguccuacauuguugagaccucuucgucaggaaacggcacuugcuauccaggugacuuuaucgauuacgaagaacucagggagcagcugagcaguguguccucuuucgaacgguuugagauuuucccgaagacaagcuccuggcccaaucacgacucaaacaagggggucaccgccgcuuguccucaugcaggagccaaaaguuuuuauaagaaucugaucuggcucgugaaaaagggcaacagcuacccaaaauuaucuaaguccuauauaaaugauaagggcaaagaaguacugguucuuugggggauccaccaccccucaacgagcgcugaccaacagaguuuguaccagaacgccgaugcguacguguucgucggaacuucucgcuauuccaagaaauuuaagccugagauugcaauccgaccaaaagugcgugaccaggaggguagaaugaauuacuauuggacccugguggaacccggcgauaagauuacauucgaggccacugggaaccuagucguuccuagguacgcuuuugccauggaacggaacgcaggaagcggcaucauaauuucggacaccccagugcaugauugcaauacaaccugucaaacgccgaaaggugcuaucaacacuucucuccccuuccagaauauucacccuaucacaaucgggaagugcccaaaguauguaaaauccaccaagcugcgccuugccacuggacugagaaacgugcccucaauucagaguaggggcuuguuuggcgcgauagccggguucaucgagggagguuggacaggcauggucgacgggugguacggauaucaucaccagaaugaacaaggcagcgguuacgcagcugaccucaaauccacccagaacgccauugaugagaucacgaauaaggugaacucuguuauagagaaaaugaauacccaguuuacagcuguggggaaggaguucaaccaccuggagaagcggauugaaaauuuaaacaaaaaggucgacgauggcuuccuggacaucuggacuuacaaugccgagcuccuugugcuguuggaaaacgagcgcacccuagauuaucaugacagcaauguaaagaaccuguacgagaagguucgaucacagcucaaaaacaaugcaaaggaaaucggaaacggcuguuuugaguucuaucacaagugcgauaauacauguauggaaagugugaaaaacgggacuuacgacuauccuaaguacuccgaggaagccaaacugaauagagaggagauuaacggagucaaacuugaaagcaccaggaucuaucaaauucuggcuauauacucuacaguggcgucaaguuugguccucgugguuagccugggugcaaucuccuuuuggaugugcucuaauggcucguuacagugccggauuuguaucuga

SEQ ID NO: 131480 - RNA, 1701 nt, Artificial Sequence
  derived and/or modified CDS sequence (opt3) from hemagglutinin__InfluenzaA__ACX31934
augaaggccauccuggugguccuccuuuacaccuucgcuacagcaaacgccgacacucugugcauuggcuaucacgcgaauaacagcacggauaccguugacacaguguuggagaaaaauguaacugugacccauuccgucaacuuacuggaagauaagcacaaugggaaacuauguaagcucagaggaguggcuccccugcaucuugguaaaugcaacauagccggcuggauccuggggaauccugagugugaaucuuugucaacagcaaguagcugguccuacauuguugagaccucuucgucagacaacggaacuugcuauccaggcgauuuuaucgacuacgaagaacucagggagcagcugagcaguguguccucuuucgaacgguuugagauuuucccgaagacaagcuccuggcccaaucacgauucaaacaagggugucaccgccgcuuguccucaugcaggggccaaaaguuuuuauaagaaucugaucuggcucgugaaaaagggaaacagcuacccaaaauuaucuaaguccuauauaaaugacaagggcaaagaaguacugguucuuuggggcauccaccaccccucaacgagcgcugaucaacagaguuuguaccagaacgccgacgcguacguguucgucgggacuucucgcuauuccaagaaauuuaagccugagauuaccauccgaccaaaagugcguggacaggaggguagaaugaauuacuauuggacacugguggaacccggcgauaagauuacuuucgaggcaaccgggaaccuagucguuccuagguacgccuuugcuauggaacggaacgccggaagcggcaucauaauuucggacacaccagugcaugauugcaauaccacgugucaaacuccgaaaggugcaaucaacacaucucuccccuuccagaauauucacccuaucaccaucgggaagugcccaaaguauguaaaauccacuaagcugcgccuugcuacaggacugagaaacgugcccucaauucagaguaggggcuuguuuggcgccauagcgggguucaucgagggagguuggaccggcauggucgacgggugguacggauaucaucaccagaaugaacaaggcagcgguuacgccgcagaccucaaauccacgcagaacgcuauugaugagaucaccaauaaggugaacucuguuauagagaaaaugaauacacaguuuacugccguggggaaggaguucaaccaccuggagaagcggauugaaaauuuaaacaaaaaggucgacgauggcuuccuggacaucuggaccuacaaugcugagcuccuugugcuguuggaaaacgagcgcacacuagauuaucaugacagcaauguaaagaaccuguacgagaagguucgaucacagcucaaaaacaaugccaaggaaaucggaaacggcuguuuugaguucuaucacaagugcgauaauacuuguauggaaagugugaaaaacgggaccuacgacuauccuaaguacuccgaggaagcaaaacugaauagagaggagauugauggagucaaacuugaaagcacaaggaucuaucaaauucuggccauauacucuaccguggcuucaaguuugguccucgugguuagccugggugcgaucuccuuuuggaugugcucuaacggcucguuacagugccggauuuguaucuga

SEQ ID NO: 131481 - RNA, 1701 nt, Artificial Sequence; identical to SEQ ID NO: 130717
  derived and/or modified CDS sequence (opt3) from hemagglutinin__InfluenzaA__ACX31935

SEQ ID NO: 131482 - RNA, 1701 nt, Artificial Sequence; identical to SEQ ID NO: 130717
  derived and/or modified CDS sequence (opt3) from hemagglutinin__InfluenzaA__ACX31936

SEQ ID NO: 131483 - RNA, 1701 nt, Artificial Sequence; identical to SEQ ID NO: 130808
  derived and/or modified CDS sequence (opt3) from hemagglutinin__InfluenzaA__ACX31939

SEQ ID NO: 131484 - RNA, 1701 nt, Artificial Sequence; identical to SEQ ID NO: 130808
  derived and/or modified CDS sequence (opt3) from hemagglutinin__InfluenzaA__ACX31940

SEQ ID NO: 131485 - RNA, 1701 nt, Artificial Sequence; identical to SEQ ID NO: 130717
  derived and/or modified CDS sequence (opt3) from hemagglutinin__InfluenzaA__ACX31943

SEQ ID NO: 131486 - RNA, 1701 nt, Artificial Sequence; identical to SEQ ID NO: 130717
  derived and/or modified CDS sequence (opt3) from hemagglutinin__InfluenzaA__ACX31946

SEQ ID NO: 131487 - RNA, 1701 nt, Artificial Sequence; identical to SEQ ID NO: 130717
  derived and/or modified CDS sequence (opt3) from hemagglutinin__InfluenzaA__ACX31947

SEQ ID NO: 131488 - RNA, 1701 nt, Artificial Sequence; identical to SEQ ID NO: 130717
  derived and/or modified CDS sequence (opt3) from hemagglutinin__InfluenzaA__ACX31948

SEQ ID NO: 131489 - RNA, 1701 nt, Artificial Sequence
  derived and/or modified CDS sequence (opt3) from hemagglutinin__InfluenzaA__ACX31949
augaaggccauccuggugguccuccuuuacaccuucgcuacagcaaacgccgacacucugugcauuggcuaucacgcgaauaacagcacggauaccguugacacaguguuggagaaaaauguaacugugacccauuccgucaacuuacuggaagauaagcacaaugggaaacuauguaagcucagaggaguggcuccccugcaucuugguaaaugcaacauagccggcuggauccuggggaauccugagugugaaucuuugucaacagcaaguagcugguccuacauuguugagaccucuucgucagacaacggaacuugcuauccaggcgauuuuaucgacuacgaagaacucagggagcagcugagcaguguguccucuuucgaacgguuugagauuuucccgaagacaagcuccuggcccaaucacgauucaaacaagggugucaccgccgcuuguccucaugcaggggccaaaaguuuuuauaagaaucugaucuggcucgugaaaaagggaaacagcuacccaaaauuaucuaaguccuauauaaaugacaagggcaaagaaguacugguucuuuggggcauccaccaccccucaacgagcgcugaucaacagaguuuguaccagaacgccgacgcguacguguucgucgggacuucucgcuauuccaagaaauuuaagccugagauugcaauccgaccaaaagugcgugaucaggagggaagaaugaauuacuauuggacccugguggaacccggugacaagauuacauucgaggccacuggcaaccuagucguuccuagguacgcuuuugccauggaacggaacgcagggagcggaaucauaauuucggauaccccagugcauuauugcaauacaaccugucaaacgccgaaaggcgcuaucaacacuucucuccccuuccagaauauucacccuaucacaaucgguaagugcccaaaguacguaaaauccaccaagcugcgccuugccacugggcugagaaacgugcccucaauucagaguaggggauuguuuggcgcgauagccggcuucaucgaagggggauggacagguauggucgacggcugguauggguaccaucaccagaaugaacaaggaagcggcuacgcagcugaccucaaauccacccagaacgccauugaugagaucacgaauaaggugaacucuguuauagagaaaaugaauacccaguuuacagcuguggguaaggaguucaaccaccuggagaagcggauugaaaauuuaaacaaaaaggucgacgauggguuccuggacaucuggacuuauaaugccgagcuccuugugcuguuggaaaacgagcgcacccuagauuaccaugacagcaauguuaaaaaccuguaugaggaaguacgaucacagcucaagaacaaugcaaaagagaucggcaacggauguuuugaguucuaccacaagugcgauaauacauguauggagagugugaagaacggcacuuaugacuacccuaaauauuccgaagaggccaagcugaauagagaggaaauugauggggucaaacuugagagcaccaggaucuaccaaauucuggcuauauacucuacaguggcgucaaguuugguccucgugguuagccugggagcaaucuccuuuuggaugugcucuaacgguucguuacagugccggauuuguaucuga

SEQ ID NO: 131490 - RNA, 1701 nt, Artificial Sequence; identical to SEQ ID NO: 130717
  derived and/or modified CDS sequence (opt3) from hemagglutinin__InfluenzaA__ACX31950

SEQ ID NO: 131491 - RNA, 1701 nt, Artificial Sequence; identical to SEQ ID NO: 130717
  derived and/or modified CDS sequence (opt3) from hemagglutinin__InfluenzaA__ACX31951

SEQ ID NO: 131492 - RNA, 1701 nt, Artificial Sequence; identical to SEQ ID NO: 130717
  derived and/or modified CDS sequence (opt3) from hemagglutinin__InfluenzaA__ACX31954

SEQ ID NO: 131493 - RNA, 1701 nt, Artificial Sequence; identical to SEQ ID NO: 130717
  derived and/or modified CDS sequence (opt3) from hemagglutinin__InfluenzaA__ACX31955

SEQ ID NO: 131494 - RNA, 1701 nt, Artificial Sequence; identical to SEQ ID NO: 130704
  derived and/or modified CDS sequence (opt3) from hemagglutinin__InfluenzaA__ACX31956

SEQ ID NO: 131495 - RNA, 1701 nt, Artificial Sequence; identical to SEQ ID NO: 130717
  derived and/or modified CDS sequence (opt3) from hemagglutinin__InfluenzaA__ACX31957

SEQ ID NO: 131496 - RNA, 1701 nt, Artificial Sequence; identical to SEQ ID NO: 130704
  derived and/or modified CDS sequence (opt3) from hemagglutinin__InfluenzaA__ACX31958

SEQ ID NO: 131497 - RNA, 1701 nt, Artificial Sequence; identical to SEQ ID NO: 130959
  derived and/or modified CDS sequence (opt3) from hemagglutinin__InfluenzaA__ACX31960

SEQ ID NO: 131498 - RNA, 1701 nt, Artificial Sequence
  derived and/or modified CDS sequence (opt3) from hemagglutinin__InfluenzaA__ACX31961
augaaggccauccugguggucaugcucuacaccuucgcuacagcaaacgccgacacucuuugcauuggcuaucacgcgaauaacagcacggauaccguugacacagugcuggagaaaaauguaacugugacccauuccgucaacuuguuagaagauaagcacaaugggaaacuguguaagcuaagaggaguggcuccccuccaucuggguaaaugcaacauagccggcuggauccuugggaauccugagugugaaucucugucaacagcaaguagcugguccuacauuguugagaccucuucgucagacaacggaacuugcuauccaggcgauuuuaucgacuacgaagaguugagggagcagcucagcaguguguccucuuucgaacgguuugagauuuucccgaagacaagcuccuggcccaaucacgauucaaacaagggugucaccgccgcuuguccucaugcaggggccaaaaguuuuuauaagaaucugaucuggcuggugaaaaagggaaacagcuacccaaaacucucuaaguccuauauaaaugacaagggcaaagaaguauuaguucuguggggcauccaccaccccucaacgagcgcugaucaacagagucuuuaccagaacgccgacgcguacguguucgucgggucuucccgcuauagcaagaaauuuaagccugagauugcaauccgaccaaaagugcgugaucaggagggaagaaugaauuacuauuggacuuugguggaacccggugacaagauuaccuucgaggccacaggcaaccuggucguuccuagguacgcuuuugccauggaacggaacgcagggucgggaaucauaauuucugauacuccagugcaugacugcaauaccacaugucaaaccccgaaaggcgcuaucaacacgucccuacccuuccagaauauucacccuaucacuaucgguaagugcccaaaguauguaaaaucaacaaagcuccgccuggccaccgggcuuagaaacgugcccaguauucagagcaggggacuguuuggcgcgauagccggcuucaucgaagggggauggacugguauggucgacggcugguacggguaucaucaccagaaugaacaaggauccggcuacgcagcugauuugaaaucuacacagaacgccauugacgagaucaccaauaaggugaacagcguuauagagaaaaugaauacgcaguuuaccgcuguggguaaggaguucaaccaccucgagaagcggauugaaaaucugaacaaaaaggucgaugacggguucauggauaucuggacauacaaugccgaguuacuggugcuccuugaaaacgagcgcacucuggacuaucaugauucaaauguuaaaaacuuguacgagaagguacgaagucagcugaaaaacaaugcaaaggaaaucggcaacggauguuuugaguucuaucacaagugcgacaauaccuguauggaauccgugaaaaacggcacauacgauuauccuaaguacagcgaggaagccaaacuaaauagagaggagauugacggggucaagcucgaaucuacuaggaucuaucaaauucuggcuauauacucaaccguggcgaguagccuuguccuggugguuuccuugggagcaaucucuuuuuggaugugcucgaacgguagccuccagugccggauuuguaucuga

SEQ ID NO: 131499 - RNA, 1701 nt, Artificial Sequence; identical to SEQ ID NO: 130717
  derived and/or modified CDS sequence (opt3) from hemagglutinin__InfluenzaA__ACX31962

SEQ ID NO: 131500 - RNA, 1701 nt, Artificial Sequence; identical to SEQ ID NO: 130717
  derived and/or modified CDS sequence (opt3) from hemagglutinin__InfluenzaA__ACX31964

SEQ ID NO: 131501 - RNA, 1701 nt, Artificial Sequence; identical to SEQ ID NO: 130704
  derived and/or modified CDS sequence (opt3) from hemagglutinin__InfluenzaA__ACX35237

SEQ ID NO: 131502 - RNA, 1701 nt, Artificial Sequence; identical to SEQ ID NO: 130717
  derived and/or modified CDS sequence (opt3) from hemagglutinin__InfluenzaA__ACX35247

SEQ ID NO: 131503 - RNA, 1701 nt, Artificial Sequence; identical to SEQ ID NO: 130717
  derived and/or modified CDS sequence (opt3) from hemagglutinin__InfluenzaA__ACX35257

SEQ ID NO: 131504 - RNA, 1701 nt, Artificial Sequence; identical to SEQ ID NO: 130717
  derived and/or modified CDS sequence (opt3) from hemagglutinin__InfluenzaA__ACX35267

SEQ ID NO: 131505 - RNA, 1701 nt, Artificial Sequence; identical to SEQ ID NO: 130717
  derived and/or modified CDS sequence (opt3) from hemagglutinin__InfluenzaA__ACX35277

SEQ ID NO: 131506 - RNA, 1701 nt, Artificial Sequence; identical to SEQ ID NO: 130717
  derived and/or modified CDS sequence (opt3) from hemagglutinin__InfluenzaA__ACX35287

SEQ ID NO: 131507 - RNA, 1701 nt, Artificial Sequence; identical to SEQ ID NO: 130717
  derived and/or modified CDS sequence (opt3) from hemagglutinin__InfluenzaA__ACX35297

SEQ ID NO: 131508 - RNA, 1701 nt, Artificial Sequence
  derived and/or modified CDS sequence (opt3) from hemagglutinin__InfluenzaA__ACX35307
augaaggccauccuggugguccuccuuuacaccuucgcuacagcaaacgccgacacucugugcauuggcuaucacgcgaauaacagcacggauaccguugacacaguguuggagaaaaauguaacugugacccauuccgucaacuuacuggaagauaagcacaaugggaaacuauguaagcucagaggaguggcuccccugcaucuugguaaaugcaacauagccggcuggauccuggggaauccugagugugaaucuuugucaacagcaaguagcugguccuacauuguugagaccucuucgucagacaacggaacuugcuauccaggcgauuuuaucgacuacgaagaacucagggagcagcugagcaguguguccucuuucgaacgguuugagauuuucccgaagacaagcuccuggcccaaucacgauucaaacaagggugucaccgccgcuuguccucaugcaggggccaaaaguuuuuauaagaaucugaucuggcucgugaaaaagggaaacagcuacccaaaauuaucuaaguccuauauaaaugacaagggcaaagaaguacugguucuuuggggcauccaccaccccucaacgagcgcugaucaacagaguuuguaccagaacgccgacgcguacguguucgucgggacuucucgcuauuccaagaaauuuaagccugagauugcaauccgaccaaaagugcgugaucaggagggaagaaugaauuacuauuggacccuggugggucccggcgacaagauuacauucgaagccacugggaaccuagucguuccuagguacgcuuuugccauggagcggaacgcaggaagcggcaucauaauuucggauaccccagugcaugacugcaauacaaccugucaaacgccgaaaggugcuaucaacacuucucuccccuuccagaauauucacccuaucacaaucgggaagugcccaaaguauguaaaauccaccaagcugcgccuugccacuggacugagaaacgugcccucaauucagaguaggggcuuguuuggcgcgauagccggguucaucgaaggagguuggacaggcauggucgacgggugguacggauaucaucaccagaaugagcaaggcagcgguuacgcagcugaucucaaauccacccagaacgccauugacgaaaucacgaauaaggugaacucuguuauagagaaaaugaauacccaguuuacagcuguggggaaggaguucaaccaccuggaaaagcggauugagaauuuaaacaaaaaggucgaugacggcuuccuggauaucuggacuuacaaugccgaacuccuugugcuguuggagaacgaacgcacccuagacuaucaugauagcaauguaaagaaccuguacgagaagguucgaucacagcucaaaaacaaugcaaaggagaucggaaacggcuguuuugaguucuaucacaagugcgacaauacauguauggagagugugaaaaacgggacuuacgauuauccuaaguacuccgaagaggccaaacugaauagagaagagauugacggagucaaacuugagagcaccaggaucuaucaaauucuggcuauauacucuacaguggcgucaaguuugguccucgugguuagccugggugcaaucuccuuuuggaugugcucuaacggcucguuacagugccggauuuguaucuga

SEQ ID NO: 131509 - RNA, 1701 nt, Artificial Sequence; identical to SEQ ID NO: 130959
  derived and/or modified CDS sequence (opt3) from hemagglutinin__InfluenzaA__ACX35317

SEQ ID NO: 131510 - RNA, 1701 nt, Artificial Sequence
  derived and/or modified CDS sequence (opt3) from hemagglutinin__InfluenzaA__ACX35327
augaaggccauccuggugguccuccuuuacaccuucgcuacagcaaacgccgacacucugugcauuggcuaucacgcgaauaacagcacggauaccguugacacaguguuggagaaaaauguaacugugacccauuccgucaacuuacuggaagauaagcacaaugggaaacuauguaagcucagaggaguggcuccccugcaucuugguaaaugcaacauagccggcuggauccuggggaauccugagugugaaucuuugucaacagcaaguagcugguccuacauuguugagaccucuucgucagacaacggaacuugcuauccaggcgauuuuaucgacuacgaggagcucagggagcagcugagcaguguguccucuuucgaacgguuugagauuuucccgaagacaagcuccuggcccaaucacgauucaaacaagggugucaccgccgcuuguccucaugcaggggccaaaaguuuuuauaagaaucugaucuggcucgugaaaaagggaaacagcuacccaaaauuaucuaaguccuauauaaaugacaagggcaaagaaguacugguucuuuggggcauccaccaccccucaacgagcgcugaucaacagaguuuguaccagaacgccgacucuuacguguucgucgggacuucccgcuauagcaagaaauuuaagccugagauugcgauccgaccaaaagugcgugaucaggagggaagaaugaauuacuauuggacccugguggaacccggugacaagauuacauucgaggcaacuggcaaccuagucguuccuagguacgccuuugcuauggaacggaacgccgggucgggaaucauaauuucugauaccccagugcaugacugcaauacaaccugucaaacgccgaaaggcgcaaucaacacuucccuccccuuccagaauauucacccuaucacaaucgguaagugcccaaaguauguaaaaucaaccaagcugcgccuugcuacugggcugagaaacgugcccaguauucagagcaggggauuguuuggcgccauagcgggcuucaucgaagggggauggacagguauggucgacggcugguacggguaucaucaccagaaugaacaaggauccggcuacgccgcagaucucaaaucuacccagaacgcuauugacgagaucacgaauaaggugaacagcguuauagagaaaaugaauacccaguuuacagccguggguaaggaguucaaccaccuggaaaagcggauugaaaauuuaaacaaaaaggucgaugacggguuccuggauaucuggacuuacaaugcugagcuccuugugcuguuggaaaacgagcgcacccuagacuaucaugauucaaauguaaagaaccuguacgagaagguucgaagucagcucaaaaacaaugccaaggaaaucggcaacggauguuuugaguucuaucacaagugcgacaauacauguauggaauccgugaaaaacggcacuuacgauuauccuaaguacagcgaggaagcaaaacugaauagagaggagauugacggggucaaacuugaaucuaccaggaucuaucaaauucuggccauauacucaacaguggcuaguagcuugguccucgugguuucccugggagcgaucucuuuuuggaugugcucgaacgguagcuuacagugccggauuuguaucuga

SEQ ID NO: 131511 - RNA, 1701 nt, Artificial Sequence
  derived and/or modified CDS sequence (opt3) from hemagglutinin__InfluenzaA__ACX36501
augaaggccauccuggugguccuccuuuacaccuucgcuacagcaaacgccgacacucugugcauuggcuaucacgcgaauaacagcacggauaccguugacacaguguuggagaaaaauguaacugugacccauuccgucaacuuacuggaagauaagcacaaugggaaacuauguaagcucagaggaguggcuccccugcaucuugguaaaugcaacauagccggcuggauccuggggaauccugagugugaaucuuugucaacagcaaguagcugguccuacauuguugagaccucuucgucagacaacggaacuugcuauccaggcgauuuuaucgacuacgaggagcucagggagcagcugagcaguguguccucuuucgaacgguuugagauuuucccgaagacaagcuccuggcccaaucacgauucaaacaagggugucaccgccgcuuguccucaugcaggggccaaaaguuuuuauaagaaucugaucuggcucgugaaaaagggaaacagcuacccaaaauuaucuaaguccuauauaaaugacaagggcaaagaaguacugguucuuuggggcauccaccaccccucaacgagcgcugaucaacagaguauuuaccagaacgccgacgcguacguguucgucgggacuucucgcuauuccaagaaauuuaagccugagaucgcaauucgaccaaaagugcgugaucaggagggaagaaugaauuacuauuggaccuugguggaacccggugacaagaucacauucgaggccacuggcaaccuggucguuccuagguacgcuuuugccauggaacggaacgcagggagcggaauaauuaucucggauaccccagugcaugacugcaauacaaccugucaaacgccgaaaggcgcuauuaacacuucucuacccuuccagaauauccacccuaucacaauugguaagugcccaaaguauguaaaauccaccaagcuccgccuggccacugggcuuagaaacgugcccucaauacagaguaggggacuguuuggcgcgaucgccggcuucauugaagggggauggacagguauggucgacggcugguacggguaucaucaccagaaugaacaaggaagcggcuacgcagcugauuugaaauccacccagaacgccaucgacgagauaacgaauaaggugaacucuguuauugagaaaaugaauacccaguuuacagcuguggguaaggaguucaaccaccucgaaaagcggaucgaaaaucugaacaaaaaggucgaugacggguucuuagauaucuggacuuacaaugccgagcugcucgugcuucuggaaaacgagcgcaccuuggacuaucaugauagcaauguuaaaaaccuauacgagaagguacgaucacagcugaaaaacaaugcaaaggaaauuggcaacggauguuuugaguucuaucacaagugcgacaauacauguauggaaagugugaaaaacggcacuuacgauuauccuaaguacuccgaggaagccaaacucaauagagaggagaucgacggggucaagcuggaaagcaccaggauuuaucaaauacuugcuaucuacucuacaguggcgucaagucuggucuuggugguuagccucggagcaauuuccuuuuggaugugcucuaacgguucgcugcagugccggaucuguaucuga

SEQ ID NO: 131512 - RNA, 1701 nt, Artificial Sequence
  derived and/or modified CDS sequence (opt3) from hemagglutinin__InfluenzaA__ACX36502
augaaggccauccuggugguccuccuuuacaccuucgcuacagcaaacgccgacacucugugcauuggcuaucacgcgaauaacagcacggauaccguugacacaauauuggagaaaaaugugacuguaacccauuccgugaacuuacuggaagauaagcacaaugggaaacuauguaagcucagaggagucgcuccccugcaucuugguaaaugcaacaucgccggcuggauucuggggaauccugagugugaaucuuugucaacagcaaguagcugguccuacaucguggagaccucuucgucagacaacggaacuugcuauccaggcgauuuuauugacuacgaggagcucagggagcagcugagcaguguuuccucuuucgaacgguuugagaucuucccgaagacaagcuccuggcccaaucacgauucaaacaagggugugaccgccgcuuguccucaugcaggggccaaaaguuuuuauaagaaucugauauggcucgucaaaaagggaaacagcuacccaaaauuaucuaaguccuauaucaaugacaagggcaaagaagugcugguacuuuggggcauucaccaccccucaacgagcgcugaucaacagaguaucuaccagaacgccgacgcguacguuuucguggggacuucucgcuauuccaagaaauuuaagccugagauugcaauccgaccaaaaguccgugaucaggagggaagaaugaauuacuauuggaccuugguggaacccggugacaagauaacauucgaggccacuggcaaccugguggucccuagguacgcuuuugccauggaacggaacgcagggagcggaauuaucauuucggauaccccaguucaugacugcaauacaaccugucaaacgccgaaaggcgcuaucaacacuucucuacccuuccagaauauccacccuauuacaauagguaagugcccaaaguaugugaaauccaccaagcuccgccuggccacugggcuuagaaacguacccucaauccagaguaggggacuguuuggcgcgauugccggcuucaucgaagggggauggacagguaugguggacggcugguacggguaucaucaccagaaugaacaaggaagcggcuacgcagcugauuugaaauccacccagaacgccauagacgagauuacgaauaaggucaacucugugaucgagaaaaugaauacccaguuuacagcuguugguaaggaguucaaccaccucgaaaagcggaucgaaaaucugaacaaaaagguggaugacggguucuuagauauuuggacuuacaaugccgagcugcucguccuucuggaaaacgagcgcaccuuggacuaucaugauagcaaugugaaaaaccuauacgagaagguacgaucacagcugaaaaacaaugcaaaggaaaucggcaacggauguuuugaguucuaucacaagugcgacaauacauguauggaaaguguuaaaaacggcacuuacgauuauccuaaguacuccgaggaagccaaacucaauagagaggagauugacggggugaagcuggaaagcaccaggauauaucaaauccuugcuauuuacucuacagucgcgucaagucugguguuggucgugagccucggagcaaucuccuuuuggaugugcucuaacgguucgcugcagugccggaucuguauuuga

SEQ ID NO: 131513 - RNA, 1701 nt, Artificial Sequence
  derived and/or modified CDS sequence (opt3) from hemagglutinin__InfluenzaA__ACX36503
augaaggccauccuggugguccuccuuuacaccuucgcuacagcaaacgccgacacucugugcauuggcuaucacgcgaauaacagcacggauaccguugacacaauauuggagaaaaaugugacuguaacccauuccgugaacuuacuggaagauaagcacaaugggaaacuauguaagcucagaggagucgcuccccugcaucuugguaaaugcaacaucgccggcuggauucuggggaauccugagugugaaucuuugucaacagcaaguagcugguccuacaucguggagaccucuucgucagacaacggaacuugcuauccaggcgauuuuauugacuacgaggagcucagggagcagcugagcaguguuuccucuuucgaacgguuugagaucuucccgaagacaagcuccuggcccaaucacgauucaaacaagggugugaccgccgcuuguccucaugcaggggccaaaaguuuuuauaagaaucugauauggcucgucaaaaagggaaacagcuacccaaaauuaucuaaguccuauaucaaugacaagggcaaagaagugcugguacuuuggggcauucaccaccccucaacgagcgcugaucaacagaguaucuaccagaacgccgacgcguacguuuucguggggacuucucgcuauuccaagaaauuuaagccugagauugcaauccgaccaaaaguccgugaucaggagggaagaaugaauuacuauuggaccuugguggaacccggugacaagauaacauucgaggccacuggcaaccugguggucccuagguacgcuuuugccauggaacggaacgcagggagcggaauuaucauuucggauaccccaguucaugacugcaauacaaccugucaaacgccgaaaggcgcuaucaacacuucucuacccuuccagaauauccacccuauuacaauagguaagugcccaaaguaugugaaauccaccaagcuccgccuggccacugggcuuagaaacguacccucaauccagaguaggggacuguuuggcgcgauugccggcuucaucgaagggggauggacagguaugguggacggcugguacggguaucaucaccagaaugaacaaggaagcggcuacgcagcugauuugaaauccacccagaacgccauagacgagauuacgaauaaggucaacucugugaucgagaaaaugaauacccaguuuacagcuguugguaaggaguucaaccaccucgaaaagcggaucgaaaaucugaacaaaaagguggaugacggguucuuagauauuuggacuuacaaugccgagcugcucguccuucuggaaaacgagcgcaccuuggacuaucaugauagcaaugugaaaaaccuauacgagaagguacgaucacagcugaaaaacaauacaaaggaaaucggcaacggauguuuugaguucuaucacaagugcgacaauacuuguauggaaaguguuaaaaacggcaccuacgauuauccuaaguacuccgaggaagcaaaacucaauagagaggagauugacggggugaagcuggaaagcacaaggauauaucaaauccuugccauuuacucuaccgucgcuucaagucugguguuggucgugagccucggagcgaucuccuuuuggaugugcucuaacgguucgcugcagugccggaucuguauuuga

SEQ ID NO: 131514 - RNA, 1701 nt, Artificial Sequence
  derived and/or modified CDS sequence (opt3) from hemagglutinin__InfluenzaA__ACX47367
augaaggccauccuggugguccuccuuuacaccuucgcuacagcaaacgccgacacucugugcauuggcuaucacgcgaauaacagcacggauaccguugacacaguguuggagaaaaauguaacugugacccauuccgucaacuuacuggaagauaagcacaaugggaaacuauguaagcucagaggaguggcuccccugcaucuugguaaaugcaacauagccggcuggauccuggggaauccugagugugaaucuuugucaacagcaaguagcugguccuacauuguugagaccucuucgucagacaacggaacuugcuauccaggcgauuuuaucgacuacgaagaacucagggagcagcugagcaguguguccucuuucgaacgguuugagauuuucccgaagacaagcuccuggcccaaucacgauccuaacaagggugucaccgccgcuuguccacaugcaggggccaaaucauuuuauaagaaucugaucuggcucgugaaaaagggaaacaguuaccccaaauuaagcaagucuuauauaaaugacaagggcaaagaaguacugguucuuuggggcauccaccacccuuccacgucagcugaucaacagagcuuguaccagaacgccgacgcguacguguucgucgggaccagucgcuauucuaagaaauuuaagccagagauugcaauccgacccaaagugcgugaucaggagggaagaaugaauuacuauuggacucuggugaagccuggugacaaaauuacauucgaagccacuggcaaccuagucguuccaagguacgcuuuugccauggagcggaacgcaggguccggaaucauaauuagcgauaccccggugcaugacugcaauacaaccugucaaacgcccaagggcgcuaucaacacuucgcucccuuuccagaauauucacccaaucacaaucgguaagugccccaaauauguaaagucuaccaaacugcgccuugccacugggcugagaaacgugccuuccauucagucaaggggauuguuuggcgcgauagccggcuucaucgaagggggauggacagguauggucgacggcugguacggguaucaucaccagaaugagcaaggaaguggcuacgcagcugaucucaagagcacccagaacgccauugacgaaaucacgaauaaagugaacuccguuauagagaagaugaauacccaguuuacagcuguggguaaggaguucaaccaccuggaaaaacggauugagaauuuaaacaagaaagucgaugacggguuccuggauaucuggacuuacaaugccgaacuccuugugcuguuggagaacgaacgcacccuagacuaucaugauucuaauguaaagaaccuguacgagaaaguucgaagccagcucaagaacaaugcaaaggagaucggcaacggauguuuugaguucuaucacaaaugcgacaauacauguauggagucagugaagaacggcacuuacgauuauccaaaauacagugaagaggccaagcugaauagagaagagauugacggggucaaacuugaguccaccaggaucuaucaaauucuggcuauauacagcacaguggcgucuucauugguccucgugguuagucugggagcaaucagcuuuuggaugugcuccaacgguucuuuacagugccggauuuguaucuga

SEQ ID NO: 131515 - RNA, 1701 nt, Artificial Sequence
  derived and/or modified CDS sequence (opt3) from hemagglutinin__InfluenzaA__ACX47368
augaaggccauccuggugguccuccuuuacaccuucgcuacagcaaacgccgacacucugugcauuggcuaucacgcgaauaacagcacggauaccguugacacaguguuggagaaaaauguaacugugacccauuccgucaacuuacuggaagauaagcacaaugggaaacuauguaagcucagaggaguggcuccccugcaucuugguaaaugcaacauagccggcuggauccuggggaauccugagugugaaucuuugucaacagcaaguagcugguccuacauuguugagaccucuucgucagacaacggaacuugcuauccaggcgauuuuaucgacuacgaggagcucagggagcagcugagcaguguguccucuuucgaacgguuugagauuuucccgaagacaagcuccuggcccaaucacgauccuaacaagggugucaccgccgcuuguccacaugcaggggccaaaucauuuuauaagaaucugaucuggcucgugaaaaagggaaacaguuaccccaaauuaagcaagucuuauauaaaugacaagggcaaagaaguacugguucuuuggggcauccaccacccuuccacgucagcugaucaacagagcuuguaccagaacgccgacgcguacguguucgucgggaccagucgcuauucuaagaaauuuaagccagagauugcaauccgacccaaagugcgugaucaggagggaagaaugaauuacuauuggacucugguggaaccuggugacaagauuacauucgaggccacuggcaaccuagucguuccaagguacgcuuuugccauggaacggaacgcaggguccggaaucauaauuagcgauaccccggugcaugacugcaauacaaccugucaaacgcccaaaggcgcuaucaacacuucgcucccuuuccagaauauucacccaaucacaaucgguaagugccccaaguauguaaaaucuaccaagcugcgccuugccacugggcugagaaacgugccuuccauucagucaaggggauuguuuggcgcgauagccggcuucaucgaagggggauggacagguauggucgacggcugguacggguaucaucaccagaaugaacaaggaaguggcuacgcagcugaucucaaaagcacccagaacgccauugacgagaucacgaauaaggugaacuccguuauagagaaaaugaauacccaguuuacagcuguggguaaggaguucaaccaccuggaaaagcggauugaaaauuuaaacaaaaaggucgaugacggguuccuggauaucuggacuuacaaugccgagcuccuugugcuguuggaaaacgagcgcacccuagacuaucaugauucuaauguaaagaaccuguacgagaagguucgaagccagcucaaaaacaaugcaaaggaaaucggcaacggauguuuugaguucuaucacaagugcgacaauacauguauggaaucagugaaaaacggcacuuacgauuauccaaaguacagugaggaagccaaacugaauagagaggagauugacggggucaaacuugaauccaccaggaucuaucaaauucuggcuauauacagcacaguggcgucuucauugguccucgugguuagucugggagcaaucagcuuuuggaugugcuccaacgguucuuuacagugccggauuuguaucuga

SEQ ID NO: 131516 - RNA, 1701 nt, Artificial Sequence; identical to SEQ ID NO: 131515
  derived and/or modified CDS sequence (opt3) from hemagglutinin__InfluenzaA__ACX47369

SEQ ID NO: 131517 - RNA, 1701 nt, Artificial Sequence
  derived and/or modified CDS sequence (opt3) from hemagglutinin__InfluenzaA__ACX47370
augaaggccauccuggugguccuccuuuacaccuucgcuacagcaaacgccgacacucugugcauuggcuaucacgcgaauaacagcacggauaccguugacacaguguuggagaaaaauguaacugugacccauuccgucaacuuacuggaagauaagcacaaugggaaacuauguaagcucagaggaguggcuccccugcaucuugguaaaugcaacauagccggcuggauccuggggaauccugagugugaaucuuugucaacagcaaguagcugguccuacauuguugagaccucuucgucagacaacggaacuugcuauccaggcgauuuuaucgacuacgaggagcucagggagcagcugagcaguguguccucuuucgaacgguuugagauuuucccgaagacaagcuccuggcccaaucacgauccuaacaagggugucaccgccgcuuguccacaugcaggggccaaaucauuuuauaagaaucugaucuggcucgugaaaaagggaaacaguuaccccaaauuaagcaagucuuauauaaaugacaagggcaaagaaguacugguucuuuggggcauccaccacccuuccacgucagcugaucgccaaaguuuguaccagaacgccgacgcguacguguucgucgggacuagccgauauucuaagaaauuuaagccagagauugcaauccgucccaaagugagagaucaggagggaaggaugaauuacuauuggacccugguggaaccuggugacaagauuacauucgaggccacuggcaaccuagucguuccacgguacgcuuuugccauggaacgcaacgcaggguccggaaucauaauuagcgauaccccggugcaugacugcaauacaaccugucagacgcccaaaggcgcuaucaacacuucgcucccuuuccaaaauauucacccaaucacaaucgguaagugccccaaguauguaaaaucuaccaagcugagacuugccacugggcugaggaacgugccuuccauucagucacggggauuguuuggcgcgauagccggcuucaucgaagggggauggacagguauggucgacggcugguacggguaucaucaccagaaugaacagggaaguggcuacgcagcugaucucaaaagcacccaaaacgccauugacgagaucacgaauaaggugaacuccguuauagagaaaaugaauacccaguuuacagcuguggguaaggaguucaaccaccuggaaaagcgcauugaaaauuuaaacaaaaaggucgaugacggguuccuggauaucuggacuuacaaugccgagcuccuugugcuguuggaaaacgagcgaacccuagacuaucaugauucuaauguaaagaaccuguacgagaagguuagaagccagcucaaaaacaaugcaaaggaaaucggcaacggauguuuugaguucuaucacaagugcgacaauacauguauggaaucagugaaaaacggcacuuacgauuauccaaaguacagugaggaagccaaacugaauagggaggagauugacggggucaaacuugaauccacccggaucuaucagauucuggcuauauacagcacaguggcgucuucauugguccucgugguuagucugggagcaaucagcuuuuggaugugcuccaacgguucuuuacaaugccguauuuguaucuga

SEQ ID NO: 131518 - RNA, 1701 nt, Artificial Sequence; identical to SEQ ID NO: 131515
  derived and/or modified CDS sequence (opt3) from hemagglutinin__InfluenzaA__ACX47371

SEQ ID NO: 131519 - RNA, 1701 nt, Artificial Sequence; identical to SEQ ID NO: 131515
  derived and/or modified CDS sequence (opt3) from hemagglutinin__InfluenzaA__ACX47372

SEQ ID NO: 131520 - RNA, 1701 nt, Artificial Sequence; identical to SEQ ID NO: 131515
  derived and/or modified CDS sequence (opt3) from hemagglutinin__InfluenzaA__ACX47373

SEQ ID NO: 131521 - RNA, 1701 nt, Artificial Sequence; identical to SEQ ID NO: 131515
  derived and/or modified CDS sequence (opt3) from hemagglutinin__InfluenzaA__ACX47374

SEQ ID NO: 131522 - RNA, 1701 nt, Artificial Sequence
  derived and/or modified CDS sequence (opt3) from hemagglutinin__InfluenzaA__ACX47375
augaaggccauccuggugguccuccuuuacaccuucgcuacagcaaacgccgacacucugugcauuggcuaucacgcgaauaacagcacggauaccguugacacaguguuggagaaaaauguaacugugacccauuccgucaacuuacuggaagauaagcacaaugggaaacuauguaagcucagaggaguggcuccccugcaucuugguaaaugcaacauagccggcuggauccuggggaauccugagugugaaucuuugucaacagcaaguagcugguccuacauuguugagaccucuucgucagacaacggaacuugcuauccaggcgauuuuaucgacuacgaggagcucagggagcagcugagcaguguguccucuuucgaacgguuugagauuuucccgaagacaagcuccuggcccaaucacgauccuaacaagggugucaccgccgcuuguccacaugcaggggccaaaucauuuuauaagaaucugaucuggcucgugaaaaagggaaacaguuaccccaaauuaagcaagucuuauauaaaugacaagggcaaagaaguacugguucuuuggggcauccaccacccuuccacgucagcugaucaacagagcuuguaccagaacgccgacgcguacguguucgucgggacuucccgcuauucuaagaaauuuaagccagagauugcaauccgacccaaagugcgugaucaggagggaagaaugaauuacuauuggacccugguggaaccuggugacaagauuacauucgaggccacuggcaaccuagucguuccaagguacgcuuuugccauggaacggaacgcaggguccggaaucauaauuagcgauaccccggugcaugacugcaauacaaccugucaaacgcccaacggcgcuaucaauacuucgcucccuuuccagaacauucacccaaucacaaucgguaaaugccccaaguauguaaagucuaccaaacugcgccuugccacugggcugagaaaugugccuuccauucagucaaggggauuguuuggcgcgauagccggcuucaucgaagggggauggacagguauggucgacggcugguacggguaucaucaccagaacgaacaaggaaguggcuacgcagcugaucucaagagcacccagaaugccauugacgagaucacgaacaaagugaauaguguuauagagaagaugaacacccaguuuacagcuguggguaaagaguucaaucaccuggaaaagcggauugaaaacuuaaauaagaaagucgaugacggguuccuggauaucuggacuuacaacgccgagcuccuugugcuguuggaaaaugagcgcacccuagacuaucaugauucuaacguaaagaaccuguacgagaaaguucgaagccagcucaagaauaacgcaaaagaaaucggcaauggauguuuugaguucuaucacaagugcgacaacacauguauggaaucagugaagaauggcacuuacgauuauccaaaauacagugaggaagccaagcugaacagagaggagauugacggggucaaacuugaauccaccaggaucuaucaaauucuggcuauauacagcacaguggcgucuucauugguccucgugguuagucugggagcaaucagcuuuuggaugugcuccaaugguucuuuacagugccggauuuguaucuga

SEQ ID NO: 131523 - RNA, 1701 nt, Artificial Sequence; identical to SEQ ID NO: 131515
  derived and/or modified CDS sequence (opt3) from hemagglutinin__InfluenzaA__ACX47376

SEQ ID NO: 131524 - RNA, 1701 nt, Artificial Sequence; identical to SEQ ID NO: 131515
  derived and/or modified CDS sequence (opt3) from hemagglutinin__InfluenzaA__ACX47377

SEQ ID NO: 131525 - RNA, 1701 nt, Artificial Sequence
  derived and/or modified CDS sequence (opt3) from hemagglutinin__InfluenzaA__ACX47380
augaaggccauccuggugguccuccuuuacaccuucgcuacagcaaacgccgacacucugugcauuggcuaucacgcgaauaacagcacggauaccguugacacaguguuggagaagaauguaacugugacccauuccgucaacuuacuggaagauaagcacaaugggaaacuauguaagcucagaggaguggcuccccugcaucuugguaaaugcaacauagccggcuggauccuggggaauccugagugugaaucuuugucaacaaccaguagcugguccuacauuguugagacuucuucgucagacaacggaacaugcuauccaggcgauuuuaucgacuacgaggagcucagggagcagcugagcaguguguccucuuucgaacgguuugagauuuucccgaagaccagcuccuggcccaaucacgauucaaacaagggugucacggcagccuguccucaugcuggggcaaaaaguuuuuauaagaaucugaucuggcucgugaaaaagggaaacagcuacccaaaauuaucuaaguccuauauaaaugacaagggcaaagaaguacugguucuuuggggcauccaccaccccucaacuagcgccgaucaacagaguuuguaccagaacgcugacgccuacguguucgucgggaccucucgcuauuccaagaaauuuaagccugagauugcgauccgaccaaaagugcgugaucaggagggaagaaugaauuacuauuggacacugguggaacccggugacaagauuacuuucgaggcaaccggcaaccuagucguuccuagguacgccuuugugauggaacggaacgcugggagcggaaucauaauuucggauacaccaguacaugacugcaauaccacgugucaaacuccgaaaggcgccaucaacacaucucuccccuuccagaauauucacccuaucaccaucgguaagugcccaaaguaugugaaauccacuaagcugcgccuugcaacagggcugagaaacguccccucaauucagaguaggggauuguuuggcgcuauagccggcuucaucgaagggggauggaccgguaugguggacggcugguacggguaucaucaccagaaugaacaaggaagcggcuacgcggccgaucucaaauccacgcagaacgcaauugacgagaucaccaauaagguuaacucugugauagagaaaaugaauacacaguuuacugcugucgguaaggaguucaaccaccuggaaaagcggauugaaaauuuaaacaaaaagguggaugacggguuccuggauaucuggaccuacaaugccgagcuccuuguacuguuggaaaacgagcgcacacuagacuaucaugauagcaauguuaaaaaccuguacgagaaggugcgaucacagcucaaaaacaaugcuaaggaaaucggcaacggauguuuugaguucuaucacaagugcgacaauacuuguauggaaagugucaaaaacggcaccuacgauuauccuaaguacuccgaggaagccaaacugaauagagaggagauugacggggugaaacuugaaagcacaaggaucuaucaaauucuggcaauauacucuaccgucgccucaaguuuggugcucguugugagccugggagcuaucuccuuuuggaugugcucuaacgguucguuacagugccggauuuguaucuga

SEQ ID NO: 131526 - RNA, 1701 nt, Artificial Sequence; identical to SEQ ID NO: 131525
  derived and/or modified CDS sequence (opt3) from hemagglutinin__InfluenzaA__ACX47381

SEQ ID NO: 131527 - RNA, 1701 nt, Artificial Sequence; identical to SEQ ID NO: 131525
  derived and/or modified CDS sequence (opt3) from hemagglutinin__InfluenzaA__ACX47382

SEQ ID NO: 131528 - RNA, 1701 nt, Artificial Sequence
  derived and/or modified CDS sequence (opt3) from hemagglutinin__InfluenzaA__ACX47383
augaaggccauccuggugguccuccuuuacaccuucgcuacagcaaacgccgacacucugugcauuggcuaucacgcgaauaacagcacggauaccguugacacaguguuggagaaaaauguaacugugacccauuccgucaacuuacuggaagauaagcacaaugggaaacuauguaagcucagaggaguggcuccccugcaucuugguaaaugcaacauagccggcuggauccuggggaauccugagugugaaucuuugucaacaaccaguagcugguccuacauuguugagacuucuucgucagacaacggaacaugcuauccaggcgauuuuaucgacuacgaggagcucagggagcagcugagcaguguguccucuuucgaacgguuugagauuuucccgaagaccagcuccuggcccaaucacgauucaaacaagggugucacggcagccuguccucaugcuggggcaaaaaguuuuuauaagaaucugaucuggcucgugaaaaagggaaacagcuacccaaaauuaucuaaguccuauauaaaugacaagggcaaagaaguacugguucuuuggggcauccaccaccccucaacuagcgccgaucaacagaguuuguaccagaacgcugacgccuacguguucgucgggaccucucgcuauuccaagaaauuuaagccugagauugcgauccgaccaaaagugcgugaucaggagggaagaaugaauuacuauuggacacugguggaacccggugacaagauuacuuucgaggcaaccggcaaccuagucguuccuagguacgccuuugcuauggaacggaacgccgggagcggaaucauaauuucggauacaccagugcaugacugcaauaccacgugucaaacuccgaaaggcgcaaucaacacaucucuccccuuccagaauauucacccuaucaccaucgguaagugcccaaaguauguaaaauccacuaagcugcgccuugcuacagggcugagaaacgugcccucaauucagaguaggggauuguuuggcgccauagcgggcuucaucgaagggggauggaccgguauggucgacggcugguacggguaucaucaccagaaugaacaaggaagcggcuacgccgcagaucucaaauccacgcagaacgcuauugacgagaucaccaauaaggugaacucuguuauagagaaaaugaauacacaguuuacugccguggguaaggaguucaaccaccuggaaaagcggauugaaaauuuaaacaaaaaggucgaugacggguuccuggauaucuggaccuacaaugcugagcuccuugugcuguuggaaaacgagcgcacacuagacuaucaugauagcaauguuaaaaaccuguacgagaagguacgaucacagcucaaaaacaaugccaaggaaaucggcaacggauguuuugaguucuaucacaagugcgacaauacuuguauggaaagugugaaaaacggcaccuacgauuauccuaaguacuccgaggaagcaaaacugaauagagagaagauugacggggucaaacuugagagcacaaggaucuaucaaauucuggccauauacucuaccguggcuucaaguuugguccucgugguuagccugggagcgaucuccuuuuggaugugcucuaacgguucguuacagugccggauuuguaucuga

SEQ ID NO: 131529 - RNA, 1701 nt, Artificial Sequence
  derived and/or modified CDS sequence (opt3) from hemagglutinin__InfluenzaA__ACX47384
augaaggccauccuggugguccuccuuuacaccuucgcuacagcaaacgccgacacucugugcauuggcuaucacgcgaauaacagcacggauaccguugacacaguguuggagaaaaauguaacugugacccauuccgucaacuuacuggaagauaagcacaaugggaaacuauguaagcucagaggaguggcuccccugcaucuugguaaaugcaacauagccggcuggauccuggggaauccugagugugaaucuuugucaacaaccaguagcugguccuacauuguugagacuucuucgucagacaacggaacaugcuauccaggcgauuuuaucgacuacgaggagcucagggagcagcugagcaguguguccucuuucgaacgguuugagauuuucccgaagaccagcuccuggcccaaucacgauucaaacaagggugucacggcagccuguccucaugcuggggcaaaaaguuuuuauaagaaucugaucuggcucgugaaaaagggaaacagcuacccaaaauuaucuaaguccuauauaaaugacaagggcaaagaaguacugguucuuuggggcauccaccaccccucaacuagcgccgaucaacagaguuuguaccagaacgcugacgccuacguguucgucgggaccucucgcuauuccaagaaauuuaagccugagauugcgauccgaccaaaagugcgugaucaggagggaagaaugaauuacuauuggacacugguggaacccggugacaagauuacuuucgaggcaaccggcaaccuagucguuccuagguacgccuuugcuauggaacggaacgccgggagcggaaucauaauuucggauacaccagugcaugacugcaauaccacgugucaaacuccgaaaggcgcaaucaacacaucucuccccuuccagaauauucacccuaucaccaucgguaagugcccaaaguauguaaaauccacuaagcugcgccuugcuacagggcugagaaacgugcccucaauucagaguaggggauuguuuggcgccauagcgggcuucaucgaagggggauggaccgguauggucgacggcugguacggguaucaucaccagaaugaacaaggaagcggcuacgccgcagaucucaaauccacgcagaacgcuauugacgagaucaccaauaaggugaacucuguuauagagaaaaugaauacacaguuuacugccguggguaaggaguucaaccaccuggaaaagcggauugaaaauuuaaacaaaaaggucgaugacggguuccuggauaucuggaccuacaaugcugagcuccuugugcuguuggaaaacgagcgcacacuagacuaucaugauagcaauguaaagaaccuguacgagaagguucgaucacagcucaaaaacaaugccaaggaaaucggcaacggauguuuugaguucuaucacaagugcgacaauacuuguauggaaagugugaaaaacggcaccuacgauuauccuaaguacuccgaggaagcaaaacugaauagagaggagauugacggggucaaacuugaaagcacaaggaucuaucaaauucuggccauauacucuaccguggcuucaaguuugguccucgugguuagccugggagcgaucuccuuuuggaugugcucuaacgguucguuacagugccggauuuguaucuga

SEQ ID NO: 131530 - RNA, 1701 nt, Artificial Sequence; identical to SEQ ID NO: 131529
  derived and/or modified CDS sequence (opt3) from hemagglutinin__InfluenzaA__ACX47385

SEQ ID NO: 131531 - RNA, 1701 nt, Artificial Sequence; identical to SEQ ID NO: 131529
  derived and/or modified CDS sequence (opt3) from hemagglutinin__InfluenzaA__ACX47387

SEQ ID NO: 131532 - RNA, 1701 nt, Artificial Sequence; identical to SEQ ID NO: 130717
  derived and/or modified CDS sequence (opt3) from hemagglutinin__InfluenzaA__ACX55834

SEQ ID NO: 131533 - RNA, 1701 nt, Artificial Sequence; identical to SEQ ID NO: 131515
  derived and/or modified CDS sequence (opt3) from hemagglutinin__InfluenzaA__ACX61574

SEQ ID NO: 131534 - RNA, 1701 nt, Artificial Sequence; identical to SEQ ID NO: 130717
  derived and/or modified CDS sequence (opt3) from hemagglutinin__InfluenzaA__ACX61575

SEQ ID NO: 131535 - RNA, 1701 nt, Artificial Sequence
  derived and/or modified CDS sequence (opt3) from hemagglutinin__InfluenzaA__ACX83577
augaaggccauccuggugguccuccuuuacaccuucgcuacagcaaacgccgacacucugugcauuggcuaucacgcgaauaacagcacggauaccguugacacaguguuggagaaaaauguaacugugacccauuccgucaacuuacuggaagauaagcacaaugggaaacuauguaagcucagaggaguggcuccccugcaucuugguaaaugcaacauagccggcuggauccuggggaauccugagugugaaucuuuuucaacaaguagcuccuggucuuacauuguugagaccucgucaagcgacaacggaacuugcuauccaggcgauuucaucgacuacgaagaguugagggagcagcucaguuccgugucuagcuuugaacgguucgagauuuuuccgaagacauccucauggcccaaucacgauaguaacaagggugucaccgcagccuguccucaugcuggggcaaagagcuucuauaaaaaucugaucuggcuggugaaaaagggaaacucuuacccaaaacucuccaagucauauauaaaugacaagggcaaagaaguauuaguucuguggggcauccaccaccccagcacgagugccgaucaacagucucuuuaccagaacgcugacgccuacguguuugucgggacuucccgcuauagcaagaaauucaagccugagauugcgauccgaccaaaagugcguggacaggaggguagaaugaauuacuauuggaccuugguggaacccggcgauaagauuacauuugaggcaacugggaaccuggucguuccuagguacgccuucgcuauggaacggaacgccggaucgggcaucauaauuucugacaccccagugcaugauugcaauacaaccugucaaacgccgaaaggugcaaucaacacuucccuacccuuucagaauauucacccuaucacaaucgggaagugcccaaaguauguaaaaucaaccaagcuccgccuggcuacuggacuuagaaacgugcccaguauucagagcaggggccuguucggcgccauagcgggguuuaucgagggagguuggacaggcauggucgacgggugguacggauaucaucaccagaaugaacaaggcuccgguuacgccgcagacuugaaaucuacccagaacgcuauugaugagaucacgaauaaggugaacagcguuauagagaaaaugaauacccaguucacagccguggggaaggaguucaaccaccucgaaaagcggauugaaaaucugaacaaaaaggucgacgauggcuuuuuagacaucuggacuuacaaugcugagcugcucgugcuucuggaaaacgagcgcaccuuggauuaucaugacucaaauguuaaaaaccuauacgagaagguacgaagucagcugaaaaacaaugccaaggaaaucggaaacggcuguuucgaguuuuaucacaagugcgauaauacauguauggaauccgugaaaaacgggacuuacgacuauccuaaguacagcgaggaagcaaaacucaauagagaggagauugauggagucaagcuggaaucuaccaggaucuaucaaauucuugccauauacucaacaguggcuaguagccuggucuuggugguuucccucggugcgaucucuuucuggaugugcucgaacggcagccugcagugccggauuuguaucuga

SEQ ID NO: 131536 - RNA, 1701 nt, Artificial Sequence
  derived and/or modified CDS sequence (opt3) from hemagglutinin__InfluenzaA__ACX94091
augaaggccauccuggugguccuccuuuacaccuucgcuacagcaaacgccgacacucugugcauuggcuaucacgcgaauaacagcacggauaccguugacacaguguuggagaaaaauguaacugugacccauuccgucaacuuacuggaagauaagcacaaugggaaacuauguaagcucagaggaguggcuccccugcaucuugguaaaugcaacauagccggcuggauccuggggaauccugagugugaaucuuugucaacagcaaguagcugguccuacauuguugagaccucuucgucagacaacggaacuugcuauccaggcgauuuuaucgacuacgaggagcucagggagcagcugagcaguguguccucuuucgaacgguuugagauuuucccgaagacaaucagcuggcccaaucacgauuccaacaagggugucaccgccgcuuguccucaugcaggggccaaaucauuuuauaagaaucugauauggcucgugaaaaagggaaacaguuacccaaaauuaagcaagucuuauaucaaugacaagggcaaagaaguacugguucuuuggggcauucaccaccccuccacgucagcugaucaacagagcuuguaccagaacgccgacgcguacguguucgucgggaccagucgcuauucuaagaaauuuaagccugagaucgcaauucgaccaaaagugcgugaucaggagggaagaaugaauuacuauuggacucugguggaacccggugacaagaucacauucgaggccacuggcaaccuagucguuccuagguacgcuuuugccauggaacggaacgcaggguccggaauaauuaucagcgauaccccagugcaugacugcaauacaaccugucaaacgccgaaaggcgcuauuaacacuucgcuccccuuccagaauauccacccuaucacaauugguaagugcucuaaguauguaaaauccaccaagcugcgccuugccacugggcugagaaacgugccaucaauacagaguaggggauuguuuggcgcgaucgccggcuucauugaagggggauggacagguauggucgacggcugguacggguaucaucaccagaaugaacaaggaagcggcuacgcagcugaucucaaauccacccagaacgccaucgacgagauaacgaauaaggugaacucuguuauugagaaaaugaauacccaguuuacagcuguggguaaggaguucaaccaccuggaaaagcggaucgaaaauuuaaacaaaaaggucgaugacggguuccuggauaucuggacuuacaaugccgagcuccuugugcuguuggaaaacgagcgcacccuagacuaucaugauagcaauguaaagaaccuguacgagaagguucgaucacagcucaaaaacaaugcaaaggaaauuggcaacggauguuuugaguucuaucacaagugcgacaauacauguauggaaagugugaaaaacggcacuuacgauuaucccaaguacuccgaggaagccaaacugaauagagaggagaucgacggggucaaacuugaaagcaccaggauuuaucaaauacuggcuaucuacucuacaguggcgucaaguuugguccucgugguuagccugggagcaauuuccuuuuggaugugcucuaacgguucguuacagugccggaucuguaucuga

SEQ ID NO: 131537 - RNA, 1701 nt, Artificial Sequence
  derived and/or modified CDS sequence (opt3) from hemagglutinin__InfluenzaA__ACY26192
augaaggccauccuggugguccuccuuuacaccuucgcuacagcaaacgccgacacucugugcauuggcuaucacgcgaauaacagcacggauaccguugacacaguguuggagaaaaauguaacugugacccauuccgucaacuuacuggaagauaagcacaaugggaaacuauguaagcucagaggaguggcuccccugcaucuugguaaaugcaacauagccggcuggauccuggggaauccugagugugaaucuuugucaacagcaaguagcugguccuacauuguugagaccucuucgucagacaacggaacuugcuauccaggcgauuuuaucgacuacgaggagcucagggagcagcugagcaguguguccucuuucgaacgguuugagauuuucccgaagacaagcuccuggcccaaucacgauucaaacaagggugucaccgccgcuuguccucaugcaggggccaaaaguuuuuauaagaaucugaucuggcucgugaaaaagggaaacagcuacccaaaauuaucuaaguccuauauaaaugacaagggcaaagaaguacugguucuuuggggcauccaccaccccucaacgagcgcugaucaacagaguuuguaccagaacgccgacgcguacguguucgucgggacuucucgcuauuccaagaaauuuaagccugagauugcaauccgaccaaaagugcgugaucaggagggaagaaugaauuacuauuggacccugguggaacccggugacaagauuacauucgaggccacuggcaaccuagucguuccuagguacgcuuuugccauggaacggaacgcagggagcggaaucauaauuucggauaccccagugcauaauugcaacacaaccugucaaacgccgaaaggcgcuaucaauacuucucuccccuuccagaacauucacccuaucacaaucgguaagugcccaaaguauguaaaauccaccaagcugcgccuugccacugggcugagaaaugugcccucaauucagaguaggggauuguuuggcgcgauagccggcuucaucgaagggggauggacagguauggucgacggcugguacggguaucaucaccagaacgaacaaggaagcggcuacgcagcugaccucaaauccacccaggaugccauugacgagaucacgaauaaggugaacucuguuauagagaaaaugaauacccaguuuacagcuguggguaaggaguucaaccaccuggaaaagcggauugaaaauuuaaacaaaaaggucgaugacggguuccuggauaucuggacuuacaaugccgagcuccuugugcuguuggaaaacgagcgcacccuagacuaucaugauagcaauguaaagaaccuguacgagaagguucgaucacagcucaaaaacaaugcaaaggaaaucggcaacggauguuuugaguucuaucacaagugcgacaauacauguauggaaagugugaaaaacggcacuuacgauuauccuaaguacuccgaggaagccaaacugaauagagaggagauugacggggucaaacuugaaagcaccaggaucuaucaaauucuggcuauauacucuacaguggcgucaaguuugguccucgugguuagccugggagcaaucuccuuuuggaugugcucuaacgguucguuacagugccggauuuguaucuga

SEQ ID NO: 131538 - RNA, 1701 nt, Artificial Sequence; identical to SEQ ID NO: 131286
  derived and/or modified CDS sequence (opt3) from hemagglutinin__InfluenzaA__ACY26202

SEQ ID NO: 131539 - RNA, 1701 nt, Artificial Sequence; identical to SEQ ID NO: 130717
  derived and/or modified CDS sequence (opt3) from hemagglutinin__InfluenzaA__ACY46103

SEQ ID NO: 131540 - RNA, 1701 nt, Artificial Sequence; identical to SEQ ID NO: 130717
  derived and/or modified CDS sequence (opt3) from hemagglutinin__InfluenzaA__ACY46113

SEQ ID NO: 131541 - RNA, 1701 nt, Artificial Sequence
  derived and/or modified CDS sequence (opt3) from hemagglutinin__InfluenzaA__ACY46123
augaaggccauccuggugguccuccuuuacaccuucgcuacagcaaacgccgacacucugugcauuggcuaucacgcgaauaacagcacggauaccguugacacaguguuggagaaaaauguaacugugacccauuccgucaacuuacuggaagauaagcacaaugggaaacuauguaagcucagaggaguggcuccccugcaucuugguaaaugcaacauagccggcuggauccuggggaauccugagugugaaucuuugucaacagcaaguagcugguccuacauuguugagaccucuucgucagacaacggaacuugcuauccaggcgauuuuaucgacuacgaagaacucagggagcagcugagcaguguguccucuuucgaacgguuugagauuuucccgaagacaagcuccuggcccaaucacgauucaaacaagggugucaccgccgcuuguccucaugcaggggccaaaaguuuuuauaagaaucugaucuggcucgugaaaaagggaaacagcuacccaaaauuaucuaaguccuauauaaaugacaagggcaaagaaguacugguucuuuggggcauccaccaccccucaacgagcgcugaucaacagaguuuguaccagaacgccgacgcguacguguucgucgggacuucucgcuauuccaagaaauuuaagccugagauugcaauccgaccaaaagugggagaucaggagggucguaugaauuacuauuggacccugguggaacccggcgacaagauuacauucgaggccacugggaaccuagucguuccuagauacgcuuuugccauggaaaggaacgcaggaagcggcaucauaauuucggauaccccagugcaugacugcaauacaaccugucaaacgccgaaaggugcuaucaacacuucucuccccuuccagaauauucacccuaucacaaucgggaagugcccaaaguauguaaaauccaccaagcugcggcuugccacuggacugcgcaacgugcccucaauucagaguagaggcuuguuuggcgcgauagccggguucaucgagggagguuggacaggcauggucgacgggugguacggauaucaucaccagaaugaacaaggcagcgguuacgcagcugaucucaaauccacccagaacgccauugacgagaucacgaauaaggugaacucuguuauagagaaaaugaauacccaguuuacagcuguggggaaggaguucaaccaccuggagaagaggauugaaaauuuaaacaaaaaggucgaugacggcuuccuggauaucuggacuuacaaugccgagcuccuugugcuguuggaaaacgagcggacccuagacuaucaugauagcaauguaaagaaccuguacgagaagguucgcucacagcucaaaaacaaugcaaaggaaaucggaaacggcuguuuugaguucuaucacaagugcgacaauacauguauggaaagugugaaaaacgggacuuacgauuauccuaaguacuccgaggaagccaaacugaaucgagaggagauugacggagucaaacuugaaagcaccagaaucuaucaaauucuggcuauauacucuacaguggcgucaaguuugguccucgugguuagccugggugcaaucuccuuuuggaugugcucuaacggcucguuacagugcaggauuuguaucuga

SEQ ID NO: 131542 - RNA, 1701 nt, Artificial Sequence; identical to SEQ ID NO: 130717
  derived and/or modified CDS sequence (opt3) from hemagglutinin__InfluenzaA__ACY46133

SEQ ID NO: 131543 - RNA, 1701 nt, Artificial Sequence; identical to SEQ ID NO: 130717
  derived and/or modified CDS sequence (opt3) from hemagglutinin__InfluenzaA__ACY46163

SEQ ID NO: 131544 - RNA, 1701 nt, Artificial Sequence
  derived and/or modified CDS sequence (opt3) from hemagglutinin__InfluenzaA__ACY46173
augaaggccauccuggugguccuccuuuacaccuucgcuacagcaaacgccgacacucugugcauuggcuaucacgcgaauaacagcacggauaccguugacacaguguuggagaaaaauguaacugugacccauuccgucaacuuacuggaagauaagcacaaugggaaacuauguaagcucagaggaguggcuccccugcaucuugguaaaugcaacauagccggcuggauccuggggaauccugagugugaaucuuugucaacagcaaguagcugguccuacauuguugagaccucuucgucagacaacggaacuugcuauccaggcgauuuuaucgacuacgaggagcucagggagcagcugagcaguguguccucuuucgaacgguuugagauuuucccgaagacaagcuccuggcccaaucacgauucaaacaagggugucaccgccgcuuguccucaugcaggggccaaaaguuuuuauaagaaucugaucuggcucgugaaaaagggaaacagcuacccaaaauuaucuaaguccuauauaaaugacaagggcaaagaaguacugguucuuuggggcauccaccaccccucaacgagcgcugaucaacagaguuuguaccagaacgccgacgcguacguguucgucgggucuuccaaguauagcaaaaaguuuaaaccugagauugcaauccgcccaaaggugcgagaucaggagggacguaugaauuacuauuggacucugguggaacccggugacaaaauuaccuucgaggccacaggcaaccuagucguuccuagauacgcuuuugccauggaaaggaacgcagggucgggaaucauaauuucugauacuccagugcaugacugcaauaccacaugucaaaccccgaagggcgcuaucaacacgucccuccccuuccagaauauucacccuaucacuaucgguaagugcccaaaauauguaaagucaacaaaacugcggcuugccaccgggcugcgcaacgugcccaguauucagagcagaggauuguuuggcgcgauagccggcuucaucgaagggggauggacugguauggucgacggcugguacggguaucaucaccagaaugaacaaggauccggcuacgcagcugaucucaagucuacacagaacgccauugacgagaucaccaauaaagugaacagcguuauagagaagaugaauacgcaguuuaccgcuguggguaaggaauuuaaccaccuggagaaaaggauugaaaauuuaaacaagaaagucgaugacggguuccuggauaucuggacauacaaugccgagcuccuugugcuguuggaaaacgagcggacucuagacuaucaugauucaaauguaaagaaccuguacgagaaaguucgcagucagcucaagaacaaugcaaaggaaaucggcaacggauguuucgaguucuaucacaaaugcgacaauaccuguauggaauccgugaagaacggcacauacgauuauccuaaauacagcgaggaagccaagcugaaucgagaggagauugacggggucaaacuugaaucuacuagaaucuaucaaauucuggcuauauacucaaccguggcgaguagcuugguccucgugguuucccugggagcaaucucuuuuuggaugugcucgaacgguagcuuacagugcaggauuuguaucuga

SEQ ID NO: 131545 - RNA, 1701 nt, Artificial Sequence; identical to SEQ ID NO: 130717
  derived and/or modified CDS sequence (opt3) from hemagglutinin__InfluenzaA__ACY46213

SEQ ID NO: 131546 - RNA, 1701 nt, Artificial Sequence; identical to SEQ ID NO: 130717
  derived and/or modified CDS sequence (opt3) from hemagglutinin__InfluenzaA__ACY46223

SEQ ID NO: 131547 - RNA, 1701 nt, Artificial Sequence; identical to SEQ ID NO: 130717
  derived and/or modified CDS sequence (opt3) from hemagglutinin__InfluenzaA__ACY46233

SEQ ID NO: 131548 - RNA, 1701 nt, Artificial Sequence; identical to SEQ ID NO: 130717
  derived and/or modified CDS sequence (opt3) from hemagglutinin__InfluenzaA__ACY46243

SEQ ID NO: 131549 - RNA, 1701 nt, Artificial Sequence; identical to SEQ ID NO: 130717
  derived and/or modified CDS sequence (opt3) from hemagglutinin__InfluenzaA__ACY46253

SEQ ID NO: 131550 - RNA, 1701 nt, Artificial Sequence; identical to SEQ ID NO: 130717
  derived and/or modified CDS sequence (opt3) from hemagglutinin__InfluenzaA__ACY46263

SEQ ID NO: 131551 - RNA, 1701 nt, Artificial Sequence; identical to SEQ ID NO: 130717
  derived and/or modified CDS sequence (opt3) from hemagglutinin__InfluenzaA__ACY46273

SEQ ID NO: 131552 - RNA, 1701 nt, Artificial Sequence; identical to SEQ ID NO: 130717
  derived and/or modified CDS sequence (opt3) from hemagglutinin__InfluenzaA__ACY46283

SEQ ID NO: 131553 - RNA, 1701 nt, Artificial Sequence
  derived and/or modified CDS sequence (opt3) from hemagglutinin__InfluenzaA__ACY46293
augaaggccauccuggugguccuccuuuacaccuucgcuacagcaaacgccgacacucugugcauuggcuaucacgcgaauaacagcacggauaccguugacacaguguuggagaaaaauguaacugugacccauuccgucaacuuacuggaagauaagcacaaugggaaacuauguaagcucagaggaguggcuccccugcaucuugguaaaugcaacauagccggcuggauccuggggaauccugagugugaaucuuugucaacagcaaguagcugguccuacauuguugagaccucuucgucagacaacggaacuugcuauccaggcgauuuuaucgacuacgaggagcucagggagcagcugagcaguguguccucuuucgaacgguuugagauuuucccgaagacaagcuccuggcccaaucacgauucaaacaagggugucaccgccgcuuguccucaugcaggggccaaaaguuuuuauaagaaucugaucuggcucgugaaaaagggaaacagcuacccaaaauuaucuaaguccuauauaaaugacaagggcaaagaaguacugguucuuuggggcauccaccaccccucaacgagcgcugaucaacagaguuuguaccagaacgccgacgcguacguguucgucgggacuucucgcuauuccaagaaauuuaagccugagauugcaauccgaccaaaagugcgugaucaggagggaagaaugaauuacuauuggacccugguggaacccggugacaagauuacauucgaggccacuggcaaccuagucguuccuagguacgcuuuugccauggaacggaacgcagggagcggaaucauaauuucggauaccccagugcaugacugcaauacaaccugucaaacgccgaaaggcgcuaucaacacuucucuccccuuccagaauauucacccuaucacaaucgguaagugcccaaaguauguaaaauccaccaagcugcgccuugccgcggggcugagaaacgugcccucaauucagaguaggggauuguuuggcgccauagcaggcuucaucgaagggggauggacugguauggucgacggcugguacggguaucaucaccagaaugaacaaggaagcggcuacgcugccgaucucaaauccacacagaacgcuauugacgagaucaccaauaaggugaacucuguuauagagaaaaugaauacgcaguuuaccgccguggguaaggaguucaaccaccuggaaaagcggauugaaaauuuaaacaaaaaggucgaugacggguuccuggauaucuggacauacaaugcagagcuccuugugcuguuggaaaacgagcgcacucuagacuaucaugauagcaauguaaagaaccuguacgagaagguucgaucacagcucaaaaacaaugccaaggaaaucggcaacggauguuuugaguucuaucacaagugcgacaauaccuguauggaaagugugaaaaacggcacauacgauuauccuaaguacuccgaggaagcuaaacugaauagagaggagauugacggggucaaacuugaaagcacuaggaucuaucaaauucuggcgauauacucuaccguggcaucaaguuugguccucgugguuagccugggagccaucuccuuuuggaugugcucuaacgguucguuacagugccggauuuguaucuga

SEQ ID NO: 131554 - RNA, 1701 nt, Artificial Sequence; identical to SEQ ID NO: 130717
  derived and/or modified CDS sequence (opt3) from hemagglutinin__InfluenzaA__ACY46303

SEQ ID NO: 131555 - RNA, 1701 nt, Artificial Sequence; identical to SEQ ID NO: 130717
  derived and/or modified CDS sequence (opt3) from hemagglutinin__InfluenzaA__ACY46313

SEQ ID NO: 131556 - RNA, 1701 nt, Artificial Sequence; identical to SEQ ID NO: 130717
  derived and/or modified CDS sequence (opt3) from hemagglutinin__InfluenzaA__ACY46323

SEQ ID NO: 131557 - RNA, 1701 nt, Artificial Sequence; identical to SEQ ID NO: 130717
  derived and/or modified CDS sequence (opt3) from hemagglutinin__InfluenzaA__ACY46343

SEQ ID NO: 131558 - RNA, 1701 nt, Artificial Sequence; identical to SEQ ID NO: 130717
  derived and/or modified CDS sequence (opt3) from hemagglutinin__InfluenzaA__ACY46353

SEQ ID NO: 131559 - RNA, 1701 nt, Artificial Sequence
  derived and/or modified CDS sequence (opt3) from hemagglutinin__InfluenzaA__ACY46373
augaaggccauccugauugugcuccuuuacaccuucgcuacagcaaacgccgacacucugugcauaggcuaucacgcgaauaacagcacggauaccgucgacacaguuuuggagaagaaugugacuguaacccauuccgugaacuuacuggaagauaagcacaaugggaaacuauguaagcucagaggagucgcuccccugcaucuugguaaaugcaacaucgccggcuggauucuggggaauccugagugugaaucuuugucaacagcaaguagcugguccuacaucguggagaccucuucgucagacaacggaacuugcuauccaggcgauuuuauugacuacgaggagcucagggagcagcugagcaguguuuccucuuucgaacgguuugagaucuucccgaagacaagcuccuggcccaaucacgauucaaacaagggugugaccgccgcuuguccucaugcaggggccaaaaguuuuuauaagaaucugauauggcucgucaaaaagggaaacagcuacccaaaauuaucuaaguccuauaucaaugacaagggcaaagaagugcugguacuuuggggcauucaccaccccucaacgagcgcugaucaacagaguuuguaccagaacgccgacgcguacguuuucguggggacuucucgcuauuccaagaaauuuaagccugagaucgcaauucgaccaaaaguccgugaucaggagggaagaaugaauuacuauuggacccugguggaacccggugacaagaucacauucgaggccacuggcaaccuaguggucccuagguacgcuuuugccauggaacggaacgcagggagcggaauaauuaucucggauaccccaguucaugacugcaauacaaccugucaaacgccgaaaggcgcuauuaacacuucucuccccuuccagaauauccacccuaucacaauugguaagugcccaaaguaugugaaauccaccaagcugcgccuugccacugggcugagaaacguacccucaauacagaguaggggauuguuuggcgcgaucgccggcuucauugaagggggauggacagguaugguggacggcugguacggguaucaucaccagaaugaacaaggaagcggcuacgcagcugaucucaaauccacccagaacgccaucgacgagauaacgaauaaggucaacucugugauugagaaaaugaauacccaguuuacagcuguugguaaggaguucaaccaccuggaaaagcggaucgaaaauuuaaacaaaaagguggaugacggguuccuggauaucuggacuuacaaugccgagcuccuuguccuguuggaaaacgagcgcacccuagacuaucaugauagcaaugugaaaaaccuguacgagaagguacgaucacagcucaaaaacaaugcaaaggaaauuggcaacggauguuuugaguucuaucacaagugcgacaauacauguauggaaaguguuaaaaacggcacuuacgauuauccuaaguacuccgaggaagccaaacugaauagagaggagaucgacggggugaaacuugaaagcaccaggauuuaucaaauacuggcuaucuacucuacagucgcgucaaguuuggugcucgucgugagccugggagcaauuuccuuuuggaugugcucuaacgguucguuacagugccggaucuguaucuga

SEQ ID NO: 131560 - RNA, 1701 nt, Artificial Sequence
  derived and/or modified CDS sequence (opt3) from hemagglutinin__InfluenzaA__ACY46383
augaaggccauccuggugguccuccuuuacaccuucgcuacagcaaacgccgacacucugugcauuggcuaucacgcgaauaacagcacggauaccguugacacaguguuggagaaaaauguaacugugacccauuccgucaacuuacuggaagauaagcacaaugggaaacuauguaagcucagaggaguggcuccccugcaucuugguaaaugcaacauagccggcuggauccuggggaauccugagugugaaucuuugucaacagcaaguagcugguccuacauuguugagaccucuucgucagacaacggaacuugcuauccaggcgauuuuaucgacuacgaggagcucagggagcagcugagcaguguguccucuuucgaacgguuugagauuuucccgaagacaagcuccuggcccaaucacgauucaaacaagggugucaccgccgcuuguccucaugcaggggccaaaaguuuuuauaagaaucugaucuggcucgugaaaaagggaaacagcuacccaaaauuaucuaaguccuauauaaaugacaagggcaaagaaguacugguucuuuggggcauccaccaccccucaacgagcgcugaucaacagaguuuguaccagaacgccgacgcguacguguucgucgggucuucccgcuauagcaagaaauuuaagccugagauugcaauccgaccaaaagugcgugaucaggagggaagaaugaauuacuauuggacucugguggaacccggugacaagauuaccuucgaggccacaggcaaccuagucguuccuagguacgcuuuugccauggaacggaacgcagggucgggaaucauaauuucugauacuccagugcaugacugcaauaccacaugucaaaccccgaaaggcgcuaucaacacgucccuccccuuccacaauauucauccuaucacuaucgguaagugcccaaaguauguaaaaucaacaaagcugcgccuugccaccgggcugagaaacgugcccaguauucagagcaggggauuguuuggcgcgauagccggcuucaucgaagggggauggacugguauggucgacggcugguacggguaucaccaccagaaugaacagggauccggcuacgcagcugaucucaaaucuacacaaaacgccauugacgagaucaccaauaaggugaacagcguuauagagaaaaugaauacgcaguuuaccgcuguggguaaggaguucaaccaucuggaaaagcggauugaaaauuuaaacaaaaaggucgaugacggguuccuggauaucuggacauacaaugccgagcuccuugugcuguuggaaaacgagcgcacucuagacuaucacgauucaaauguaaagaaccuguacgagaagguucgaagucagcucaaaaacaaugcaaaggaaaucggcaacggauguuuugaguucuaucauaagugcgacaauaccuguauggaauccgugaaaaacggcacauacgauuauccuaaguacagcgaggaagccaaacugaauagagaggagauugacggggucaaacuugaaucuacuaggaucuaucagauucuggcuauauacucaaccguggcgaguagcuugguccucgugguuucccugggagcaaucucuuuuuggaugugcucgaacgguagcuuacaaugccggauuuguaucuga

SEQ ID NO: 131561 - RNA, 1701 nt, Artificial Sequence; identical to SEQ ID NO: 130717
  derived and/or modified CDS sequence (opt3) from hemagglutinin__InfluenzaA__ACY46393

SEQ ID NO: 131562 - RNA, 1701 nt, Artificial Sequence; identical to SEQ ID NO: 130717
  derived and/or modified CDS sequence (opt3) from hemagglutinin__InfluenzaA__ACY46403

SEQ ID NO: 131563 - RNA, 1701 nt, Artificial Sequence; identical to SEQ ID NO: 130717
  derived and/or modified CDS sequence (opt3) from hemagglutinin__InfluenzaA__ACY46413

SEQ ID NO: 131564 - RNA, 1701 nt, Artificial Sequence; identical to SEQ ID NO: 130717
  derived and/or modified CDS sequence (opt3) from hemagglutinin__InfluenzaA__ACY46433

SEQ ID NO: 131565 - RNA, 1701 nt, Artificial Sequence; identical to SEQ ID NO: 130717
  derived and/or modified CDS sequence (opt3) from hemagglutinin__InfluenzaA__ACY46443

SEQ ID NO: 131566 - RNA, 1701 nt, Artificial Sequence; identical to SEQ ID NO: 130717
  derived and/or modified CDS sequence (opt3) from hemagglutinin__InfluenzaA__ACY46453

SEQ ID NO: 131567 - RNA, 1701 nt, Artificial Sequence
  derived and/or modified CDS sequence (opt3) from hemagglutinin__InfluenzaA__ACY46463
augaaggccauccugguggucaugcucuacaccuucgcuacagcaaacgccgacacucuuugcauuggcuaucacgcgaauaacagcacggauaccguugacacagugcuggagaaaaauguaacugugacccauuccgucaacuuguuagaagauaagcacaaugggaaacuguguaagcuaagaggaguggcuccccuccaucuggguaaaugcaacauagccggcuggauccuugggaauccugagugugaaucucugucaacagcaaguagcugguccuacauuguugagaccucuucgucagacaacggaacuugcuauccaggcgauuuuaucgacuacgaagaguugagggagcagcucagcaguguguccucuuucgaacgguuugagauuuucccgaagacaagcuccuggcccaaucacgauucaaacaagggugucaccgccgcuuguccucaugcaggggccaaaaguuuuuauaagaaucugaucuggcuggugaaaaagggaaacagcuacccaaaacucucuaaguccuauauaaaugacaagggcaaagaaguauuaguucuguggggcauccaccaccccucaacgagcgcugaucaacagagucuuuaccagaacgccgacgcguacguguucgucgggacuucucgcuauuccaagaaauuuaagccugagauugcaauccgaccaaaagugcgugaucaggagggaagaaugaauuacuauuggaccuugguggaacccggugacaagauuacauucgaggccacuggcaaccuggucguuccuagguacgcuuuugccauggugcggaacgcagggagcggaaucauaauuucggauaccccaguacaugacugcaauacaaccugucaaacgccgaaaggcgcuaucaacacuucucuacccuuccagaauauucacccuaucacaaucgguaagugcccaaaguaugugaaauccaccaagcuccgccuggccacugggcuuagaaacguccccucaauucagaguaggggacuguuuggcgcgauagccggcuucaucgaagggggauggacagguaugguggacggcugguacggguaucaucaccagaaugagcaaggaagcggcuacgcagcugauuugaaauccacccagaacgccauugacgaaaucacgaauaagguuaacucugugauagagaaaaugaauacccaguuuacagcugucgguaaggaguucaaccaccucgaaaagcggauugagaaucugaacaaaaagguggaugacggguucuuagauaucuggacuuacaaugccgaacugcucguacuucuggagaacgaacgcaccuuggacuaucaugauagcaauguuaaaaaccuauacgagaaggugcgaucacagcugaaaaacaaugcaaaggagaucggcaacggauguuuugaguucuaucacaagugcgacaauacauguauggaaagugucaaaaacggcacuuacgauuauccuaaguacuccgaagaggccaaacucaauagagaagagauugacggggugaagcuggagagcaccaggaucuaucaaauucuugcuauauacucuacagucgcgucaagucugguguugguugugagccucggagcaaucuccuuuuggaugugcucuaacgguucgcugcagugccggauuuguaucuga

SEQ ID NO: 131568 - RNA, 1701 nt, Artificial Sequence; identical to SEQ ID NO: 130717
  derived and/or modified CDS sequence (opt3) from hemagglutinin__InfluenzaA__ACY46473

SEQ ID NO: 131569 - RNA, 1701 nt, Artificial Sequence; identical to SEQ ID NO: 130704
  derived and/or modified CDS sequence (opt3) from hemagglutinin__InfluenzaA__ACY46493

SEQ ID NO: 131570 - RNA, 1701 nt, Artificial Sequence
  derived and/or modified CDS sequence (opt3) from hemagglutinin__InfluenzaA__ACY46513
augaaggccauccuggugguccuccuuuacaccuucgcuacagcaaacgccgacacucugugcauuggcuaucacgcgaauaacagcacggauaccguugacacaguguuggagaaaaauguaacugugacccauuccgucaacuuacuggaagauaagcacaaugggaaacuauguaagcucagaggaguggcuccccugcaucuugguaaaugcaacauagccggcuggauccuggggaauccugagugugaaucuuugucaacagcaaguagcugguccuacauuguugagaccucuucgucagacaacggaacuugcuauccaggcgauuuuaucgacuacgaagaacucagggagcagcugagcaguguguccucuuucgaacgguuugagauuuucccgaagacaagcuccuggcccaaucacgauucaaacaagggugucaccgccgcuuguccucaugcaggggccaaaaguuuuuauaagaaucugaucuggcucgugaaaaagggaaacagcuacccaaaauuaucuaaguccuauauaaaugacaagggcaaagaaguacugguucuuuggggcauccaccaccccucaacgagcgcugaucaacagaguuuguaccagaacgccgacgcguacguguucgucgggucuuccaaguauagcaaaaaguuuaaaccugagauugcaauccgcccaaaggugcgagaucaggagggacguaugaauuacuauuggacucugguggaacccggugacaaaauuaccuucgaggccacaggcaaccuagucguuccuagauacgcuuuugccauggaaaggaacgcagggucgggaaucauaauuucugauacuccagugcaugacugcaauaccacaugucaaaccccgaagggcgcuaucaacacgucccuccccuuccagaauauucacccuaucacuaucgguaagugcccaaaauauguaaagucaacaaaacugcggcuugccaccgggcugcgcaacgugcccaguauucagagcagaggauuguuuggcgcgauagccggcuucaucgaagggggauggacugguauggucgacggcugguacggguaucaucaccagaaugaacaaggauccggcuacgcagcugaucucaagucuacacagaacgccauugacgagaucaccaauaaagugaacagcguuauagagaagaugaauacgcaguuuaccgcuguggguaaggaguucaaccaccuggagaaaaggauugaaaauuuaaacaagaaagucgaugacggguuccuggauaucuggacauacaaugccgagcuccuugugcuguuggacaacgaacggacucuagauuaucaugacucaaauguaaagaaccuguacgagaaaguucgcagucagcucaagaacaaugcaaaggagaucggcaacggauguuuugaguucuaucacaaaugcgauaauaccuguauggaguccgugaagaacggcacauacgacuauccuaaauacagcgaagaggccaagcugaaucgagaagagauugauggggucaaacuugagucuacuagaaucuaucaaauucuggcuauauacucaaccguggcgaguagcuugguccucgugguuucccugggagcaaucucuuuuuggaugugcucgaacgguagcuuacagugcaggauuuguaucuga

SEQ ID NO: 131571 - RNA, 1701 nt, Artificial Sequence; identical to SEQ ID NO: 130717
  derived and/or modified CDS sequence (opt3) from hemagglutinin__InfluenzaA__ACY46523

SEQ ID NO: 131572 - RNA, 1701 nt, Artificial Sequence; identical to SEQ ID NO: 130717
  derived and/or modified CDS sequence (opt3) from hemagglutinin__InfluenzaA__ACY46533

SEQ ID NO: 131573 - RNA, 1701 nt, Artificial Sequence; identical to SEQ ID NO: 130717
  derived and/or modified CDS sequence (opt3) from hemagglutinin__InfluenzaA__ACY46562

SEQ ID NO: 131574 - RNA, 1701 nt, Artificial Sequence; identical to SEQ ID NO: 130717
  derived and/or modified CDS sequence (opt3) from hemagglutinin__InfluenzaA__ACY46572

SEQ ID NO: 131575 - RNA, 1701 nt, Artificial Sequence; identical to SEQ ID NO: 130717
  derived and/or modified CDS sequence (opt3) from hemagglutinin__InfluenzaA__ACY46582

SEQ ID NO: 131576 - RNA, 1701 nt, Artificial Sequence; identical to SEQ ID NO: 130717
  derived and/or modified CDS sequence (opt3) from hemagglutinin__InfluenzaA__ACY46592

SEQ ID NO: 131577 - RNA, 1701 nt, Artificial Sequence; identical to SEQ ID NO: 130717
  derived and/or modified CDS sequence (opt3) from hemagglutinin__InfluenzaA__ACY46622

SEQ ID NO: 131578 - RNA, 1701 nt, Artificial Sequence
  derived and/or modified CDS sequence (opt3) from hemagglutinin__InfluenzaA__ACY46672
augaaggccauccuggugguccuccuuuacaccuucgcuacagcaaacgccgacacucugugcauuggcuaucacgcgaauaacagcacggauaccguugacacaguguuggagaagaauguaacugugacccauuccgucaacuuacuggaagauaagcacaaugggaaacuauguaagcucagaggaguggcuccccugcaucuugguaaaugcaacauagccggcuggauccuggggaauccugagugugaaucuuugucaacagcaaguagcugguccuacauuguugagaccucuucgucagacaacggaacuugcuauccaggcgauuuuaucgacuacgaagaacucagggagcagcugagcaguguguccucuuucgaacgguuugagauuuucccgaagacaagcuccuggcccaaucacgauucaaacaagggugucaccgccgcuuguccucaugcaggggccaaaaguuuuuauaagaaucugaucuggcucgugaaaaagggaaacagcuacccaaaauuaucuaaguccuauauaaaugacaagggcaaagaaguacugguucuuuggggcauccaccaccccucaacgagcgcugaucaacagaguuuguaccagaacgccgacgcguacguguucgucgggacuucucgcuauuccaagaaauuuaagccugagauugcaauccgaccaaaagugcgugaucaggagggaagaaugaauuacuauuggacccugguggaacccggugacaagauuacauucgaggccacuggcaaccuagucguuccuagguacgcuuuugccauggugcggaacgcagggagcggaaucauaauuucggauaccccaguacaugacugcaauacaaccugucaaacgccgaaaggcgcuaucaacacuucucuccccuuccagaauauucacccuaucacaaucgguaagugcccaaaguaugugaaauccaccaagcugcgccuugccacugggcugagaaacguccccucaauucagaguaggggauuguuuggcgcgauagccggcuucaucgaagggggauggacagguaugguggacggcugguacggguaucaucaccagaaugagcaaggaagcggcuacgcagcugaucucaaauccacccagaacgccauugacgaaaucacgaauaagguuaacucugugauagagaaaaugaauacccaguuuacagcugucgguaaggaguucaaccaccuggaaaagcggauugagaauuuaaacaaaaagguggaugacggguuccuggauaucuggacuuacaaugccgaacuccuuguacuguuggagaacgaacgcacccuagacuaucaugauagcaauguuaaaaaccuguacgagaaggugcgaucacagcucaaaaacaaugcaaaggagaucggcaacggauguuuugaguucuaucacaagugcgacaauacauguauggagagugucaaaaacggcacuuacgauuauccuaaguacuccgaagaggccaaacugaauagagaagagauugacggggugaaacuugagagcaccaggaucuaucaaauucuggcuauauacucuacagucgcgucaaguuuggugcucguugugagccugggagcaaucuccuuuuggaugugcucuaacgguucguuacagugccggauuuguaucuga

SEQ ID NO: 131579 - RNA, 1701 nt, Artificial Sequence; identical to SEQ ID NO: 130717
  derived and/or modified CDS sequence (opt3) from hemagglutinin__InfluenzaA__ACY46682

SEQ ID NO: 131580 - RNA, 1701 nt, Artificial Sequence; identical to SEQ ID NO: 130717
  derived and/or modified CDS sequence (opt3) from hemagglutinin__InfluenzaA__ACY46692

SEQ ID NO: 131581 - RNA, 1701 nt, Artificial Sequence; identical to SEQ ID NO: 130717
  derived and/or modified CDS sequence (opt3) from hemagglutinin__InfluenzaA__ACY46712

SEQ ID NO: 131582 - RNA, 1701 nt, Artificial Sequence
  derived and/or modified CDS sequence (opt3) from hemagglutinin__InfluenzaA__ACY46722
augaaggccauccuggugguccuccuuuacaccuucgcuacagcaaacgccgacacucugugcauuggcuaucacgcgaauaacagcacggauaccguugacacaguguuggagaaaaauguaacugugacccauuccgucaacuuacuggaagauaagcacaaugggaaacuauguaagcucagaggaguggcuccccugcaucuugguaaaugcaacauagccggcuggauccuggggaauccugagugugaaucuuugucaacagcaaguagcugguccuacauuguugagaccucuucgucagacaacggaacuugcuauccaggcgauuuuaucgacuacgaagaacucagggagcagcugagcaguguguccucuuucgaacgguuugagauuuucccgaagacaagcuccuggcccaaucacgauucaaacaagggugucaccgccgcuuguccucaugcaggggccaaaaguuuuuauaagaaucugaucuggcucgugaaaaagggaaacagcuacccaaaauuaucuaaguccuauauaaaugacaagggcaaagaaguacugguucuuuggggcauccaccaccccucaacgagcgcugggcaacagaguuuguaccagaacgccgaugcguacguguucgucggaacuucucgcuauuccaagaaauuuaagccugagauugcaauccgaccaaaagugcgugaccaggaggguagaaugaauuacuauuggacccugguggaacccggcgauaagauuacauucgaggccacugggaaccuagucguuccuagguacgcuuuugccauggaacggaacgcaggaagcggcaucauaauuucggacaccccagugcaugauugcaauacaaccugucaaacgccgaaaggugcuaucaacacuucucuccccuuccagaauauucacccuaucacaaucgggaagugcccaaaguauguaaaauccaccaagcugcgccuugccacuggacugagaaacgugcccucaauucagaguaggggcuuguuuggcgcgauagccggguucaucgagggagguuggacaggcauggucgacgggugguacggauaucaucaccagaaugaacaaggcagcgguuacgcagcugaccucaaauccacccagaacgccauugaugagaucacgaauaaggugaacucuguuauagagaaaaugaauacccaguuuacagcuguggggaaggaguucaaccaccuggagaagcggauugaaaauuuaaacaaaaaggucgacgauggcuuccuggacaucuggacuuacaaugccgagcuccuugugcuguuggaaaacgagcgcacccuagauuaucaugacagcaauguaaagaaccuguacgagaagguucgaucacagcucaaaaacaaugcaaaggaaaucggaaacggcuguuuugaguucuaucacaagugcgauaauacauguauggaaagugugaaaaacgggacuuacgacuauccuaaguacuccgaggaagccaaacugaauagagaggagauugauggagucaaacuugaaagcaccaggaucuaucaaauucuggcuauauacucuacaguggcgucaaguuugguccucgugguuagccugggugcaaucuccuuuuggaugugcucuaacggcucguuacagugccggauuuguaucuga

SEQ ID NO: 131583 - RNA, 1701 nt, Artificial Sequence
  derived and/or modified CDS sequence (opt3) from hemagglutinin__InfluenzaA__ACY46742
augaaggccauccuggugguccuccuuuacaccuucgcuacagcaaacgccgacacucugugcauuggcuaucacgcgaauaacagcacggauaccguugacacaguguuggagaagaauguaacugugacccauuccgucaacuuacuggaagauaagcacaaugggaaacuauguaagcucagaggaguggcuccccugcaucuugguaaaugcaacauagccggcuggauccuggggaauccugagugugaaucuuugucaacagcaaguagcugguccuacauuguugagaccucuucgucagacaacggaacuugcuauccaggcaauuuuaucgauuacgaggagcucagggagcagcugagcaguguguccucuuucgaacgguuugagauuuucccgaagacaagcuccuggcccaaccacgacucaaauaagggugucaccgccgcuuguccucaugcaggggccaaaaguuuuuauaagaaccugaucuggcucgugaaaaagggaaauagcuacccaaaauuaucuaaguccuauauaaacgauaagggcaaagaaguacugguucuuuggggcauccaccaccccucaacgagcgcugaccaacagaguuuguaccagaaugccgaugcguacguguucgucgggacuucucgcuauuccaagaaauuuaagccugagauugcaauccgaccaaaagugcgugaccaggagggaagaaugaacuacuauuggacccugguggaacccggugauaagauuacauucgaggccacuggcaaccuagucguuccuagguacgcuuuugccauggaacggaaugcagggagcggaaucauaauuucggacaccccagugcaugauugcaacacaaccugucaaacgccgaaaggcgcuaucaauacuucucuccccuuccagaacauucacccuaucacaaucgguaagugcccaaaguauguaaaauccaccaagcugcgccuugccacugggcugagaaaugugcccucaauucagaguaggggauuguuuggcgcgauagccggcuucaucgaagggggauggacagguauggucgacggcugguacggguaucaucaccagaacgaacaaggaagcggcuacgcagcugaccucaaauccacccagaaugccauugaugagaucacgaacaagguaaauucuguuauagagaaaaugaacacccaguuuacagcuguggguaaggaguucaaucaccuggaaaagcggauugaaaacuuaaauaaaaaggucgacgauggguuccuggacaucuggacuuacaacgccgagcuccuugugcuguuggaaaaugagcgcacccuagauuaucaugacagcaacgugaaaaaccuguacgagaagguucgaucacagcucaaaaauaacgcaaaggaaaucggcaauggauguuuugaguucuaucacaagugcgauaacacauguauggaaagugugaaaaauggcacuuacgacuauccuaaguacuccgaggaagccaaacugaacagagaggagauugauggggucaaacuugaaagcaccaggaucuaucaaauucuggcuauauacucuacaguggcgucaaguuugguccucgugguuagccugggagcaaucuccuuuuggaugugcucuaaugguucguuacagugccggauuuguaucuga

SEQ ID NO: 131584 - RNA, 1701 nt, Artificial Sequence; identical to SEQ ID NO: 130717
  derived and/or modified CDS sequence (opt3) from hemagglutinin__InfluenzaA__ACY46762

SEQ ID NO: 131585 - RNA, 1701 nt, Artificial Sequence; identical to SEQ ID NO: 130717
  derived and/or modified CDS sequence (opt3) from hemagglutinin__InfluenzaA__ACY46772

SEQ ID NO: 131586 - RNA, 1701 nt, Artificial Sequence; identical to SEQ ID NO: 130717
  derived and/or modified CDS sequence (opt3) from hemagglutinin__InfluenzaA__ACY46903

SEQ ID NO: 131587 - RNA, 1701 nt, Artificial Sequence; identical to SEQ ID NO: 130743
  derived and/or modified CDS sequence (opt3) from hemagglutinin__InfluenzaA__ACY77534

SEQ ID NO: 131588 - RNA, 1698 nt, Artificial Sequence
  derived and/or modified CDS sequence (opt3) from hemagglutinin__InfluenzaA__ACY77544
augaaggccauccugguggucaugcucuacaccuucgcuacagcaaacgccgacacucuuugcauuggcuaucacgcgaauaacagcacggauaccguugacacagugcuggagaaaaauguaacugugacccauuccgucaacuuguuagaagauaagcacaaugggaaacuguguaagcuaagaggaguggcuccccuccaucuggguaaaugcaacauagccggcuggauccuugggaauccugagugugaaucucugucaacagcaaguagcugguccuacauuguugagaccucuucgucagacaacggaacuugcuauccaggcgauuuuaucgacuacgaagaguugagggagcagcucagcaguguguccucuuucgaacgguuugagauuuucccgaagacaagcuccuggcccaaucacgauucaaacaagggugucaccgccgcuuguccucaugcaggggccaaaaguuuuuauaagaaucugaucuggcuggugaaaaagggaaacagcuacccaaaacucucuaaguccuauauaaaugacaagggcaaagaaguauuaguucuguggggcauccaccaccccucaacgagcgcugaucaacagagucuuuaccagaacgccgacgcguacguguucgucgggucuucccgcuauagcaagaaauuuaagccugagauugcaauccgaccaaaagugcgugaucaggagggaagaaugaauuacuauuggacuuugguggaacccggugacaagauuaccuucgaggccacaggcaaccuggucguuccuagguacgcuuuugccauggaacggaacgcagggucgggaaucauaauuucugauacuaccgugcaugacugcaauacaaccugucaaacgccaaaaggcgcuaucaacacuucccuaccguuccagaauauucaccccaucacaaucgguaagugcccuaaguauguaaaaucaaccaagcuccgccuggccacugggcuuagaaacgugccaaguauucagagcaggggacuguuuggcgcgauagccggcuucaucgaagggggauggacagguauggucgacggcugguacggguaucaucaccagaaugaacaaggauccggcuacgcagcugauuugaaaucuacccagaacgccauugacgagaucacgaauaaggugaacagcguuauagagaaaaugaauacccaguuuacagcuguggguaaggaguucaaccaccucgagaagcggauugaaaaucugaacaaaaaggucgaugacggguucuuagauaucuggacuuacaaugccgagcugcucgugcuucuggaaaacgagcgcaccuuggacuaucaugauucaaauguuaaaaaccuauacgagaagguacgaagucagcugaaaaacaaugcaaaggaaaucggcaacggauguuuugaguucuaucacaagugcgacaauacauguauggaauccgugaaaaacggcacuuacgauuaucccaaguacagcgaggaagccaaacucaauagagaggagauugacggggucaagcuggaaucuaccaggaucuaucaaauucuugcuauauacucaacaguggcgaguagccuggucuuggugguuucccucggagcaaucucuuuuuggaugugcucguggagccugcagugccggauuuguaucuga

SEQ ID NO: 131589 - RNA, 1698 nt, Artificial Sequence
  derived and/or modified CDS sequence (opt3) from hemagglutinin__InfluenzaA__ACY77554
augaaggccauccuggugguccuccuuuacaccuucgcuacagcaaacgccgacacucugugcauuggcuaucacgcgaauaacagcacggauaccguugacacaguguuggagaagaauguaacugugacccauuccgucaacuuacuggaagauaagcacaaugggaaacuauguaagcucagaggaguggcuccccugcaucuugguaaaugcaacauagccggcuggauccuggggaauccugagugugaaucuuugucaacagcaaguagcugguccuacauuguugagaccucuucgucagacaacggaacuugcuauccaggcgauuuuaucgacuacgaggagcucagggagcagcugagcaguguguccucuuucgaacgguuugagauuuucccgaagacaagcuccuggcccaaucacgauucaaacaagggugucaccgccgcuuguccucaugcaggggccaaaaguuuuuauaagaaucugaucuggcucgugaaaaagggaaacagcuacccaaaauuaucuaaguccuauauaaaugacaagggcaaagaaguacugguucuuuggggcauccaccaccccucaacgagcgcugaucaacagaguuuguaccagaacgccgacgcguacguguucgucgggacuucucgcuauuccaagaaauuuaagccugagauugcaauccgaccaaaagugcgugaucaggagggaagaaugaauuacuauuggacccugguggaacccggugacaagauuacauucgaggccacuggcaaccuagucguuccuagguacgcuuuugccauggaacggaacgcagggagcggaaucauaauuucggauaccccagugcauaauugcaacacaaccugucaaacgccgaaaggcgcuaucaauacuucucuccccuuccagaacauucacccuaucacaaucgguaagugcccaaaguauguaaaauccaccaagcugcgccuugccacugggcugagaaaugugcccucaauucagaguaggggauuguuuggcgcgauagccggcuucaucgaagggggauggacagguauggucgacggcugguacggguaucaucaccagaacgaacaaggaagcggcuacgcagcugaccucaaauccacccagaaugccauugaugagaucacgaacaagguaaauucuguuauagagaaaaugaacacccaguuuacagcuguggguaaggaguucaaucaccuggaaaagcggauugaaaacuuaaauaaaaaggucgacgauggguuccuggacaucuggacuuacaacgccgagcuccuugugcuguuggaaaaugagcgcacccuagauuaucaugacagcaacgugaaaaaccuguacgagaagguucgaucacagcucaaaaauaacgcaaaggaaaucggcaauggauguuuugaguucuaucacaagugcgauaacacauguauggaaagugugaaaaauggcacuuacgacuauccuaaguacuccgaggaagccaaacugaacagagaggagauugauggggucaaacuugaaagcaccaggaucuaucaaauucuggcuauauacucuacaguggcgucaaguuugguccucgugguuagccugggagcaaucuccuuuuggaugugcucuggucauuuacagugccggauuuguaucuga

SEQ ID NO: 131590 - RNA, 1695 nt, Artificial Sequence
  derived and/or modified CDS sequence (opt3) from hemagglutinin__InfluenzaA__ACY77573
augaaggccauccuggugguccuccuuuacaccuucgcuacagcaaacgccgacacucugugcauuggcuaucacgcgaauaacagcacggauaccguugacacaguguuggagaaaaauguaacugugacccauuccgucaacuuacuggaagauaagcacaaugggaaacuauguaagcucagaggaguggcuccccugcaucuugguaaaugcaacauagccggcuggauccuggggaauccugagugugaaucuuugucaacagcaaguagcugguccuacauuguugagaccucuucgucagacaacggaacuugcuauccaggcgauuuuaucgacuacgaggagcucagggagcagcugagcaguguguccucuuucgaacgguuugagauuuucccgaagacaagcuccuggcccaaucacgauucaaacaagggugucaccgccgcuuguccucaugcaggggccaaaaguuuuuauaagaaucugaucuggcucgugaaaaagggaaacagcuacccaaaauuaucuaaguccuauauaaaugacaagggcaaagaaguacugguucuuuggggcauccaccaccccucaacgagcgcugaucaacagaguuuguaccagaacgccgacgcguacguguucgucgggucuucccgcuauagcaagaaauuuaagccugagauugcaauccgaccaaaagugcgugaucaggagggaagaaugaauuacuauuggacucugguggaacccggugacaagauuaccuucgaggccacaggcaaccuagucguuccuagguacgcuuuugccauggaacggaacgcagggucgggaaucauaauuucugauacuccagugcaugacugcaauaccacaugucaaaccccgaaaggcgcuaucaacacgucccuccccuuccagaauauucacccuaucacuaucgguaagugcccaaaguauguaaaaucaacaaagcugcgccuugccaccgggcugagaaacgugcccaguauucagagcaggggauuguuuggcgcgauagccggcuucaucgaagggggauggacugguauggucgacggcugguacggguaucaucaccagaaugaacaaggauccggcuacgcagcugaucucaaaucuacacagagcgccauugacgagaucaccaacaagguuaauucagugauagagaaaaugaacacgcagcugaccggucaguguaaggaauuuaaucacuuagagaagcggauugaaaaccugaauaaaaagguggaugacggguuccucgauaucuggacauacaacgcugagcuucuggucuugcuagaaaaugagcgcacucuggacuaucaugauaguaacgugaaaaaucucuacgagaagguacgaucccaacugaaaaacaacgccaaugaaaucggcaacggaugcuucgaguuuuaucacaagugugacaauaccugcauggaaagcguuaagaacggcacauacgauuauccuaaauacucugaggaagcaaaacuuaauagagaggagauugacggggugaagcuggaaucaacuaggaucuaucagauuuuggccauauacaguaccgucgcuagcucccucgugcuggucgugucuuuaggagcgaucucguucuggaugugcagcggucauuccugucggauuugcaucuga

SEQ ID NO: 131591 - RNA, 1701 nt, Artificial Sequence
  derived and/or modified CDS sequence (opt3) from hemagglutinin__InfluenzaA__ACY77593
augaaggccauccugguggucaugcucuacaccuucgcuacagcaaacgccgacacucuuugcauuggcuaucacgcgaauaacagcacggauaccguugacacagugcuggagaaaaauguaacugugacccauuccgucaacuuguuagaagauaagcacaaugggaaacuguguaagcuaagaggaguggcuccccuccaucuggguaaaugcaacauagccggcuggauccuugggaauccugagugugaaucucugucaacagcaaguagcugguccuacauuguugagaccucuucgucagacaacggaacuugcuauccaggcgauuuuaucgacuacgaagaguugagggagcagcucagcaguguguccucuuucgaacgguuugagauuuucccgaagacaagcuccuggcccaaucacgauucaaacaagggugucaccgccgcuuguccucaugcaggggccaaaaguuuuuauaagaaucugaucuggcuggugaaaaagggaaacagcuacccaaaacucucuaaguccuauauaaaugacaagggcaaagaaguauuaguucuguggggcauccaccaccccucaacgagcgcugaucaacagagucuuuaccagaacgccgacgcguacguguucgucgggucuucccgcuauagcaagaaauuuaagccugagauugcaauccgaccaaaagugcgugaucaggagggaagaaugaauuacuauuggacuuugguggaacccggugacaagauuaccuucgaggccacaggcaaccuggucguuccuagguacgcuuuugccauggaacggaacgcagggucgggaaucauaauuucugauacuaccgugcaugacugcaauacaaccugucaaacgccaaaaggcgcuaucaacacuucccuaccguuccagaauauucaccccaucacaaucgguaagugcccuaaguauguaaaaucaaccaagcuccgccuggccacugggcuuagaaacgugccaaguauucagagcaggggacuguuuggcgcgauagccggcuucaucgaagggggauggacagguauggucgacggcugguacggguaucaucaccagaaugaacaaggauccggcuacgcagcugauuugaaaucuacccagaacgccauugacgagaucacgaauaaggugaacagcguuauagagaaaaugaauacccaguuuacagcuguggguaaggaguucaaccaccucgagaagcggauugaaaaucugaacaaaaaggucgaugacggguucuuagauaucuggacuuacaaugccgagcugcucgugcuucuggaaaacgagcgcaccuuggacuaucaugauucaaauguuaaaaaccuauacgagaagguacgaagucagcugaaaaacaaugcaaaggaaaucggcaacggauguuuugaguucuaucacaagugcgacaauacauguauggaauccgugaaaaacggcacuuacgauuaucccaaguacagcgaggaagccaaacucaauagagaggagauugacggggucaagcuggaaucuaccaggaucuaucaaauucuugcuauauacucaacaguggcgaguagccuggucuuggugguuucccucggagcaaucucuuuuuggaugugcucgaacgguagccugcagugccggauuuguaucuga

SEQ ID NO: 131592 - RNA, 1698 nt, Artificial Sequence
  derived and/or modified CDS sequence (opt3) from hemagglutinin__InfluenzaA__ACY77603
augaaggccauccugguggucaugcucuacaccuucgcuacagcaaacgccgacacucuuugcauuggcuaucacgcgaauaacagcacggauaccguugacacagugcuggagaaaaauguaacugugacccauuccgucaacuuguuagaagauaagcacaaugggaaacuguguaagcuaagaggaguggcuccccuccaucuggguaaaugcaacauagccggcuggauccuugggaauccugagugugaaucucugucaacagcaaguagcugguccuacauuguugagaccucuucgucagacaacggaacuugcuauccaggcgauuuuaucgacuacgaagaguugagggagcagcucagcaguguguccucuuucgaacgguuugagauuuucccgaagacaagcuccuggcccaaucacgauucaaacaagggugucaccgccgcuuguccucaugcaggggccaaaaguuuuuauaagaaucugaucuggcuggugaaaaagggaaacagcuacccaaaacucucuaaguccuauauaaaugacaagggcaaagaaguauuaguucuguggggcauccaccaccccucaacgagcgcugaucaacagagucuuuaccagaacgccgacgcguacguguucgucgggucuucccgcuauagcaagaaauuuaagccugagauugcaauccgaccaaaagugcgugaucaggagggaagaaugaauuacuauuggacuuugguggaacccggugacaagauuaccuucgaggccacaggcaaccuggucguuccuagguacgcuuuugccauggaacggaacgcagggucgggaaucauaauuucugauacuccagugcaugacugcaauaccacaugucaaaccccgaaaggcgcuaucaacacgucccuacccuuccagaauauucacccuaucacuaucgguaagugcccaaaguauguaaaaucaacaaagcuccgccuggccaccgggcuuagaaacgugcccaguauucagagcaggggacuguuuggcgcgauagccggcuucaucgaagggggauggacugguauggucgacggcugguacggguaucaucaccagaaugaacaaggauccggcuacgcagcugauuugaaaucuacacagaacgccauugacgagaucaccaauaaggugaacagcguuauagagaaaaugaauacgcaguuuaccgcuguggguaaggaguucaaccaccucgagaagcggauugaaaaucugaacaaaaaggucgaugacggguucuuagauaucuggacauacaaugccgagcugcucgugcuucuggaaaacgagcgcacuuuggacuaucaugauucaaauguuaaaaaccuauacgagaagguacgaagucagcugaaaaacaaugcaaaggaaaucggcaacggauguuuugaguucuaucacaagugcgacaauaccuguauggaauccgugaaaaacggcacauacgauuauccuaaguacagcgaggaagccaaacucaauagagaggagauugacggggucaagcuggaaucuacuaggaucuaucaaauucuugcuauauacucaaccguggcgaguagccuggucuuggugguuucccucggagcaaucucuuuuuggaugugcucguggagccugcagugccggauuuguaucuga

SEQ ID NO: 131593 - RNA, 1695 nt, Artificial Sequence
  derived and/or modified CDS sequence (opt3) from hemagglutinin__InfluenzaA__ACY77613
augaaggccauccuggugguccuccuuuacaccuucgcuacagcaaacgccgacacucugugcauuggcuaucacgcgaauaacagcacggauaccguugacacaguguuggagaagaauguaacugugacccauuccgucaacuuacuggaagauaagcacaaugggaaacuauguaagcucagaggaguggcuccccugcaucuugguaaaugcaacauagccggcuggauccuggggaauccugagugugaaucuuugucaacagcaaguagcugguccuacauuguugagaccucuucgucagacaacggaacuugcuauccaggcgauuuuaucgacuacgaggagcucagggagcagcugagcaguguguccucuuucgaacgguuugagauuuucccgaagacaagcuccuggcccaaucacgauucaaacaagggugucaccgccgcuuguccucaugcaggggccaaaaguuuuuauaagaaucugaucuggcucgugaaaaagggaaacagcuacccaaaauuaucuaaguccuauauaaaugacaagggcaaagaaguacugguucuuuggggcauccaccaccccucaacgagcgcugaucaacagaguuuguaccagaacgccgacgcguacguguucgucgggacuucucgcuauuccaagaaauuuaagccugagauugcaauccgaccaaaagugcgugaucaggagggaagaaugaauuacuauuggacccugguggaacccggugacaagauuacauucgaggccacuggcaaccuagucguuccuagguacgcuuuugccauggaacggaacgcagggagcggaaucauaauuucggauaccccagugcaugacugcaauacaaccugucaaacgccgaaaggcgcuaucaacacuucucuccccuuccagaauauucacccuaucacaaucgguaagugcccaaaguauguaaaauccaccaagcugcgccuugccacugggcugagaaacgugcccucaauucagaguaggggauuguuuggcgcgauagccggcuucaucgaagggggauggacagguauggucgacggcugguacggguaucaucaccagaaugaacaaggaagcggcuacgcagcugaucucaaauccacccagaacgccauugacgagaucacgaauaaggugaacucuguuauagagaaaaugaauacccaguuuacaggucaguguaaggaguucaaccaccuggaaaagcggauugaaaauuuaaacaaaaagguggaugacggguuccuggauaucuggacuuacaaugcugagcuccuuguccuguuggaaaacgagcgcacccuagacuaucaugauagcaaugugaaaaaccuguacgagaagguacgaucacaacucaaaaacaaugccaaggaaaucggcaacggaugcuuugaguucuaucacaagugugacaauacaugcauggaaaguguuaaaaacggcacuuacgauuauccuaaguacuccgaggaagcaaaacugaauagagaggagauugacggggugaaacuugaaagcaccaggaucuaucagauucuggccauauacucuacagucgcuucaaguuuggugcucgucgugagccugggagcgaucuccuuuuggaugugcucuggucauucgugucggauuugcaucuga

SEQ ID NO: 131594 - RNA, 1701 nt, Artificial Sequence; identical to SEQ ID NO: 130717
  derived and/or modified CDS sequence (opt3) from hemagglutinin__InfluenzaA__ACY77623

SEQ ID NO: 131595 - RNA, 1707 nt, Artificial Sequence
  derived and/or modified CDS sequence (opt3) from hemagglutinin__InfluenzaA__ACY77653
augaaggccauccuggugguccuccuuuacaccuucgcuacagcaaacgccgacacucugugcauuggcuaucacgcgaauaacagcacggauaccguugacacaguguuggagaaaaauguaacugugacccauuccgucaacauauuagaagauaagcacaaugggaaacuguguaagcuaagaggaguggcuccccuccaucuggguaaaugcaacaucgccggcuggauucuugggaauccugagugugaaucucugucaacagcaaguagcugguccuacaucguugagaccucuucgucagacaacggaacuugcuauccaggcgauuuuauugacuacgaagaguugagggagcagcucagcaguguguccucuuucgaacgguuugagaucuucccgaagacaagcuccuggcccaaucacgauucaaacaagggugucaccgccgcuuguccucaugcaggggccaaaaguuuuuauaagaaucugauauggcuggugaaaaagggaaacagcuacccaaaacucucuaaguccuauaucaaugacaagggcaaagaaguauuaguucuguggggcauucaccaccccucaacgagcgcugaucaacagagucuuuaccagaacgccgacgcguacguguucgucgggucuucccgcuauagcaagaaauuuaagccugagaucgcaauucgaccaaaagugcgugaucaggagggaagaaugaauuacuauuggacuuugguggaacccggugacaagaucaccuucgaggccacaggcaaccuggucguuccuagguacgcuuuugccauggaacggaacgcagggucgggaauaauuaucucugauacuccagugcaugacugcaauaccacaugucaaaccccgaaaggcgcuauuaacacgucccuacccuuccagaauauccacccuaucacuauugguaagugcccaaaguauguaaaaucaacaaagcuccgccuggccaccgggcuuagaaacgugcccaguauacagagcaggggacuguuuggcgcgaucgccggcuucauugaagggggauggacugguauggucgacggcugguacggguaucaucaccagaaugaacaaggauccggcuacgcagcugauuugaaaucuacacagaacgccaucgacgagauaaccaauaaggugaacagcguuauugagaaaaugaauacgcaguuuaccgcuguggguaaggaguucaaccaccucgagaagcggaucgaaaaucugaacaaaaaggucgaugacggguucuuagauaucuggacauacaaugccgagcugcucgugcuucuggaaaacgagcgcacuuuggacuaucaugauucaaauguuaaaaaccuauacgagaagguacgaagucagcugaaaaacaaugcaaaggaagugggcaacggauguuuugaguucuaucacaagugcgacaauaccuguauggaauccgucaaaaacggcacauacgauuauccuaaguacagcgaggaagccaaacucaauagagaggagauugacggggugaagcuggaaucuacuaggaucuaucaaauucuugcuauauacucaaccgucgcgaguagccugguguugguugugucccucggagcaaucucuuuuuggaugugcucgggucauagcggcucccugcagugccggauuuguaucuga

SEQ ID NO: 131596 - RNA, 1698 nt, Artificial Sequence
  derived and/or modified CDS sequence (opt3) from hemagglutinin__InfluenzaA__ACY77663
augaaggccauccuggugguccuccuuuacaccuucgcuacagcaaacgccgacacucugugcauuggcuaucacgcgaauaacagcacggauaccguugacacaguguuggagaaaaauguaacugugacccauuccgucaacuuacuggaagauaagcacaaugggaaacuauguaagcucagaggaguggcuccccugcaucuugguaaaugcaacauagccggcuggauccuggggaauccugagugugaaucuuugucaacagcaaguagcugguccuacauuguugagaccucuucgucagacaacggaacuugcuauccaggcgauuuuaucgacuacgaggagcucagggagcagcugagcaguguguccucuuucgaacgguuugagauuuucccgaagacaagcuccuggcccaaucacgauucaaacaagggugucaccgccgcuuguccucaugcaggggccaaaaguuuuuauaagaaucugaucuggcucgugaaaaagggaaacagcuacccaaaauuaucuaaguccuauauaaaugacaagggcaaagaaguacugguucuuuggggcauccaccaccccucaacgagcgcugaucaacagaguuuguaccagaacgccgacgcguacguguucgucgggacuucucgcuauuccaagaaauuuaagccugagauugcaauccgaccaaaagugcgugaucaggagggaagaaugaauuacuauuggacccugguggaacccggugacaagauuacauucgaggccacuggcaaccuagucguuccuagguacgcuuuugccauggaacggaacgcagggagcggaaucauaauuucggauaccccagugcaugacugcaauacaaccugucaaacgccgaaaggcgcuaucaacacuucucuccccuuccagaauauucacccuaucacaaucgguaagugcccaaaguauguaaaauccaccaagcugcgccuugccacugggcugagaaacgugcccucaauucagaguaggggauuguuuggcgcgauagccggcuucaucgaagggggauggacagguauggucgacggcugguacggguaucaucaccagaaugaacaaggaagcggcuacgcagcugaucucaaauccacccagaacgccauugacgagaucacgaauaaggugaacucuguuauagagaaaaugaauacccaguuuacagcuguggguaaggaguucaaccaccuggaaaagcggauugaaaauuuaaacaaaaaggucgaugacggguuccuggauaucuggacuuacaaugccgagcuccuugugcuguuggaaaacgagcgcacccuagacuaucaugauagcaauguaaagaaccuguacgagaagguucgaucacagcucaaaaacaaugcaaaggaaaucggcaacggauguuuugaguucuaucacaagugcgacaauacauguauggaaagugugaaaaacggcacuuacgauuauccuaaguacuccgaggaagccaaacugaauagagaggagauugacggggucaaacuugaaagcaccaggaucuaucaaauucuggcuauauacucuacaguggcgucaaguuugguccucgugguuagccugggagcaaucuccuuuuggaugugcucuuggucguuacugugccggauuuguaucuga

SEQ ID NO: 131597 - RNA, 1698 nt, Artificial Sequence
  derived and/or modified CDS sequence (opt3) from hemagglutinin__InfluenzaA__ACY77683
augaaggccauccuggugguccuccuuuacaccuucgcuacagcaaacgccgacacucugugcauuggcuaucacgcgaauaacagcacggauaccguugacacaguguuggagaaaaauguaacugugacccauuccgucaacauauuagaagauaagcacaaugggaaacuguguaagcuaagaggaguggcuccccuccaucuggguaaaugcaacaucgccggcuggauucuugggaauccugagugugaaucucugucaacagcaaguagcugguccuacaucguugagaccucuucgucagacaacggaacuugcuauccaggcgauuuuauugacuacgaagaguugagggagcagcucagcaguguguccucuuucgaacgguuugagaucuucccgaagacaagcuccuggcccaaucacgauucaaacaagggugucaccgccgcuuguccucaugcaggggccaaaaguuuuuauaagaaucugauauggcuggugaaaaagggaaacagcuacccaaaacucucuaaguccuauaucaaugacaagggcaaagaaguauuaguucuguggggcauucaccaccccucaacgagcgcugaucaacagagucuuuaccagaacgccgacgcguacguguucgucgggucuucccgcuauagcaagaaauuuaagccugagaucgcaauucgaccaaaagugcgugaucaggagggaagaaugaauuacuauuggacuuugguggaacccggugacaagaucaccuucgaggccacaggcaaccuggucguuccuagguacgcuuuugccauggaacggaacgcagggucgggaauaauuaucucugauacuccagugcaugacugcaauaccacaugucaaaccccgaaaggcgcuauuaacacgucccuacccuuccagaauauccacccuaucacuauugguaagugcccaaaguauguaaaaucaacaaagcuccgccuggccaccgggcuuagaaacgugcccaguauacagagcaggggacuguuuggcgcgaucgccggcuucauugaagggggauggacugguauggucgacggcugguacggguaucaucaccagaaugaacaaggauccggcuacgcagcugauuugaaaucuacacagaacgccaucgacgagauaaccaauaaggugaacagcguuauugagaaaaugaauacgcaguuuaccgcuguggguaaggaguucaaccaccucgagaagcggaucgaaaaucugaacaaaaaggucgaugacggguucuuagauaucuggacauacaaugccgagcugcucgugcuucuggaaaacgagcgcacuuuggacuaucaugauucaaauguuaaaaaccuauacgagaagguacgaagucagcugaaaaacaaugcaaaggaagugggcaacggauguuuugaguucuaucacaagugcgacaauaccuguauggaauccgucaaaaacggcacauacgauuauccuaaguacagcgaggaagccaaacucaauagagaggagauugacggggugaagcuggaaucuacuaggaucuaucaaauucuugcuauauacucaaccgucgcgaguagccugguguugguugugucccucggagcaaucucuuuuuggaugugcucguggagccugcagugccggauuuguaucuga

SEQ ID NO: 131598 - RNA, 1698 nt, Artificial Sequence
  derived and/or modified CDS sequence (opt3) from hemagglutinin__InfluenzaA__ACY77693
augaaggccauccuggugguccuccuuuacaccuucgcuacagcaaacgccgacacucugugcauuggcuaucacgcgaauaacagcacggauaccguugacacaguguuggagaaaaauguaacugugacccauuccgucaacauauuagaagauaagcacaaugggaaacuguguaagcuaagaggaguggcuccccuccaucuggguaaaugcaacaucgccggcuggauucuugggaauccugagugugaaucucugucaacagcaaguagcugguccuacaucguugagaccucuucgucagacaacggaacuugcuauccaggcgauuuuauugacuacgaagaguugagggagcagcucagcaguguguccucuuucgaacgguuugagaucuucccgaagacaagcuccuggcccaaucacgauucaaacaagggugucaccgccgcuuguccucaugcaggggccaaaaguuuuuauaagaaucugauauggcuggugaaaaagggaaacagcuacccaaaacucucuaaguccuauaucaaugacaagggcaaagaaguauuaguucuguggggcauucaccaccccucaacgagcgcugaucaacagagucuuuaccagaacgccgacgcguacguguucgucgggucuucccgcuauagcaagaaauuuaagccugagaucacuauucgaccaaaagugcgugaucaggagggaagaaugaauuacuauuggaccuugguggaacccggugacaagaucacauucgaggcaacuggcaaccuggucguuccuagguacgccuuugcuauggaacggaacgccgggucgggaauaauuaucucugauaccccagugcaugacugcaauacaaccugucaaacgccgaaaggcgcaauuaacacuucccuacccuuccagaauauccacccuaucacaauugguaagugcccaaaguauguaaaaucaaccaagcuccgccuggcuacugggcuuagaaacgugcccaguauacagagcaggggacuguuuggcgccaucgcgggcuucauugaagggggauggacagguauggucgacggcugguacggguaucaucaccagaaugaacaaggauccggcuacgccgcagauuugaaaucuacccagaacgcuaucgacgagauaacgaauaaggugaacagcguuauugagaaaaugaauacccaguuuacaggucaguguaaggaguucaaccaccucgagaagcggaucgaaaaucugaacaaaaagguggaugacggguucuuagauaucuggacuuacaaugccgagcugcucguccuucuggaaaacgagcgcaccuuggacuaucaugauucaaaugugaaaaaccuauacgagaagguacgaagucaacugaaaaacaaugcuaaggaaguuggcaacggaugcuuugaguucuaucacaagugugacaauacaugcauggaauccgugaaaaacggcacuuacgauuauccuaaguacagcgaggaagccaaacucaauagagaggagauugacggggucaagcuggaaucuaccaggaucuaucagauucuugcaauauacucaacaguggccaguagccuggucuuggugguuucccucggagcuaucucuuuuuggaugugcucguggagccugcagugucggauuugcaucuga

SEQ ID NO: 131599 - RNA, 1698 nt, Artificial Sequence
  derived and/or modified CDS sequence (opt3) from hemagglutinin__InfluenzaA__ACY77703
augaaggccauccuggugguccuccuuuacaccuucgcuacagcaaacgccgacacucugugcauuggcuaucacgcgaauaacagcacggauaccguugacacaguguuggagaaaaauguaacugugacccauuccgucaacauauuagaagauaagcacaaugggaaacuguguaagcuaagaggaguggcuccccuccaucuggguaaaugcaacaucgccggcuggauucuugggaauccugagugugaaucucugucaacagcaaguagcugguccuacaucguugagaccucuucgucagacaacggaacuugcuauccaggcgauuuuauugacuacgaagaguugagggagcagcucagcaguguguccucuuucgaacgguuugagaucuucccgaagacaagcuccuggcccaaucacgauucaaacaagggugucaccgccgcuuguccucaugcaggggccaaaaguuuuuauaagaaucugauauggcuggugaaaaagggaaacagcuacccaaaacucucuaaguccuauaucaaugacaagggcaaagaaguauuaguucuguggggcauucaccaccccucaacgagcgcugaucaacagagucuuuaccagaacgccgacgcguacguguucgucgggucuucccgcuauagcaagaaauuuaagccugagaucgcaauucgaccaaaagugcgugaucaggagggaagaaugaauuacuauuggacuuugguggaacccggugacaagaucaccuucgaggccacaggcaaccuggucguuccuagguacgcuuuugccauggaacggaacgcagggucgggaauaauuaucucugauacuccagugcaugacugcaauaccacaugucaaaccccgaaaggcgcuauuaacacgucccuacccuuccagaauauccacccuaucacuauugguaagugcccaaaguauguaaaaucaacaaagcuccgccuggccaccgggcuuagaaacgugcccaguauacagagcaggggacuguuuggcgcgaucgccggcuucauugaagggggauggacugguauggucgacggcugguacggguaucaucaccagaaugaacaaggauccggcuacgcagcugauuugaaaucuacacagaacgccaucgacgagauaaccaauaaggugaacagcguuauugagaaaaugaauacgcaguuuaccggucaguguaaggaguucaaccaccucgagaagcggaucgaaaaucugaacaaaaagguggaugacggguucuuagauaucuggacauacaaugcugagcugcucguccuucuggaaaacgagcgcacuuuggacuaucaugauucaaaugugaaaaaccuauacgagaagguacgaagucaacugaaaaacaaugccaaggaaguuggcaacggaugcuuugaguucuaucacaagugugacaauaccugcauggaauccgugaaaaacggcacauacgauuauccuaaguacagcgaggaagcaaaacucaauagagaggagauugacggggucaagcuggaaucuacuaggaucuaucagauucuugccauauacucaaccguggcuaguagccuggucuuggugguuucccucggagcgaucucuuuuuggaugugcucguggagccugcagugucggauuugcaucuga

SEQ ID NO: 131600 - RNA, 1698 nt, Artificial Sequence
  derived and/or modified CDS sequence (opt3) from hemagglutinin__InfluenzaA__ACY77713
augaaggccauccuggugguccuccuuuacaccuucgcuacagcaaacgccgacacucugugcauuggcuaucacgcgaauaacagcacggauaccguugacacaguguuggagaaaaauguaacugugacccauuccgucaacauauuagaagauaagcacaaugggaaacuguguaagcuaagaggaguggcuccccuccaucuggguaaaugcaacaucgccggcuggauucuugggaauccugagugugaaucucugucaacagcaaguagcugguccuacaucguugagaccucuucgucagacaacggaacuugcuauccaggcgauuuuauugacuacgaagaguugagggagcagcucagcaguguguccucuuucgaacgguuugagaucuucccgaagacaagcuccuggcccaaucacgauucaaacaagggugucaccgccgcuuguccucaugcaggggccaaaaguuuuuauaagaaucugauauggcuggugaaaaagggaaacagcuacccaaaacucucuaaguccuauaucaaugacaagggcaaagaaguauuaguucuguggggcauucaccaccccucaacgagcgcugaucaacagagucuuuaccagaacgccgacgcguacguguucgucgggucuucccgcuauagcaagaaauuuaagccugagaucgcaauucgaccaaaagugcgugaucaggagggaagaaugaauuacuauuggacuuugguggaacccggugacaagaucaccuucgaggccacaggcaaccuggucguuccuagguacgcuuuugccauggaacggaacgcagggucgggaauaauuaucucugauacuccagugcaugacugcaauaccacaugucaaaccccgaaaggcgcuauuaacacgucccuacccuuccagaauauccacccuaucacuauugguaagugcccaaaguauguaaaaucaacaaagcuccgccuggccaccgggcuuagaaacgugcccaguauacagagcaggggacuguuuggcgcgaucgccggcuucauugaagggggauggacugguauggucgacggcugguacggguaucaucaccagaaugaacaaggauccggcuacgcagcugauuugaaaucuacacagaacgccaucgacgagauaaccaauaaggugaacagcguuauugagaaaaugaauacgcaguuuaccggucaguguaaggaguucaaccaccucgagaagcggaucgaaaaucugaacaaaaagguggaugacggguucuuagauaucuggacauacaaugcugagcugcucguccuucuggaaaacgagcgcacuuuggacuaucaugauucaaaugugaaaaaccuauacgagaagguacgaagucaacugaaaaacaaugccaaggaaguuggcaacggaugcuuugaguucuaucacaagugugacaauaccugcauggaauccgugaaaaacggcacauacgauuauccuaaguacagcgaggaagcaaaacucaauagagaggagauugacggggucaagcuggaaucuacuaggaucuaucagauucuugccauauacucaaccguggcuaguagccuggucuuggugguuucccucggagcgaucucuuuuuggaugugcucgggucaucugcagugucggauuugcaucuga

SEQ ID NO: 131601 - RNA, 1701 nt, Artificial Sequence; identical to SEQ ID NO: 131030
  derived and/or modified CDS sequence (opt3) from hemagglutinin__InfluenzaA__ACY77723

SEQ ID NO: 131602 - RNA, 1695 nt, Artificial Sequence
  derived and/or modified CDS sequence (opt3) from hemagglutinin__InfluenzaA__ACY77733
augaaggccauccuggugguccuccuuuacaccuucgcuacagcaaacgccgacacucugugcauuggcuaucacgcgaauaacagcacggauaccguugacacaguguuggagaaaaauguaacugugacccauuccgucaacauauuagaagauaagcacaaugggaaacuguguaagcuaagaggaguggcuccccuccaucuggguaaaugcaacaucgccggcuggauucuugggaauccugagugugaaucucugucaacagcaaguagcugguccuacaucguugagaccucuucgucagacaacggaacuugcuauccaggcgauuuuauugacuacgaagaguugagggagcagcucagcaguguguccucuuucgaacgguuugagaucuucccgaagacaagcuccuggcccaaucacgauucaaacaagggugucaccgccgcuuguccucaugcaggggccaaaaguuuuuauaagaaucugauauggcuggugaaaacgggaaacagcuacccaaagcucucuaaauccuauaucaaugacaagggcaaggaaguauuaguucuguggggcauucaccaccccucaacuagcgcugaucaacagagucuuuaccagaacgccgacgcguacguguucgucgggucuucccgcuauagcaaaaaguuuaaaccugagaucgcaauucgaccaaaggugcgugaucaggagggaagaaugaauuacuauuggaccuugguggaacccggugacaaaaucacauucgaggccacuggcaaccuggucguuccuagguacgcuuuugccauggaacggaacgcagggucgggaauaauuaucucugauaccccagugcaugacugcaauacaaccugucaaacgccgaagggcgcuauuaacacuucccuacccuuccagaauauccacccuaucacaauugguaaaugcccaaaguauguaaagucaaccaaacuccgccuggccacugggcuuagaaacgugcccaguauacagagcaggggacuguuuggcgcgaucgccggcuucauugaagggggauggacagguauggucgacggcugguacggguaucaucaccagaaugaacaaggauccggcuacgcagcugauuugaagucuacccagaacgccaucgacgagauaacgaauaaagugaacagcguuauugagaagaugaauacccaguuuacagcuguggguaaagaguucaaccaccucgagaagcggaucgaaaaucugaacaagaaagucgaugacggguucuuagauaucuggacuuacaaugccgagcugcucgugcuucuggaaaacgagcgcaccuuggacuaucaugauucaaauguaaagaaccuauacgagaaaguucgaagucagcugaagaacaaugcaaaagaaauuggcaacggauguuuugaguucuaucacaagugcgacaauacauguauggaauccgugaagaacggcacuuacgauuauccuaaauacagcgaggaagccaagcucaauagagaggagaucgacggggucaaacuggaaucuaccaggauuuaucaaauacuugcuaucuacucaacaguggcgaguagccuggucuuggugguuucccucggagcaauuucuuuuuggaugugcucgggucugcagugccggaucuguaucuga

SEQ ID NO: 131603 - RNA, 1698 nt, Artificial Sequence
  derived and/or modified CDS sequence (opt3) from hemagglutinin__InfluenzaA__ACY77743
augaaggccauccuggugguccuccuuuacaccuucgcuacagcaaacgccgacacucugugcauuggcuaucacgcgaauaacagcacggauaccguugacacaguguuggagaaaaauguaacugugacccauuccgucaacuuacuggaagauaagcacaaugggaaacuauguaagcucagaggaguggcuccccugcaucuugguaaaugcaacauagccggcuggauccuggggaauccugagugugaaucuuugucaacagcaaguagcugguccuacauuguugagaccucuucgucagacaacggaacuugcuauccaggcgauuuuaucgacuacgaggagcucagggagcagcugagcaguguguccucuuucgaacgguuugagauuuucccgaagacaagcuccuggcccaaucacgauucaaacaagggugucaccgccgcuuguccucaugcaggggccaaaaguuuuuauaagaaucugaucuggcucgugaaaaagggaaacagcuacccaaaauuaucuaaguccuauauaaaugacaagggcaaagaaguacugguucuuuggggcauccaccaccccucaacgagcgcugaucaacagaguuuguaccagaacgccgacgcguacguguucgucgggucuucccgcuauagcaagaaauuuaagccugagauugcaauccgaccaaaagugcgugaucaggagggaagaaugaauuacuauuggacucugguggaacccggugacaagauuaccuucgaggccacaggcaaccuagucguuccuagguacgcuuuugccauggaacggaacgcagggucgggaaucauaauuucugauacuccagugcaugacugcaauaccacaugucaaaccccgaaaggcgcuaucaacacgucccuccccuuccagaauauucacccuaucacuaucgguaagugcccaaaguauguaaaaucaacaaagcugcgccuugccaccgggcugagaaacgugcccaguauucagagcaggggauuguuuggcgcgauagccggcuucaucgaagggggauggacugguauggucgacggcugguacggguaucaucaccagaaugaacaaggauccggcuacgcagcugaucucaaaucuacacagaacgccauugacgagaucaccaauaaggugaacagcguuauagagaaaaugaauacgcaguuuaccgcuguggguaaggaguucaaccaccuggaaaagcggauugaaaauuuaaacaaaaaggucgaugacggguuccuggauaucuggacauacaaugccgagcuccuugugcuguuggaaaacgagcgcacucuagacuaucaugauucaaauguaaagaaccuguacgagaagguucgaagucagcucaaaaacaaugcaaaggaagugggcaacggauguuuugaguucuaucacaagugcgacaauaccuguauggaauccgucaaaaacggcacauacgauuauccuaaguacagcgaggaagccaaacugaauagagaggagaucgacggggugaaacuugaaucuacuaggauuuaucaaauccuggcuauuuacucaaccgucgcgaguagcuuggugcucguugugucccugggagcaauaucuuuuuggaugugcucguggagcuuacagugccggaucuguauuuga

SEQ ID NO: 131604 - RNA, 1701 nt, Artificial Sequence; identical to SEQ ID NO: 130717
  derived and/or modified CDS sequence (opt3) from hemagglutinin__InfluenzaA__ACY77753

SEQ ID NO: 131605 - RNA, 1695 nt, Artificial Sequence
  derived and/or modified CDS sequence (opt3) from hemagglutinin__InfluenzaA__ACY77783
augaaggccauccuggugguccuccuuuacaccuucgcuacagcaaacgccgacacucugugcauuggcuaucacgcgaauaacagcacggauaccguugacacaguguuggagaagaauguaacugugacccauuccgucaacuuacugggggauaagcacaauggaaaacuauguaagcucagagguguggcuccccugcaucuuggcaaaugcaacauagccggguggauccugggaaauccugaaugugagucuuugucaacagcaaguagcugguccuacauuguugaaaccucuucgucagacaacggcacuugcuauccaggugauuuuaucgacuacgaggaacucagggagcagcugagcaguguguccucuuucgagcgguuugaaauuuucccgaagacaagcuccuggcccaaucacgauucagacaagggggucaccgccgcuuguccucaugcaggagccaaaaguuuuuauaagaaccugaucuggcucgugaaaaagggcaauagcuacccaaaauuaucuaaguccuauauaaacgauaagggcaaagagguacugguucuuugggggauccaccaccccucaacgagcgcugaccaacagaguuuguaccagaaugccgauacuuacguguucgucggaaccucucgcuauuccaagaaauuuaagccugaaauugcgauccgaccaaaagugcgugaccaggaggguagaaugaacuacuauuggacacugguggagcccggcgauaagauuacuuucgaagcaaccgggaaucuagucguuccuagguacgccuuugcuauggagcggaacgccggaagcggcaucauaauuucggacacaccagugcaugacugcaacaccacgugucaaacuccgaaaggugcaaucaauacaucucuccccuuccagaacauucacccuaucaccaucgggaagugcccaaaguauguaaaauccacuaagcugcgccuugcuacaggacugagaaaugugcccucaauucagaguaggggcuuguuuggcgccauagcgggguucaucgaaggagguuggaccggcauggucgaugggugguacggauaucaucaccagaacgagcaaggcagcgguuacgccgcagaccucaaauccacgcagaaugcuauugaugaaaucaccaacaagguuaauucugugauagagaaaaugaacacacaguuuacugccguggggaaggaguucaaucaccuggaaaagcggauugagaacuuaaauaaaaaggucgacgauggcuuccuggacaucuggaccuacaacgcugaacuccuugugcuguuggagaaugaacgcacacuagauuaucaugacagcaacguaaaaucacuguacgagaagguucgaagucagcucaaaaauaacgccaaggagaucggaaacggcuguuuugaguucuaucacaagugcgauaauacuuguauggaauccgugaaaaacgggaccuacgacuauccuaaguacagcgaagaggcaaaacugaauagagaagagauugauggagucaaacuugagucuacaaggaucuaucaaauucuggccauauacucaaccguggcuaguagcuugguccucgugguuucccugggugcgaucucuuuuuggaugugcucgggccauagcugccggauuuguaucuga

SEQ ID NO: 131606 - RNA, 1698 nt, Artificial Sequence
  derived and/or modified CDS sequence (opt3) from hemagglutinin__InfluenzaA__ACY77813
augaaggccauccuggugguccuccuuuacaccuucgcuacagcaaacgccgacacucugugcauuggcuaucacgcgaauaacagcacggauaccguugacacaguguuggagaagaauguaacugugacccauuccgucaacuuacuggaagauaagcacaaugggaaacuauguaagcucagaggaguggcuccccugcaucuugguaaaugcaacauagccggcuggauccuggggaauccugagugugaaucuuugucaacagcaaguagcugguccuacauuguugagaccucuucgucagacaacggaacuugcuauccaggcgauuuuaucgacuacgaggagcucagggagcagcugagcaguguguccucuuucgaacgguuugagauuuucccgaagacaagcuccuggcccaaucacgauucaaacaagggugucaccgccgcuuguccucaugcaggggccaaaaguuuuuauaagaaucugaucuggcucgugaaaaagggaaacagcuacccaaaauuaucuaaguccuauauaaaugacaagggcaaagaaguacugguucuuuggggcauccaccaccccucaacgagcgcugaucaacagaguuuguaccagaacgccgacgcguacguguucgucgggacuucucgcuauuccaagaaauuuaagccugagauugcaauccgaccaaaagugcgugaucaggagggaagaaugaauuacuauuggacccugguggaacccggugacaagauuacauucgaggccacuggcaaccuagucguuccuagguacgcuuuugccauggaacggaacgcagggagcggaaucauaauuucggauaccccagugcaugacugcaauacaaccugucaaacgccgaaaggcgcuaucaacacuucucuccccuuccagaauauucacccuaucacaaucgguaagugcccaaaguauguaaaauccaccaagcugcgccuugccacugggcugagaaacgugcccucaauucagaguaggggauuguuuggcgcgauagccggcuucaucgaagggggauggacagguauggucgacggcugguacggguaucaucaccagaaugaacaaggaagcggcuacgcagcugaucucaaauccacccagaacgccauugacgagaucacgaauaaggugaacucuguuauagagaaaaugaauacccaguuuacaggucaguguaaggaguucaaccaccuggaaaagcggauugaaaauuuaaacaaaaagguggaugacggguuccuggauaucuggacuuacaaugcugagcuccuuguccuguuggaaaacgagcgcacccuagacuaucaugauagcaaugugaaaaaccuguacgagaagguacgaucacaacucaaaaacaaugccaaggaaaucggcaacggaugcuuugaguucuaucacaagugugacaauacaugcauggaaaguguuaaaaacggcacuuacgauuauccuaaguacuccgaggaagcaaaacugaauagagaggagauugacggggugaaacuugaaagcaccaggaucuaucagauucuggccauauacucuacagucgcuucaaguuuggugcucgucgugagccugggagcgaucuccuuuuggaugugcucuggucauuuacagugucggauuugcaucuga

SEQ ID NO: 131607 - RNA, 1698 nt, Artificial Sequence
  derived and/or modified CDS sequence (opt3) from hemagglutinin__InfluenzaA__ACY77823
augaaggccauccuggugguccuccuuuacaccuucgcuacagcaaacgccgacacucugugcauuggcuaucacgcgaauaacagcacggauaccguugacacaguguuggagaagaauguaacugugacccauuccgucaacuuacuggaagauaagcacaaugggaaacuauguaagcucagaggaguggcuccccugcaucuugguaaaugcaacauagccggcuggauccuggggaauccugagugugaaucuuugucaacagcaaguagcugguccuacauuguugagaccucuucgucagacaacggaacuugcuauccaggcgauuuuaucgacuacgaggagcucagggagcagcugagcaguguguccucuuucgaacgguuugagauuuucccgaagacaagcuccuggcccaaucacgauucaaacaagggugucaccgccgcuuguccucaugcaggggccaaaaguuuuuauaagaaucugaucuggcucgugaaaaagggaaacagcuacccaaaauuaucuaaguccuauauaaaugacaagggcaaagaaguacugguucuuuggggcauccaccaccccucaacgagcgcugaucaacagaguuuguaccagaacgccgacgcguacguguucgucgggacuucucgcuauuccaagaaauuuaagccugagauugcaauccgaccaaaagugcgugaucaggagggaagaaugaauuacuauuggacccugguggaacccggugacaagauuacauucgaggccacuggcaaccuagucguuccuagguacgcuuuugccauggaacggaacgcagggagcggaaucauaauuucggauaccccagugcaugacugcaauacaaccugucaaacgccgaaaggcgcuaucaacacuucucuccccuuccagaauauucacccuaucacaaucgguaagugcccaaaguauguaaaauccaccaagcugcgccuugccacugggcugagaaacgugcccucaauucagaguaggggauuguuuggcgcgauagccggcuucaucgaagggggauggacagguauggucgacggcugguacggguaucaucaccagaaugaacaaggaagcggcuacgcagcugaucucaaauccacccagaacgccauugacgagaucacgaauaaggugaacucuguuauagagaaaaugaauacccaguuuacaggucaguguaaggaguucaaccaccuggaaaagcggauugaaaauuuaaacaaaaagguggaugacggguuccuggauaucuggacuuacaaugcugagcuccuuguccuguuggaaaacgagcgcacccuagacuaucaugauagcaaugugaaaaaccuguacgagaagguacgaucacaacucaaaaacaaugccaaggaaaucggcaacggaugcuuugaguucuaucacaagugugacaauacaugcauggaaaguguuaaaaacggcacuuacgauuauccuaaguacuccgaggaagcaaaacugaauagagaggagauugacggggugaaacuugaaagcaccaggaucuaucagauucuggccauauacucuacagucgcuucaaguuuggugcucgucgugagccugggagcgaucuccuuuuggaugugcucuuggucguuacagugucggauuugcaucuga

SEQ ID NO: 131608 - RNA, 1698 nt, Artificial Sequence
  derived and/or modified CDS sequence (opt3) from hemagglutinin__InfluenzaA__ACY77833
augaaggccauccuggugguccuccuuuacaccuucgcuacagcaaacgccgacacucugugcauuggcuaucacgcgaauaacagcacggauaccguugacacaguguuggagaaaaauguaacugugacccauuccgucaacuuacuggaagauaagcacaaugggaaacuauguaagcucagaggaguggcuccccugcaucuugguaaaugcaacauagccggcuggauccuggggaauccugagugugaaucuuugucaacagcaaguagcugguccuacauuguugagaccucuucgucagacaacggaacuugcuauccaggcgauuuuaucgacuacgaggagcucagggagcagcugagcaguguguccucuuucgaacgguuugagauuuucccgaagacaagcuccuggcccaaucacgauucaaacaagggugucaccgccgcuuguccucaugcaggggccaaaaguuuuuauaagaaucugaucuggcucgugaaaaagggaaacagcuacccaaaauuaucuaaguccuauauaaaugacaagggcaaagaaguacugguucuuuggggcauccaccaccccucaacgagcgcugaucaacagaguuuguaccagaacgccgacgcguacguguucgucgggacuucucgcuauuccaagaaauuuaagccugagauugcaauccgaccaaaagugcgugaucaggagggaagaaugaauuacuauuggacccugguggaacccggugacaagauuacauucgaggccacuggcaaccuagucguuccuagguacgcuuuugccauggaacggaacgcagggagcggaaucauaauuucggauaccccagugcaugacugcaauacaaccugucaaacgccgaaaggcgcuaucaacacuucucuccccuuccagaauauucacccuaucacaaucgguaagugcccaaaguauguaaaauccaccaagcugcgccuugccacugggcugagaaacgugcccucaauucagaguaggggauuguuuggcgcgauagccggcuucaucgaagggggauggacagguauggucgacggcugguacggguaucaucaccagaaugaacaaggaagcggcuacgcagcugaucucaaauccacccagaacgccauugacgagaucacgaauaaggugaacucuguuauagagaaaaugaauacccaguuuacagcuguggguaaggaguucaaccaccuggaaaagcggauugaaaauuuaaacaaaaaggucgaugacggguuccuggauaucuggacuuacaaugccgagcuccuugugcuguuggaaaacgagcgcacccuagacuaucaugauagcaauguaaagaaccuguacgagaagguucgaucacagcucaaaaacaaugcaaaggaaaucggcaacggauguuuugaguucuaucacaagugcgacaauacauguauggaaagugugaaaaacggcacuuacgauuauccuaaguacuccgaggaagccaaacugaauagagaggagauugacggggucaaacuugaaagcaccaggaucuaucaaauucuggcuauauacucuacaguggcgucaaguuugguccucgugguuagccugggagcaaucuccuuuuggaugugcucuuggucguuacagugccggauuuguaucuga

SEQ ID NO: 131609 - RNA, 1698 nt, Artificial Sequence
  derived and/or modified CDS sequence (opt3) from hemagglutinin__InfluenzaA__ACY77843
augaaggccauccugguggucaugcucuacaccuucgcuacagcaaacgccgacacucuuugcauuggcuaucacgcgaauaacagcacggauaccguugacacagugcuggagaaaaauguaacugugacccauuccgucaacuuguuagaagauaagcacaaugggaaacuguguaagcuaagaggaguggcuccccuccaucuggguaaaugcaacauagccggcuggauccuugggaauccugagugugaaucucugucaacagcaaguagcugguccuacauuguugagaccucuucgucagacaacggaacuugcuauccaggcgauuuuaucgacuacgaagaguugagggagcagcucagcaguguguccucuuucgaacgguuugagauuuucccgaagacaagcuccuggcccaaucacgauucaaacaagggugucaccgccgcuuguccucaugcaggggccaaaaguuuuuauaagaaucugaucuggcuggugaaaaagggaaacagcuacccaaaacucucuaaguccuauauaaaugacaagggcaaagaaguauuaguucuguggggcauccaccaccccucaacgagcgcugaucaacagagucuuuaccagaacgccgacgcguacguguucgucgggucuucccgcuauagcaagaaauuuaagccugagauugcaauccgaccaaaagugcgugaucaggagggaagaaugaauuacuauuggacuuugguggaacccggugacaagauuaccuucgaggccacaggcaaccuggucguuccuagguacgcuuuugccauggaacggaacgcagggucgggaaucauaauuucugauacuaccgugcaugacugcaauacaaccugucaaacgccaaaaggcgcuaucaacacuucccuaccguuccagaauauucaccccaucacaaucgguaagugcccuaaguauguaaaaucaaccaagcuccgccuggccacugggcuuagaaacgugccaaguauucagagcaggggacuguuuggcgcgauagccggcuucaucgaagggggauggacagguauggucgacggcugguacggguaucaucaccagaaugaacaaggauccggcuacgcagcugauuugaaaucuacccagaacgccauugacgagaucacgaauaaggugaacagcguuauagagaaaaugaauacccaguuuacagcuguggguaaggaguucaaccaccucgagaagcggauugaaaaucugaacaaaaaggucgaugacggguucuuagauaucuggacuuacaaugccgagcugcucgugcuucuggaaaacgagcgcaccuuggacuaucaugauucaaauguuaaaaaccuauacgagaagguacgaagucagcugaaaaacaaugcaaaggaaaucggcaacggauguuuugaguucuaucacaagugcgacaauacauguauggaauccgugaaaaacggcacuuacgauuaucccaaguacagcgaggaagccaaacucaauagagaggagauugacggggucaagcuggaaucuaccaggaucuaucaaauucuugcuauauacucaacaguggcgaguagccuggucuuggugguuucccucggagcaaucucuuuuuggaugugcucgggucaucugcagugccggauuuguaucuga

SEQ ID NO: 131610 - RNA, 1701 nt, Artificial Sequence
  derived and/or modified CDS sequence (opt3) from hemagglutinin__InfluenzaA__ACY77863
augaaggccauccuggugguccuccuuuacaccuucgcuacagcaaacgccgacacucugugcauuggcuaucacgcgaauaacagcacggauaccguugacacaguguuggagaaaaauguaacugugacccauuccgucaacuuacuggaagauaagcacaaugggaaacuauguaagcucagaggaguggcuccccugcaucuugguaaaugcaacauagccggcuggauccuggggaauccugagugugaaucuuugucaacagcaaguagcugguccuacauuguugagaccucuucgucagacaacggaacuugcuauccaggcgauuuuaucgacuacgaggagcucagggagcagcugagcaguguguccucuuucgaacgguuugagauuuucccgaagacaagcuccuggcccaaucacgauucaaacaagggugucaccgccgcuuguccucaugcaggggccaaaaguuuuuauaagaaucugaucuggcucgugaaaaagggaaacagcuacccaaaauuaucuaaguccuauauaaaugacaagggcaaagaaguacugguucuuuggggcauccaccaccccucaacgagcgcugaucaacagaguuuguaccagaacgccgacgcguacguguucgucgggacuucucgcuauuccaagaaauuuaagccugagauugcaauccgaccaaaagugcgugaucaggagggaagaaugaauuacuauuggacccugguggaacccggugacaagauuacauucgaggccacuggcaaccuagucguuccuagguacgcuuuugccauggaacggaacgcagggagcggaaucauaauuucggauaccccagugcaugacugcaauacaaccugucaaacgccgaaaggcgcuaucaacacuucucuccccuuccagaauauucacccuaucacaaucgguaagugcccaaaguauguaaaauccaccaagcugcgccuugccacugggcugagaaacgugcccucaauucagaguaggggauuguuuggcgcgauagccggcuucaucgaagggggauggacagguauggucgacggcugguacggguaucaucaccagaaugaacaaggaagcggcuacgcagcugaucucaaauccacccagaacgccauugacgagaucacgaauaaggugaacucuguuauagagaaaaugaauacccaguuuacagcuguggguaaggaguucaaccaccuggaaaagcggauugaaaauuuaaacaaaaaggucgaugacggguuccuggauaucuggacuuacaaugccgagcuccuugugcuguuggaaaacgagcgcacccuagacuaucaugauagcaauguaaagaaccuguacgagaagguucgaucacagcucaaaaacaaugcaaaggaaaucggcaacggauguuuugaguucuaucacaagugcgacaauacauguauggaaagugugaaaaacggcacuuacgauuauccuaaguacuccgaggaagccaaacugaauagagaggagauugacggggucaaacuugaaagcaccaggaucuaucaaauucuggcuauauacucuacaguggcgucaaguuugguccucgugguuagccugggagcaaucuccuuuuggaugugcucugguaugucguuacagugccggauuuguaucuga

SEQ ID NO: 131611 - RNA, 1701 nt, Artificial Sequence; identical to SEQ ID NO: 130704
  derived and/or modified CDS sequence (opt3) from hemagglutinin__InfluenzaA__ACY77874

SEQ ID NO: 131612 - RNA, 1701 nt, Artificial Sequence; identical to SEQ ID NO: 130704
  derived and/or modified CDS sequence (opt3) from hemagglutinin__InfluenzaA__ACY77884

SEQ ID NO: 131613 - RNA, 1701 nt, Artificial Sequence
  derived and/or modified CDS sequence (opt3) from hemagglutinin__InfluenzaA__ACY77904
augaaggccauccuggugguccuccuuuacaccuucgcuacagcaaacgccgacacucugugcauuggcuaucacgcgaauaacagcacggauaccguugacacaguguuggagaaaaauguaacugugacccauuccgucaacuuacuggaagauaagcacaaugggaaacuauguaagcucagaggaguggcuccccugcaucuugguaaaugcaacauagccggcuggauccuggggaauccugagugugaaucuuugucaacagcaaguagcugguccuacauuguugagaccucuucgucagacaacggaacuugcuauccaggcgauuuuaucgacuacgaggagcucagggagcagcugagcaguguguccucuuucgaacgguuugagauuuucccgaagacaagcuccuggcccaaucacgauucaaacaagggugucaccgccgcuuguccucaugcaggggccaaaaguuuuuauaagaaucugaucuggcucgugaaaaagggaaacagcuacccaaaauuaucuaaguccuauauaaaugacaagggcaaagaaguacugguucuuuggggcauccaccaccccucaacgagcgcugaucaacagaguuuguaccagaacgccgacgcguacguguucgucgggucuuccaaguauagcaaaaaguuuaaaccugagauugcaauccgcccaaaggugcgagaucaggagggacguaugaauuacuauuggacucugguggaacccggugacaaaauuaccuucgaggccacaggcaaccuagucguuccuagauacgcuuuugccauggaaaggaacgcagggucgggaaucauaauuucugauacuccagugcaugacugcaauaccacaugucaaaccccgaagggcgcuaucaacacgucccuccccuuccagaauauucacccuaucacuaucgguaagugcccaaaacauguaaagucaacaaaacugcggcuugccaccgggcugcgcaacgugcccaguauucagagcagaggauuguuuggcgcgauagccggcuucaucgaagggggauggacugguauggucgacggcugguauggguaccaccaccagaaugaacaaggauccggcuaugcagcugaucucaagucuacacagaacgccauugacgagaucaccaauaaagugaacagcguuauagagaagaugaauacgcaguuuaccgcuguggguaaggaauuuaaccaucuggagaaaaggauugaaaauuuaaacaagaaagucgaugacggguuccuggauaucuggacauacaaugccgagcuccuugugcuguuggaaaacgagcggacucuagacuaccacgauucaaauguaaagaaccuguaugagaaaguucgcagucagcucaagaacaaugcaaaggaaaucggcaacggauguuucgaguucuaccauaaaugcgacaauaccuguauggaauccgugaagaacggcacauaugauuacccuaaauauagcgaggaagccaagcugaaucgagaggagauugacggggucaaacuugaaucuacuagaaucuaccaaauucuggcuauauauucaaccguggcgaguagcuugguccucgugguuucccugggagcaaucucuuuuuggaugugcucgaacgguagcuuacagugcaggauuuguaucuga

SEQ ID NO: 131614 - RNA, 1701 nt, Artificial Sequence; identical to SEQ ID NO: 130897
  derived and/or modified CDS sequence (opt3) from hemagglutinin__InfluenzaA__ACY77914

SEQ ID NO: 131615 - RNA, 1701 nt, Artificial Sequence
  derived and/or modified CDS sequence (opt3) from hemagglutinin__InfluenzaA__ACY77924
augaaggccauccuggugguccuccuuuacaccuucgcuacagcaaacgccgacacucugugcauuggcuaucacgcgaauaacagcacggauaccguugacacaguguuggagaagaauguaacugugacccauuccgucaacuuacuggaagauaagcacgacgggaaacuauguaagcucagaggaguggcuccccugcaucuugguaaaugcaauauagccggcuggauccuggggaacccugagugugaaucuuugucaacagcaaguagcugguccuacauuguugagaccucuucgucagauaauggaacuugcuauccaggcgacuuuaucgauuacgaggagcucagggagcagcugagcaguguguccucuuucgaacgguuugagauuuucccgaagacaagcuccuggcccaaccacgacucaaauaagggugucaccgccgcuuguccucaugcaggggccaaaaguuuuuauaagaaccugaucuggcucgugaaaaagggaaauagcuacccaaaauuaucuaaguccuauauaaacgauaagggcaaagaaguacugguucuuuggggcauccaccaccccucaacgagcgcugaccaacagaguuuguaccagaaugccgaugcguacguguucgucgggacuucucgcuauuccaagaaauuuaagccugagauugcaauccgaccaaaagugcgugaccaggagggaagaaugaacuacuauuggacccugguggaacccggugauaagauuacauucgaggccacuggcaaucuagucguuccuagguacgcuuuugccauggaacggaacgcagggagcggaaucauaauuucggacaccccagugcaugacugcaacacaaccugucaaacgccgaaaggcgcuaucaauacuucucuccccuuccagaacauucacccuaucacaaucgguaagugcccaaaguauguaaaauccaccaagcugcgccuugccacugggcugagaaaugugcccucaauucagaguaggggauuguuuggcgcgauagccggcuucaucgaagggggauggacagguauggucgauggcugguacggguaucaucaccagaacgaacaaggaagcggcuacgcagcugaccucaaauccacccagaaugccauugaugagaucacgaacaagguaaauucuguuauagagaaaaugaacacccaguuuacagcuguggguaaggaguucaaucaccuggaaaagcggauugaaaacuuaaauaaaaaggucgacgauggguuccuggacaucuggacuuacaacgccgagcuccuugugcuguuggaaaaugagcgcacccuagauuaucaugacagcaacgugaaaaaucuguacgagaagguucgaucacagcucaaaaacaacgcaaaggaaaucggcaauggauguuuugaguucuaucacaagugcgauaacacauguauggaaagugugaaaaauggcacuuacgacuauccuaaguacuccgaggaagccaaacugaacagagaggagauugauggggucaaacuugaaagcaccaggaucuaucaaauucuggcuauauacucuacaguggcgucaaguuugguccucgugguuagccugggagcaaucuccuuuuggaugugcucuaaugguucguuacagugccggauuuguaucuga

SEQ ID NO: 131616 - RNA, 1701 nt, Artificial Sequence; identical to SEQ ID NO: 131465
  derived and/or modified CDS sequence (opt3) from hemagglutinin__InfluenzaA__ACY77934

SEQ ID NO: 131617 - RNA, 1701 nt, Artificial Sequence
  derived and/or modified CDS sequence (opt3) from hemagglutinin__InfluenzaA__ACY77944
augaaggccauccuggugguccuccuuuacaccuucgcuacagcaaacgccgacacucugugcauuggauaucacgcgaauaacagcacggauaccguugacacaguguuggagaaaaauguaacugugacccauuccgucaacuuacuggaagauaagcacaaugggaaacuauguaagcucagaggaguggcuccccugcaucuugguaaaugcaacauagccggcuggauccuggggaauccugagugugaaucuuugucaacagcaaguagcugguccuacauuguugagaccucuucgucagacaacggaacuugcuauccaggcgauuuuaucgacuacgaagaacucagggagcagcugagcaguguguccucuuucgaacgguuugagauuuucccgaagacaagcuccuggcccaaucacgauucaaacaagggugucaccgccgcuuguccucaugcaggggccaaaaguuuuuauaagaaucugaucuggcucgugaaaaagggaaacagcuacccaaaauuaucuaaguccuauauaaaugacaagggcaaagaaguacugguucuuuggggcauccaccaccccucaacgagcgcugaucaacagaguuuguaccagaacgccgacgcguacguguucgucgggucuucccgcuauagcaagaaauuuaagccugagauugcaauccgaccaaaagugcgugaucaggagggaagaaugaauuacuauuggacucugguggaacccggugacaagauuaccuucgaggccacaggcaaccuagucguuccuagguacgcuuuugccauggaacggaacgcagagucggggaucauaauuucugauacuccagugcaugacugcaauaccacaugucaaaccccgaaaggagcuaucaacacgucccuccccuuccagaauauucacccuaucacuaucggcaagugcccaaaguauguaaaaucaacaaagcugcgccuugccaccggucugagaaacgugcccaguauucagagcaggggguuguuuggagcgauagccggcuucaucgaaggcggguggacuggaauggucgacgguugguacggcuaucaucaccagaaugagcaaggguccggauacgcagcugaucucaaaucuacacagaacgccauugacgagaucaccaauaaggugaacagcguuauagaaaagaugaauacgcaguuuaccgcugugggcaaggaguucaaccaccuggaaaagcggauugagaauuuaaacaaaaaggucgaugacgguuuccuggauaucuggacauacaaugccgaacuccuugugcuguuggagaacgagcgcacucuagacuaucaugauucaaauguuaaaaaccuguacgaaaagguacgaagucagcucaaaaacaaugcaaaggagaucgggaacggcuguuuugaguucuaucacaagugcgacaauaccuguauggaguccgugaaaaacggaacauacgauuauccuaaguacagcgaagaggccaaacugaauagagaggaaauugacggcgucaaacuugagucuacuaggaucuaucaaauucuggcuauauacucaaccguggcgaguagcuugguccucgugguuucccugggggcaaucucuuuuuggaugugcucgaacggcagcuuacagugccggauuuguaucuga

SEQ ID NO: 131618 - RNA, 1701 nt, Artificial Sequence; identical to SEQ ID NO: 130704
  derived and/or modified CDS sequence (opt3) from hemagglutinin__InfluenzaA__ACY77954

SEQ ID NO: 131619 - RNA, 1701 nt, Artificial Sequence; identical to SEQ ID NO: 130704
  derived and/or modified CDS sequence (opt3) from hemagglutinin__InfluenzaA__ACY77964

SEQ ID NO: 131620 - RNA, 1701 nt, Artificial Sequence; identical to SEQ ID NO: 130704
  derived and/or modified CDS sequence (opt3) from hemagglutinin__InfluenzaA__ACY77974

SEQ ID NO: 131621 - RNA, 1701 nt, Artificial Sequence; identical to SEQ ID NO: 130704
  derived and/or modified CDS sequence (opt3) from hemagglutinin__InfluenzaA__ACY77984

SEQ ID NO: 131622 - RNA, 1701 nt, Artificial Sequence; identical to SEQ ID NO: 130704
  derived and/or modified CDS sequence (opt3) from hemagglutinin__InfluenzaA__ACY77994

SEQ ID NO: 131623 - RNA, 1701 nt, Artificial Sequence
  derived and/or modified CDS sequence (opt3) from hemagglutinin__InfluenzaA__ACY79633
augaaggagauccuggugguccuccuuuacaccuucgccacagcuaacgcagacacucugugcauuggcuaucacgccaauaacagcacggauaccguugacacaguguuggagaaaaauguaacugugacccauuccgucaacuuacuggaagauaagcacaaugggaaacuauguaagcucagaggaguggcgccccugcaucuugguaaaugcaacauagcuggcuggauccuggggaauccugaaugugagucuuugucaacagccaguagcugguccuacauuguugaaaccucuucgucagacaacggaacuugcuauccaggcgauuuuaucgacuacgaggagcucagggaacagcugagcaguguguccucuuucgagcgguuugaaauuuucccgaagacaagcuccuggcccaaucacgauucaaacaagggugucaccgcagccuguccucaugcuggggcaaaaaguuuuuauaagaaucugaucuggcucgugaaaaagggaaacagcuacccaaaauuaucuaaguccuauauaaaugacaagggcaaagagguacugguucuuuggggcauccaccaccccucaacgagcgccgaucaacagaguuuguaccagaacgcugacgccuacguguucgucgggacuucucgcuauuccaagaaauuuaagccugagauugcgauccgaccaaaagugcgugaucaggaaggaagaaugaauuacuauuggacccugguggagcccggugacaagauuacauucgaagcaacuggcaaccuagucguuccuagguacgccuuugcuauggagcggaacgcccgcagcgggaucauaauuucggauaccccagugcaugacugcaauacaaccugucaaacgccgaaaggagcaaucaacacuucucuccccuuccagaauauucacccuaucacaaucggcaagugcccaaaguauguaaaauccaccaagcugagacuugcuacuggucugaggaacgugcccucaauucagagucggggguuguuuggagccauagcgggcuucaucgaaggcggguggacaggaauggucgacgguugguacggcuaucaucaccagaaugagcaagggagcggauacgccgcagaucucaaauccacccagaacgcuauugacgagaucacgaauaaggugaacucuguuauagaaaagaugaauacccaguuuacagccgugggcaaggaguucaaccaccuggaaaagcgcauugagaauuuaaacaaaaaggucgaugacgguuuccuggauaucuggacuuacaaugcugaacuccuugugcuguuggagaacgagcgaacccuagacuaucaugauagcaauguuaaaaaccuguacgaaaagguaagaucacagcucaaaaacaaugccaaggagaucgggaacggcuguuuugaguucuaucacaagugcgacaauacauguauggaaagugugaaaaacggaacuuacgauuauccuaaguacuccgaagaggcaaaacugaauagggaggaaauugacggcgucaaacuugagagcacccggaucuaucaaauucuggccauauacucuacaguggcuucaaguuugguccucgugguuagccugggggcgaucuccuuuuggaugugcucuaacggaucguuacagugccguauuuguaucuga

SEQ ID NO: 131624 - RNA, 1701 nt, Artificial Sequence; identical to SEQ ID NO: 131515
  derived and/or modified CDS sequence (opt3) from hemagglutinin__InfluenzaA__ACZ01953

SEQ ID NO: 131625 - RNA, 1701 nt, Artificial Sequence
  derived and/or modified CDS sequence (opt3) from hemagglutinin__InfluenzaA__ACZ05050
augaaggccauccuggugguccuccuuuacaccuucgcuacagcaaacgccgacacucugugcauuggcuaucacgcgaauaacagcacggauaccguugacacaguguuggagaaaaauguaacugugacccauuccgucaacuuacuggaagauaagcacaaugggaaacuauguaagcucagaggaguggcuccccugcaucuugguaaaugcaacauagccggcuggauccuggggaauccugagugugaaucuuugucaacagcaaguagcugguccuacauuguugagaccucuucgucagacaacggaacuugcuauccaggcgauuuuaucgacuacgaggagcucagggagcagcugagcaguguguccucuuucgaacgguuugagauuuucccgaagacaagcuccuggcccaaucacgauucaaacaagggugucaccgccgcuuguagucaugcaggggccaagagcuuuuauaagaaucugaucuggcucgugaaaaagggaaacucuuacccuaaauuauccaagucauauauaaaugacaagggcaaagaaguacugguucuuuggggcauccaccacccaagcacgagugcugaucaacagucuuuguaccagaacgccgacgcguacguguucgucggguccagccgcuauucgaagaaauuuaagcccgagauugcaauccgaccuaaagugcgugaucaggagggaagaaugaauuacuauuggacucugguggaaccaggugacaagauuaccuucgaggccacaggcaaccuagucguucccagguacgcuuuugccauggaacggaacgcagggucuggaaucauaauuuccgauacuccugugcaugacugcaauaccacaugucaaaccccaaaaggcgcuaucaacacgucacucccguuccagaauauucaccccaucacuaucgguaagugcccuaaguauguaaaaaguacaaagcugcgccuugccaccgggcugagaaacgugccaagcauucaguccaggggauuguuuggcgcgauagccggcuucaucgaagggggauggacugguauggucgacggcugguacggguaucaucaccagaaugaacaaggaucuggcuacgcagcugaucucaaaagcacacagaacgccauugacgagaucaccaauaaggugaacucaguuauagagaaaaugaauacgcaguuuaccgcuguggguaaggaguucaaccaccuggaaaagcggauugaaaauuuaaacaaaaaggucgaugacggguuccuggauaucuggacauacaaugccgagcuccuugugcuguuggaaaacgagcgcacucuagacuaucaugauaguaauguuaaaaaccuguacgagaagguacgaucccagcucaaaaacaaugcaaaggaaaucggcaacggauguuuugaguucuaucacaagugcgacaauaccuguauggaaagcgugaaaaacggcacauacgauuaucccaaguacucugaggaagccaaacugaauagagaggagauugacggggucaaacuugaaucaacuaggaucuaucaaauucuggcuauauacaguaccguggcgagcuccuugguccucgugguuucucugggagcaaucucguuuuggaugugcagcaacgguuccuuacagugccggauuuguaucuga

SEQ ID NO: 131626 - RNA, 1701 nt, Artificial Sequence
  derived and/or modified CDS sequence (opt3) from hemagglutinin__InfluenzaA__ACZ05061
auggaggccauccuggugguccuccuuuacaccuucacaacugcuaacgcagacacgcugugcauuggcuaucacgccaauaacagcaccgauacaguugacacuguguuggaaaagaauguaaccgugacacauuccgucaacuuacuggaggauaaacacaaugggaagcuauguaaacucagaggaguggcgccccugcaucuugguaagugcaacauagcuggcuggauccuggggaauccugaaugugagucuuugucaaccgccaguagcugguccuacauuguugaaacuucuucgucagacaacggaacaugcuauccaggcgauuuuaucgacuacgaggagcucagggaacagcugagcaguguguccucuuucgagcgguuugaaauuuucccgaaaaccagcuccuggcccaaucacgauucaaacaagggugucacggcagccuguccucaugcuggggcaaagaguuuuuauaaaaaucugaucuggcucgugaagaaaggaaacagcuacccaaaguuaucuaaauccuauauaaaugacaagggcaaggagguacugguucuuuggggcauccaccaccccucaacuagcgccgaucaacagaguuuguaccagaacgcugacgccuacguguucgucgggucuucccgcuauagcaaaaaguuuaaaccugagauugcgauccgaccaaaggugcgugaucaggaaggaagaaugaauuacuauuggacccugguggagcccggugacaaaauuacauucgaagcaacuggcaaccuagucguuccuagguacgccuuugcuauggagcggaacgccgggucgggaaucauaauuucugauaccccagugcaugacugcaauacaaccugucaaacgcucaagggcgcaaucaacacuucccugccguuccagaauauucaccccaucacaaucgguaaaugcccuaaguauguaaagucaaccaaacuucgccuggcuacuggguugagaaacgugccaaguauucagagcaggggacucuuuggcgccauagcgggcuucaucgaagggggauggacagguauggucgacggcugguacggguaucaucaccagaaugagcaaggauccggcuacgccgcagaucugaagucuacccagaacgcuauugacgagaucacgaauaaagugaacagcguuauagaaaagaugaauacccaguuuacagccguggguaaagaguucaaccacuuagaaaagcggauugagaaucugaacaagaaagucgaugacggguuccucgauaucuggacuuacaaugcugaacuucugguguugcuagagaacgagcgcacccuggacuaucaugauucaaauguaaagaaccucuacgaaaaaguucgaagucagcugaagaacaaugccaaagagaucggcaacggauguuuugaguucuaucacaagugcgacaauacauguauggaauccgugaagaacggcacuuacgauuaucccaaauacagcgaagaggcaaaacuuaauagagaggaaauugacggggucaagcuggagucuaccaggaucuaucaaauuuuggccauauacucaacaguggcuaguagccucguccuggugguuuccuuaggagcgaucucuuuuuggaugugcucgaacgguagccugcagugccggauuuguaucuga

SEQ ID NO: 131627 - RNA, 1701 nt, Artificial Sequence; identical to SEQ ID NO: 130704
  derived and/or modified CDS sequence (opt3) from hemagglutinin__InfluenzaA__ACZ05071

SEQ ID NO: 131628 - RNA, 1701 nt, Artificial Sequence; identical to SEQ ID NO: 130704
  derived and/or modified CDS sequence (opt3) from hemagglutinin__InfluenzaA__ACZ05081

SEQ ID NO: 131629 - RNA, 1701 nt, Artificial Sequence; identical to SEQ ID NO: 130704
  derived and/or modified CDS sequence (opt3) from hemagglutinin__InfluenzaA__ACZ05091

SEQ ID NO: 131630 - RNA, 1701 nt, Artificial Sequence; identical to SEQ ID NO: 130704
  derived and/or modified CDS sequence (opt3) from hemagglutinin__InfluenzaA__ACZ05101

SEQ ID NO: 131631 - RNA, 1701 nt, Artificial Sequence; identical to SEQ ID NO: 130704
  derived and/or modified CDS sequence (opt3) from hemagglutinin__InfluenzaA__ACZ05111

SEQ ID NO: 131632 - RNA, 1701 nt, Artificial Sequence
  derived and/or modified CDS sequence (opt3) from hemagglutinin__InfluenzaA__ACZ05121
augaaggccauccuggugguccuccuuuacaccuucgcuacagcaaacgccgacacucugugcauuggcuaucacgcgaauaacagcacggauaccguugacacaguguuggagaaaaauguaacugugacccauuccgucaacuuacuggaagauaagcacaaugggaaacuauguaagcucagaggaguggcuccccugcaucuugguaaaugcaacauagccggcuggauccuggggaauccugagugugaaucuuugucaacagcaaguagcugguccuacauuguugagaccucuucgucagacaacggaacuugcuauccaggcgauuuuaucgacuacgaggagcucagggagcagcugagcaguguguccucuuucgaacgguuugagauuuucccgaagacaagcuccuggcccaaucacgauucaaacaagggugucaccgccgcuuguccucaugcaggggccaaaaguuuuuauaauaaccugaucuggcucgugaagaaaggaaauagcuacccaaaguuaucuaaauccuauauaaacgacaagggcaaggaaguacugguucuuuggggcauccaccaccccucaacgagcgcugaucaacagaguuuguaccagaaugccgacgcguacguguucgucgggucuucccgcuauagcaaaaaguuuaaaccugagauugcaauccgaccaaaggugcgugaucaggagggaagaaugaacuacuauuggacucugguggaacccggugacaaaauuaccuucgaggccacaggcaaccuagucguuccuagguacgcuuuugccauggaacggaaugcagggucgggaaucauaauuucugauacuccagugcaugacugcaacaccacaugucaaaccccgaagggcgcuaucaauacgucccuccccuuccagaacauucacccuaucacuaucgguaaaugcccaaaguauguaaagucaacaaaacugcgccuugccaccgggcugagaaaugugcccaguauucagagcaggggauuguuuggcgcgauagccggcuucaucgaagggggauggacugguauggucgacggcugguacggguaucaucaccagaacgaacaaggauccggcuacgcagcugaucucaagucuacacagaaugccauugacgagaucaccaacaaagugaauagcguuauagagaagaugaacacgcaguuuaccgcuguggguaaagaguucaaucaccuggaaaagcggauugaaaacuuaaauaagaaagucgaugacggguuccuggauaucuggacauacaacgccgagcuccuugugcuguuggaaaaugagcgcacucuagacuaucaugauucaaacguaaagaaccuguacgagaaaguucgaagucagcucaagaauaacgcaaaagaaaucggcaauggauguuuugaguucuaucacaagugcgacaacaccuguaugggcuccgugaagaaugggacauacgauuauccuaaauacagcgaagaggccaagcugaacagagaagagauugacggagucaaacuugagucuacuaggaucuaucaaauucuggcuauauacucaaccguggcgaguagcuugguccucgugguuucccugggugcaaucucuuuuuggaugugcucgaauggcagcuuacagugccggauuuguaucuga

SEQ ID NO: 131633 - RNA, 1701 nt, Artificial Sequence; identical to SEQ ID NO: 130704
  derived and/or modified CDS sequence (opt3) from hemagglutinin__InfluenzaA__ACZ05131

SEQ ID NO: 131634 - RNA, 1701 nt, Artificial Sequence; identical to SEQ ID NO: 130704
  derived and/or modified CDS sequence (opt3) from hemagglutinin__InfluenzaA__ACZ05141

SEQ ID NO: 131635 - RNA, 1701 nt, Artificial Sequence; identical to SEQ ID NO: 130704
  derived and/or modified CDS sequence (opt3) from hemagglutinin__InfluenzaA__ACZ05151

SEQ ID NO: 131636 - RNA, 1701 nt, Artificial Sequence
  derived and/or modified CDS sequence (opt3) from hemagglutinin__InfluenzaA__ACZ05172
augaagaccaucauugcccugagcuacauacucugccuuguguucgcucagaaacugcccggcaacgacaauuccacagcaacuuuguguuuagggcaccaugccgucccuaacggaacgaucguuaagaccauuacaaaugaucaaaucgaggugacuaacgcgaccgaacugguacagucuucaaguacaggugagauuugcgacagcccacaccagauccuagauggcaaaaauuguacccucauagacgcucugcuuggggauccgcagugcgacggauuucaaaacaagaaaugggaucuguucguggaaagauccaaggccuauucuaauuguuaccccuaugacgucccugauuacgcaucguugaggucacucguggccagcaguggcacucuggaguuuaacaaugaauccuucaacuggacagguguuacccaggacgggacgucuagcgcuugcauccggcgcuccaagaauagcuuuuucagucgacugaacuggcucacucauuuaaauuuuaaauauccagcacugaacgugaccaugcccaauaacgagcaguucgauaagcuguacauuuggggaguccaccauccuggcacagacaaagaucagaucuuuuuguaugcccaagcuagcggccguauuacugugucuaccaagagaucccagcagacagccaucccaaacauagggucaaggccccggguacgcaauauuccuagcagaaucaguauuuacuggaccaucguuaaaccaggagacauccugcuaauuaacucuacggguaaucucauagcgccgaggggcuacuucaagauccgguccgggaagucaucgauuaugcgcucugacgcacccaucggaaaauguaacuccgagugcauaacuccuaauggcucaauuccaaacgauaagcccuuucagaaugugaaccgaaucacauauggugccuguccuagauacgucaaacaaaauacccugaaacuugcuacugggaugaggaacgugccagaaaaacagacacggggaaucuucggcgccauugcaggcuuuaucgagaaugggugggaaggaaugguggacgguugguauggcuuccgucaccagaacagugaggggcgcggacaagcugccgaucuuaagagcacccaggcggccauugaccagauaaauggcaaauugaacagacucaucgguaagacgaaugagaaguuccaccagauugaaaaagaguuuuccgaagucgaggggaggauccaagaucuggaaaaguacguugaggacaccaaaaucgauuuauggucuuauaacgcagagcugcucguggcucuugaaaaccagcauacaauugaccugacugauagcgagaugaauaaguuguucgaaaagaccaagaagcagcuacgggagaacgccgaagacaugggcaauggaugcuuuaaaauauaccacaagugugauaacgcuugcaucggcucaauucgaaaugggacauaugaccaugacguauaccgcgaugaggcccugaacaauagauuccagaucaaaggaguggagcucaagagugguuacaaagacuggauucuguggaucuccuuugcaauaagcugcuuccuucugugugucgccuugcucggcuuuaucaugugggcuugccaaaaggggaacauuagguguaauaucugcauuuga

SEQ ID NO: 131637 - RNA, 1698 nt, Artificial Sequence; identical to SEQ ID NO: 131179
  derived and/or modified CDS sequence (opt3) from hemagglutinin__InfluenzaA__ACZ05194

SEQ ID NO: 131638 - RNA, 1701 nt, Artificial Sequence; identical to SEQ ID NO: 131636
  derived and/or modified CDS sequence (opt3) from hemagglutinin__InfluenzaA__ACZ05205

SEQ ID NO: 131639 - RNA, 1701 nt, Artificial Sequence
  derived and/or modified CDS sequence (opt3) from hemagglutinin__InfluenzaA__ACZ05216
augaagaccaucauugcccugagcuacauacucugccuuguguucgcucagaaaauccccggcaacgacaauaacacagcaacucuguguuuggggcaccaugccgucccuaauggaacgauuguuaagaccaucacaaacgaucaaauugaggugacuaaugcgaccgaauuaguacaguccucuucaacaggugagaucugcgacaguccacaccagauacuggauggcgaaaacuguacccuaaucgacgcucuccugggggauccgcagugcgacggauuucaaaauaaaaagugggaucuuuucguggagagaagcaaagccuauuccaacuguuaccccuaugacgucccugauuacgcaucucugaggucguugguggccucaagcggcacucucgaauuuaauaacgagaguuucaauuggacagguguuacccagaacgggacguccucugcuugcauucggcgcagcaauaacuccuuuuucucacgacugaauuggcugacucaucucaaguuuaaguauccagcauuaaacgugaccaugcccaacaaugagcaguucgacaaacuguacaucuggggaguccaccauccuggcacagauaacgaccagauuuuucuuuaugcccaagcuaguggccguaucacugugagcaccaagagaucucagcagacaguaauaccaaauauuggguccaggccccggguucgcaacaucccuucaagaauuagcaucuacuggaccaucgugaaaccaggagauauuuugcugauaaauaguacggguaaccuaaucgccccgaggggcuacuucaagauucggucugggaaauccagcaucaugcgcucggacgcgcccauaggaaaguguaauucugaaugcauuacuccuaacggcuccaucccaaaugacaagcccuuucagaacgucaaucgaaucacauauggugcauguccuagauacgugaaacaaaacacccucaagcuggccacugggaugaggaaugugccagagaaacagacacggggaauuuucggcgcuaucgccggcuuuauugaaaacgggugggagggaauggucgaugguugguauggcuuccgucaccaaaauucagaggggcgcggacaggcagcugaccuuaagaguacccaggccgcgauagaucagaucaacggcaaacugaacagauugauugguaagacgaaugaaaaauuccaccagaucgagaaggaauuuagcgagguugaagggaggauccaagaccucgagaaguacguggaggauaccaaaauugaccugugguccuauaacgccgaauuacugguagcacucgagaaucagcauacaauagaucuuacugacucugaaaugaacaagcuguucgagaaaaccaagaaacaguugcgggaaaaugcugaggauaugggcaacggaugcuuuaagaucuaccacaagugugacaaugccugcauuggcagcauccgaaacgggacauaugaucaugacguguaccgcgacgaggcucuaaauaacagauuccagauuaaaggagucgaacugaagucagguuacaaagauuggauccucuggauaaguuuugccaucuccugcuuccugcuuuguguggcacuguugggcuuuauuaugugggccugccaaaaggggaauaucagguguaacauuugcaucuga

SEQ ID NO: 131640 - RNA, 1701 nt, Artificial Sequence; identical to SEQ ID NO: 131636
  derived and/or modified CDS sequence (opt3) from hemagglutinin__InfluenzaA__ACZ05227

SEQ ID NO: 131641 - RNA, 1701 nt, Artificial Sequence
  derived and/or modified CDS sequence (opt3) from hemagglutinin__InfluenzaA__ACZ05238
augaagaccaucauugcccugagcuacauacucugccuuguguucgcucagaaacugcccggcaacgacaauuccacagcaacuuuguguuuagggcaccaugccgucccuaacggaacgaucguuaagaccauuacaaaugaucaaaucgaggugacuaacgcgaccgaacugguacagucuucaaguacaggugagauuugcgacagcccacaccagauccuagauggcaaaaauuguacccucauagacgcucugcuuggggauccgcagugcgacggauuucaaaacaagaaaugggaucuguucguggaaagauccaaggccuauucuaauuguuaccccuaugacgucccugauuacgcaucguugaggucacucguggccagcaguggcacucuggaguuuaacaaugaauccuucaacugggcugguguuacacagaaugggaccucuagcgcaugcauccggcgcuccaagaacucauuuuucagucgacugaauuggcucacgcauuuaaacuuuaaauauccagcccugaaugugacuaugcccaacaacgagcaguucgacaagcuguacauuuggggaguccaccauccuggcaccgauaaagaccagaucuuuuuguaugcucaagccagcggccguauuacagugucuacuaagagaucccagcagaccgcgaucccaaauauagggucaaggccccggguacgcaacauuccuagcagaaucaguauuuacuggacaaucguuaaaccaggagauauccugcuaauuaauucuaccgguaaccucauagcaccgaggggcuacuucaagauccgguccggaaagagcucgauuaugcgcucugacgcccccaucgggaaauguaauuccgagugcauaacgccuaacggcucaauuccaaaugacaagcccuuucagaacgugaaucgaaucacuuauggugcuuguccuagauacgucaaacaaaacacacugaaacuugccaccgggaugaggaaugugccagaaaaacagacucggggaaucuucggcgcaauugcuggcuuuaucgagaacgggugggaaggaaugguggaugguugguauggcuuccgucaccagaauagugaggggcgcggacaagccgcggaccuuaagagcacacaggccgcaauugaucagauaaacggcaaauugaauagacucaucgguaagaccaacgagaaguuccaccagauugaaaaagaguuuuccgaagucgaggggaggauccaagaccuggaaaaguacguugaggauacgaaaaucgacuuauggucuuauaacgcugagcugcucguggcccuugaaaaucagcauaccauugaucugacagacagcgagaugaacaaguuguucgaaaagacuaagaagcagcuacgggagaaugcugaagauaugggcaacggaugcuuuaaaauauaccacaagugugacaaugccugcaucggcucaauucgaaacgggaccuaugaucaugacguauaccgcgacgaggcacugaauaacagauuccagaucaaaggaguggagcucaagagugguuacaaagauuggauucuguggaucuccuuugccauaagcugcuuccuucugugugucgcuuugcucggcuuuaucaugugggcgugccaaaaggggaauauuagguguaacaucugcauuuga

SEQ ID NO: 131642 - RNA, 1701 nt, Artificial Sequence; identical to SEQ ID NO: 131636
  derived and/or modified CDS sequence (opt3) from hemagglutinin__InfluenzaA__ACZ05249

SEQ ID NO: 131643 - RNA, 1701 nt, Artificial Sequence; identical to SEQ ID NO: 131636
  derived and/or modified CDS sequence (opt3) from hemagglutinin__InfluenzaA__ACZ05260

SEQ ID NO: 131644 - RNA, 1701 nt, Artificial Sequence
  derived and/or modified CDS sequence (opt3) from hemagglutinin__InfluenzaA__ACZ05271
augaagaccaucauugcccugagcuacauacucugccuuguguucgcucagaaacugcccggcaacgacaauuccacagcaacuuuguguuuagggcaccaugccgucccuaacggaacgaucguuaagaccauuacaaaugaucaaaucgaggugacuaacgcgaccgaacugguacagucuucaaguacaggugagauuugcgacagcccacaccagauccuagauggcgaaaauuguacccucauagacgcucugcuuggggauccgcagugcgacggauuucaaaacaaaaagugggaucuguucguggagagauccaaagccuauucuaauuguuaccccuaugacgucccugauuacgcaucguugaggucacucguggccagcaguggcacucuggaauuuaacaaugaguccuucaacuggacagguguuacccagaaugggacgucuagcgcuugcauccggcgcuccaacaauucauuuuucagucgacugaacuggcucacucauuuaaaguuuaaguauccagcacugaaugugaccaugcccaacaacgagcaguucgacaaacuuuacauuuggggaguccaccauccuggcacagauaaugaccagaucuuuuuguaugcccaagcuagcggccguauuacugugucuaccaagagaucccagcagacaguaaucccaaacauagggucaaggccccggguucgcaauauuccuagcagaaucaguauuuacuggaccaucgugaaaccaggagauauccugcuaauuaacucuacggguaaucucauagccccgaggggcuacuucaagauccgguccgggaaaagcucgauuaugcgcucugacgcgcccaucggaaaguguaacuccgaaugcauaacuccuaauggcucaauuccaaacgacaagcccuuucagaaugucaaccgaaucacauauggugcauguccuagauacgugaaacaaaauacccugaagcuggccacugggaugaggaacgugccagagcggcagacacguggaaucuucggcgcuauugccggcuuuaucgaaaaugggugggagggaauggucgaugguugguauggcuuccgccaccagaacagugaggggagaggacaagcagcugaccuuaaaagcacccaggccgcgauugaucagauaaauggcaaguugaacaggcucaucgguaaaacgaacgaaaaguuccaccagauugagaaagaauuuuccgagguugaagggcggauccaagaccuggagaaguacguggaggauaccaagaucgacuuauggucuuauaaugccgaacugcucguagcacuugagaaccagcauacaauugaucugacugacagcgaaaugaauaaauuguucgagaagaccaaaaagcagcuacgagaaaacgcugaggauaugggcaauggaugcuuuaaaauauaccacaagugugacaacgccugcaucggcucaauucgcaaugggacauaugaucaugacguguacagagacgaggcucugaacaauagguuccagaucaagggagucgaacucaaaagugguuacaaggauuggauucuguggaucuccuuugccauaagcugcuuccuucuguguguggcauugcucggcuuuaucaugugggccugccaaaaagggaacauucgguguaauaucugcauuuga

SEQ ID NO: 131645 - RNA, 1701 nt, Artificial Sequence
  derived and/or modified CDS sequence (opt3) from hemagglutinin__InfluenzaA__ACZ05282
augaagaccacaaucgcccugagcuacauucucugccuuguguucgcucagaaacugcccggcaacgacaauuccacugcaacguuguguuuagggcaccaugccgucccuaacggaaccauaguuaagacaaucacuaaugaucaaauugaggugaccaacgcgacagaacugguacagucuucaaguaccggugagaucugcgacagcccacaccagauucuagauggcgaaaauuguacucucaucgacgcucugcuuggggauccgcagugcgacggauuucaaaacaaaaagugggaucuguucguggagagauccaaagccuauucuaauuguuaccccuaugacgucccugauuacgcaucguugaggucacucguggccagcaguggcacacuggaauuuaacaaugaguccuucaacuggaccgguguuacgcagaaugggacuucuagcgcuugcauacggcgcuccaacaauucauuuuucagucgacugaacuggcucacccauuuaaaguuuaaguauccagcacugaaugugacaaugcccaacaacgagcaguucgacaaacuuuacaucuggggaguccaccauccuggcacugauaaugaccagaucuuuuuguaugcccaagcuagcggccguauuaccgugucuacaaagagaucccagcagaccguaauuccaaacaucgggucaaggccccggguucgcaauauaccuagcagaauuaguaucuacuggacgauugugaaaccaggagauauccugcuaaucaacucuacugguaaucucauugccccgaggggcuacuucaagauacaguccgggaaaagcucgaucaugcggucugacgcgcccauuggaaaguguaacuccgaaugcaucacaccuaauggcucaauaccaaacgacaagcccuuucaaaaugucaaccgcauuaccuauggugcauguccucgauacgugaaacagaauacucugaagcuggccacagggaugagaaacgugccagagaaacagaccaggggaaucuucggcgcuaucgccggcuuuauugaaaaugggugggagggaauggucgaugguugguauggcuuccggcaccaaaacagugaggggcguggacaggcagcugaccuuaagagcacgcaggccgcgaucgaucagauuaauggcaaauugaaccgccucauagguaagaccaacgaaaaauuccaccaaaucgagaaggaauuuuccgagguugaagggaggauucaggaccuggagaaguacguggaggauacaaaaaucgacuuauggucuuauaaugccgaacugcucguagcacuugagaaccagcauacuaucgaucugaccgacagcgaaaugaauaaguuguucgagaaaacaaagaaacagcuaagagaaaacgcugaggauaugggcaauggaugcuuuaagauuuaccacaagugugacaacgccugcauaggcucaauccggaaugggacuuaugaucaugacguguaccgagacgaggcucugaacaaucgcuuccaaauuaaaggagucgaacucaagagugguuacaaagauuggauccuguggauuuccuuugccaucagcugcuuccuucuguguguggcauugcucggcuuuauaaugugggccugccagaaggggaacaucagauguaauauuugcaucuga

SEQ ID NO: 131646 - RNA, 1701 nt, Artificial Sequence; identical to SEQ ID NO: 131636
  derived and/or modified CDS sequence (opt3) from hemagglutinin__InfluenzaA__ACZ05304

SEQ ID NO: 131647 - RNA, 1701 nt, Artificial Sequence; identical to SEQ ID NO: 131459
  derived and/or modified CDS sequence (opt3) from hemagglutinin__InfluenzaA__ACZ05315

SEQ ID NO: 131648 - RNA, 1701 nt, Artificial Sequence; identical to SEQ ID NO: 131636
  derived and/or modified CDS sequence (opt3) from hemagglutinin__InfluenzaA__ACZ05326

SEQ ID NO: 131649 - RNA, 1701 nt, Artificial Sequence
  derived and/or modified CDS sequence (opt3) from hemagglutinin__InfluenzaA__ACZ05337
augaagaccaucauugcccugagcuacauacucugccuuguguucacacagaaacugcccggcaacgacaauuccacugcuacguuguguuuagggcaccaugcagucccuaacggaaccaucguuaagacaauuacuaaugaucaaaucgaggugaccaacgccacagaacugguacagucuucaaguaccggugagauuugcgacagcccacaccagauccuagauggcaaaaauuguacucucauagacgcgcugcuuggggauccgcagugcgacggauuucaaaacaagaaaugggaucuguucguggaaagauccaaggcuuauucuaauuguuaccccuaugacgucccugauuacgccucguugaggucacucguggcaagcaguggcacacuggaguuuaacaaugaacgguucaacuggaccgguguuacgcagaaugggacuuccucugccugcauccgccgaagcaagaacuccuuuuucucacgucugaauuggcucacccauuuaaacuuuaaauauccagcucugaaugugacaaugcccaacaacgagcaguucgacaagcuguacauuuggggaguccaccauccuggcacugauaaagaccagaucuuuuuguaugcacaagccaguggcagaauuaccgugagcacaaagaggucucagcagaccguaaucccaaauauagggucccggccccgcguuagaaacauuccuucaaggaucagcauuuacuggacgaucgugaaaccaggagauauccugcuaauuaguucuacugguaaucucauagcuccgcggggcuacuucaagauccgcuccggaaagagcucgauuaugcgaucugacgcccccaucgggaaauguaacuccgagugcauaacaccuaauggcucaauuccaaacgacaagcccuuucagaaugucaacagaaucaccuauggugcguguccuagguacgugaaacaaaauacucugaaacuugcaacagggaugcggaacgugccagaaaaacagacccguggaaucuucggcgccauugcuggcuuuaucgagaaugggugggaaggaauggucgaugguugguauggcuuccgccaccagaacagugaggggagaggacaagccgcagaccuuaagagcacgcaggcugccauugaucagauaaauggcaaauugaacaggcucaucgguaagaccaaugagaaguuccaccagauugaaaaagaguuuuccgaaguugaggggcggauccaagaccuggaaaaguacguggaggauacaaaaaucgacuuauggucuuauaacgcggagcugcucguagcccuugaaaaccagcauacuauugaucugaccgacagcgagaugaauaaguuguucgaaaagacaaagaagcagcuacgagagaacgcagaagauaugggcaauggaugcuuuaaaauauaccacaagugugacaacgcuugcaucggcucaauucgcaaugggacuuaugaucaugacguguacagagacgaggcccugaacaauagguuccagaucaaaggagucgagcucaagagugguuuuaaagauuggauucuguggaucuccuucgcuauaagcugcuuucuucuguguguggccuugcucggcuucaucaugugggcaugccaaaaggggaacauucgguguaauaucugcauuuga

SEQ ID NO: 131650 - RNA, 1701 nt, Artificial Sequence; identical to SEQ ID NO: 131636
  derived and/or modified CDS sequence (opt3) from hemagglutinin__InfluenzaA__ACZ05348

SEQ ID NO: 131651 - RNA, 1701 nt, Artificial Sequence; identical to SEQ ID NO: 131641
  derived and/or modified CDS sequence (opt3) from hemagglutinin__InfluenzaA__ACZ05359

SEQ ID NO: 131652 - RNA, 1701 nt, Artificial Sequence; identical to SEQ ID NO: 131636
  derived and/or modified CDS sequence (opt3) from hemagglutinin__InfluenzaA__ACZ05370

SEQ ID NO: 131653 - RNA, 1701 nt, Artificial Sequence
  derived and/or modified CDS sequence (opt3) from hemagglutinin__InfluenzaA__ACZ05392
augaagaccaucauugcccugagcuacauacucugccuuguguucgcucagaaacugcccggcaacgacaauuccacagcaacuuuguguuuagggcaccaugccgucccuaacggaacgaucguuaagaccauuacaaaugaucaaaucgaggugacuaacgcgaccgaacugguacagucuucaaguacaggugagauuugcgacagcccacaccagauccuagauggcaaaaauuguacccucauagacgcucugcuuggggauccgcagugcgacggauuucaaaacaagaaaugggaucuguucguggaaagauccaaggccuauucuaauuguuaccccuaugacgucccugauuacgcaucguugaggucacucguggccagcaguggcacucuggaguuuaacaaugaauccuucaacuggacagguguuacccagaauggggcuucuagcgcaugcauccggcgcuccaagaacucauuuuucagucgacugaauuggcucacgcauuuaaacuuuaaauauccagcccugaaugugacuaugcccaacaacgagcaguucgacaagcuguacauuuggggaguccaccauccuggcaccgauaaagaccagaucuuuuuguaugcucaagccagcggccguauuacagugucuacuaagagaucccagcagaccgcgaucccaaauauagggucaaggccccggguacgcaacauuccuagcagaaucaguauuuacuggacaaucguuaaaccaggagauauccugcuaauuaauucuaccgguaaccucauagcaccgaggggcuacuucaagauccgguccggaaagagcucgauuaugcgcucugacgcccccaucgggaaauguaauuccgagugcauaacgccuaacggcucaauuccaaaugacaagcccuuucagaacgugaaucgaaucacuuauggugcuuguccuagauacgucaaacaaaacacacugaaacuugccaccgggaugaggaaugugccagaaaaacagacucggggaaucuucggcgcaauugcuggcuuuaucgagaacgggugggaaggaaugguggaugguugguauggcuuccgucaccagaauagugaggggcgcggacaagccgcggaccuuaagagcacacaggccgcaauugaucagauaaacggcaaauugaauagacucaucgguaagaccaacgagaaguuccaccagauugaaaaagaguuuuccgaagucgaggggaggauccaagaccuggaaaaguacguugaggauacgaaaaucgacuuauggucuuauaacgcugagcugcucguggcccuugaaaaucagcauaccauugaucugacagacagcgagaugaacaaguuguucgaaaagacuaagaagcagcuacgggagaaugcugaagauaugggcaacggaugcuuuaaaauauaccacaagugugacaaugccugcaucggcucaauucgaaacgggaccuaugaucaugacguauaccgcgacgaggcacugaauaacagauuccagaucaaaggaguggagcucaagagugguuacaaagauuggauucuguggaucuccuuugccauaagcugcuuccuucugugugucgcuuugcucggcuuuaucaugugggcgugccaaaaggggaauauuagguguaacaucugcauuuga

SEQ ID NO: 131654 - RNA, 1701 nt, Artificial Sequence; identical to SEQ ID NO: 131636
  derived and/or modified CDS sequence (opt3) from hemagglutinin__InfluenzaA__ACZ05403

SEQ ID NO: 131655 - RNA, 1701 nt, Artificial Sequence
  derived and/or modified CDS sequence (opt3) from hemagglutinin__InfluenzaA__ACZ05436
augaagaccaucauugcccugagcuacauacucugccuuguguucgcucagaaacugcccggcaacgacaauuccacagcaacuuuguguuuagggcaccaugccgucccuaacggaacgaucguuaagaccauuacaaaugaucaaaucgaggugacuaacgcgaccgaacugguacagucuucaaguacaggugagauuugcgacagcccacaccagauccuagauggcaaauccuguacccucauagacgcucugcuuggggauccgcagugcgacggauuucaaaauaagaaaugggaucuguucguggaaagaucuaaggccuauucgaacuguuaccccuaugacgucccugauuacgcaucauugaggagccucguggccaguuccggcacucuggaguuuaauaacgaaucuuucaauuggacagguguuacccagaacgggacgagcuccgcuugcauccggcgcucaaagaauagcuuuuucagucgacugaacuggcucacucauuuaaauuuuaaauauccagcacugaacgugaccaugcccaauaacgagcaguucgacaaacuuuacauuuggggaguccaccauccuggcacagauaaagaccagaucuuuuuguaugcccaggcuucuggccguauuacuguguccaccaagagaucacaacagacagccaucccaaacauagggagcaggccccggguacgcaauauuccuaguagaaucucuauuuacuggaccaucguuaaaccaggagauauccugcuaauuaacuccacggguaaucucauagcgccgaggggcuacuucaagauccggagcgggaagucgucuauuaugcgcuccgacgcacccaucggaaaauguaacucagagugcauaacuccuaauggcaguauuccaaacgacaagcccuuucagaaugugaaccgaaucacauauggugccuguccuagauacgucaaacaaaauacccugaaacuugcuacugggaugaggaacgugccagaaaagcagacacggggaaucuucggcgccauugcaggcuuuaucgagaaugggugggaaggaaugguggaugguugguauggcuuccgucaccagaacagcgaggggcgcggacaagcugccgaccugaaguccacccaggcggccauugaucagauaaauggcaaauugaacagacucaucgguaagacgaaugagaaguuccaccagauugaaaaagaguuuucugaagucgaggggaggauccaagaccuggaaaaguacguugaggauaccaaaaucgacuuauggagcuauaacgcagagcugcucguggcucuugaaaaccagcauacaauugaucugacugacucagagaugaauaaguuguucgaaaagaccaagaagcagcuacgggagaacgccgaagauaugggcaauggaugcuuuaaaauauaccacaagugugacaacgcuugcaucggcaguauucgaaaugggacauaugaucaugacguauaccgcgacgaggcccugaacaauagauuccagaucaaaggaguggagcucaaguccgguuacaaagauuggauucuguggaucagcuuugcaauaucuugcuuccuucugugugucgccuugcucggcuuuaucaugugggcuugccaaaaggggaacauuagguguaauaucugcauuuga

SEQ ID NO: 131656 - RNA, 1701 nt, Artificial Sequence; identical to SEQ ID NO: 131636
  derived and/or modified CDS sequence (opt3) from hemagglutinin__InfluenzaA__ACZ05458

SEQ ID NO: 131657 - RNA, 1701 nt, Artificial Sequence; identical to SEQ ID NO: 131636
  derived and/or modified CDS sequence (opt3) from hemagglutinin__InfluenzaA__ACZ05469

SEQ ID NO: 131658 - RNA, 1701 nt, Artificial Sequence; identical to SEQ ID NO: 131655
  derived and/or modified CDS sequence (opt3) from hemagglutinin__InfluenzaA__ACZ05480

SEQ ID NO: 131659 - RNA, 1701 nt, Artificial Sequence; identical to SEQ ID NO: 131459
  derived and/or modified CDS sequence (opt3) from hemagglutinin__InfluenzaA__ACZ05513

SEQ ID NO: 131660 - RNA, 1701 nt, Artificial Sequence; identical to SEQ ID NO: 131636
  derived and/or modified CDS sequence (opt3) from hemagglutinin__InfluenzaA__ACZ05524

SEQ ID NO: 131661 - RNA, 1701 nt, Artificial Sequence
  derived and/or modified CDS sequence (opt3) from hemagglutinin__InfluenzaA__ACZ05535
augaagaccaucauugcccugagcuacauacucugccuuguguucgcucagaaacugcccggcaacgacaauuccacagcaacuuuguguuuagggcaccaugccgucccuaacggaacgaucguuaagaccauuacaaaugaucaaaucgaggugacuaacgcgaccgaacugguacagucuucaaguacaggugagauuugcgacagcccacaccagauccuagauggcaaaaauuguacccucauagacgcucugcuuggggauccgcagugcgacggauuucaaaacaagaaaugggaucuguucguggaaagauccaaggccuauucuaauuguuaccccuaugacgucccugauuacgcaucguugaggucacucguggccagcaguggcacucuggaguuuaacaaugaauccuucaacuggacagguguuacccagaaugggacgucuagcgcuugcauccggcgcuccaagaacucauuuuucagucgacugaauuggcucacucauuuaaacuuuaaauauccagcacugaaugugaccaugcccaacaacgagcaguucgacaagcuguacauuuggggaguccaccauccuggcacagauaaagaccagaucuuuuuguaugcccaagcuagcggccguauuacugugucuaccaagagaucccagcagacagccaucccaaauauagggucaaggccccggguacgcaacauuccuagcagaaucaguauuuacuggaccaucguuaaaccaggagauauccugcuaauuaauucuacggguaaccucauagcgccgaggggcuacuucaagauccgguccggaaagagcucgauuaugcgcucugacgcacccaucgggaaauguaauuccgagugcauaacuccuaacggcucaauuccaaaugacaagcccuuucagaacgugaaucgaaucacauauggugccuguccuagauacgucaaacaaaacacccugaaacuugcuacugggaugaggaaugugccagaaaaacagacacggggaaucuucggcgccauugcaggcuuuaucgagaacgggugggaaggaaugguggaugguugguauggcuuccgucaccagaauagugaggggcgcggacaagcugccgaccuuaagagcacccaggcggccauugaucagauaaacggcaaauugaauagacucaucgguaagacgaacgagaaguuccaccagauugaaaaagaguuuuccgaagucgaggggaggauccaagaccuggaaaaguacguugaggauaccaaaaucgacuuauggucuuauaacgcagagcugcucguggcucuugaaaaucagcauacaauugaucugacugacagcgagaugaacaaguuguucgaaaagaccaagaagcagcuacgggagaaugccgaagauaugggcaacggaugcuuuaaaauauaccacaagugugacaaugcuugcaucggcucaauucgaaacgggacauaugaucaugacguauaccgcgacgaggcccugaauaacagauuccagaucaaaggaguggagcucaagagugguuacaaagauuggauucuguggaucuccuuugcaauaagcugcuuccuucugugugucgccuugcucggcuuuaucaugugggcuugccaaaaggggaauauuagguguaacaucugcauuuga

SEQ ID NO: 131662 - RNA, 1701 nt, Artificial Sequence; identical to SEQ ID NO: 131661
  derived and/or modified CDS sequence (opt3) from hemagglutinin__InfluenzaA__ACZ05546

SEQ ID NO: 131663 - RNA, 1701 nt, Artificial Sequence; identical to SEQ ID NO: 131636
  derived and/or modified CDS sequence (opt3) from hemagglutinin__InfluenzaA__ACZ05557

SEQ ID NO: 131664 - RNA, 1698 nt, Artificial Sequence
  derived and/or modified CDS sequence (opt3) from hemagglutinin__InfluenzaA__ACZ05579
augaaggugaaacugcucguccuucugugcaccuucacagccacuuacgcugacacgaucuguauuggcuaucacgcaaacaauagcaccgauacaguugacacuguguuggagaagaacguaaccgugacacauuccgucaauuuacuggaaaacucucacaaugggaaacuaugccuccugaagggaauagcgccccuucagcuggguaacuguucaguggccggcuggaucuuggggaauccugagugcgaacuccugauuaguaaagagagcugguccuacaucguugaaaagccaaacccggagaauggaaccuguuaucccggccauuuugcugauuacgaggaacugagagagcaacucucuucggugagcucauucgaaagguuugagauuuucccuaaggagaguuccuggccaaaccacacugucacaggugugucugccagcugcucccauaauggggaaucaaguuuuuaucggaacuuacuguggcuuaccguaaagaauggauuguaccccaaccugagcaaaucuuaugcaaauaacaaagagaaggaaguucuagugcucuggggcguccaccacccuccaaacaucguggaccagaaaacgcuguaccgcacugagaaugccuacguguccgucguuucaagccauuauagucgaaaguucacccccgaaauagcuaagcguccuaaagugagagaucaggagggcaggaucaacuacuauuggacacuucuggagccaggggacacuauuaucuuugaagcaaauggaaacuugauugccccgcgguacgcuuucgcccucucucgcgguuuuggcuccgggaucauaaauagcaacgcgcccauggauaagugugacgcaaaaugccagaccccuagaggagccauuaauucgucucugccauuccaaaacguacaccccgugacaaucggcgaguguccuaaguaugucagguccgcuaaauuacggauggugaccggucugcgcaauauuccaucaauccagagucgagggcucuuuggagccaucgcaggcuucauugaaggcggguggacgggaaugguugaugguugguacggcuaucaucaccagaacgagcaggggagcggauacgcugccgaccaaaaguccacucagaaugcgauaaacggcaucacaaauaaagugaacucugucauugaaaagaugaauacccaguuuacugccguggguaaggaguucaacaaacuugagagaaggauggaaaaccugaauaagaaaguagaugacggguucaucgauauauggacauacaacgcagaguugcuaguucugcucgaaaaugagcggacccuggacuuucacgacagcaacgugaagaaucuuuaugaaaaagucaagucacagcugaagaacaaugcuaaagagauuggcaacggaugcuucgaguuuuaccauaaguguaaugaugaaugcauggagagugugaaaaacggcacguaugacuaccccaaguauuccgaagagagcaaauugaaucgugagaagaucgauggggucaagcucgaaucuaugggaguguaccaaauccuggccauuuauucaaccguugcuaguagcuuagugcugcuaguaucccucggugccaucucuuucuggaugugcucgaacggcagccugcagugucgcauuugcauauga

SEQ ID NO: 131665 - RNA, 1698 nt, Artificial Sequence
  derived and/or modified CDS sequence (opt3) from hemagglutinin__InfluenzaA__ACZ05590
augaaggugaaacugcucguccuucugugcaccuucacagccacuuacgcugacacgaucuguauuggcuaucacgcaaacaauagcaccgauacaguugacacuguguuggagaagaacguaaccgugacacauuccgucaauuuacuggaaaacucucacaaugggaaacuaugccuccugaagggaauagcgccccuucagcuggguaacuguucaguggccggcuggaucuuggggaauccugagugcgaacuccugauuaguaaagagagcugguccuacaucguugaaaagccaaacccggagaauggaaccuguuaucccggccauuuugcugauuacgaggaacugagagagcaacucucuucggugagcucauucgaaagguuugagauuuucccuaaggagaguuccuggccaaaccacacugucacaggugugucugccagcugcucccauaauggggaaucaaguuuuuaucggaacuuacuguggcuuaccggaaagaauggcuuguaccccaaccugagcaagucuuaugcaaauaacaaagagaaggaaguucuaguacucuggggcgugcaccacccuccauccaucucagaccagaaaacgcuguaccauacugaggaugccuacgucagcguggugaguucucacuauucccgcaaguucacccccgaaauagcuaagcgaccuaaaguccgugaccaggaggggagaaucaacuacuauuggacacuucuggagccaggagauacuauuaucuuugaagcaaaugguaacuugauugccccgagguacgcuuucgcccucagccggggcuuugggucgggaaucauaaauucuaacgcgcccaugggcaagugugacgcaaaaugccagaccccucaaggugccauuaauuccucacugccauuccagaacguucaucccgugacaaucggggaguguccuaaguauguacgcagugcuaaauuaagaauggugaccggacugaggaauauuccaagcauccagucccggggccucuuuggcgccaucgcaggguucauugaaggagguuggacgggcauggucgaugggugguacggauaucaccaccagaacgagcaaggcucugguuacgcugccgaccagaaaagcacucagaaugcgauaaacgggaucacaaauaaagugaacucaguuauugaaaagaugaauacccaguuuacugccgugggcaaggaguucaacaaacuugagcgccgaauggaaaaucugaacaagaaagucgaugacggauucaucgauauauggacauacaacgcagaguugcuagugcugcucgaaaaugagagaacccuggacuuucaugacaguaacguaaagaaucuuuaugaaaaaguuaagucccaacugaagaacaaugcuaaagagauuggcaacgggugcuucgaguuuuaccacaaguguaaugaugaaugcauggagagcgugaaaaacggaacguaugacuaccccaaguauucugaagagucaaaauugaauagggagaagaucgauggugucaagcucgaaaguaugggcguguaccagauccuggccauuuauagcaccgucgcuuccucuuuagugcugcuaguuucgcucggggccaucagcuucuggaugugcuccaacggaucacugcagugucggauuugcauauga

SEQ ID NO: 131666 - RNA, 1701 nt, Artificial Sequence; identical to SEQ ID NO: 131661
  derived and/or modified CDS sequence (opt3) from hemagglutinin__InfluenzaA__ACZ05950

SEQ ID NO: 131667 - RNA, 1701 nt, Artificial Sequence; identical to SEQ ID NO: 131636
  derived and/or modified CDS sequence (opt3) from hemagglutinin__InfluenzaA__ACZ05961

SEQ ID NO: 131668 - RNA, 1701 nt, Artificial Sequence
  derived and/or modified CDS sequence (opt3) from hemagglutinin__InfluenzaA__ACZ05972
augaagaccaucauugcccugagcuacauacucugccuuguguucgcucagaaacugcccggcaacgacaauuccacagcaacuuuguguuuagggcaccaugccgucccuaacggaacgaucguuaagaccauuacaaaugaucaaaucgaggugacuaacgcgaccgaacugguacagucuucaaguacaggugagauuugcgacagcccacaccagauccuagauggcaaaaauuguacccucauagacgcucugcuuggggauccgcagugcgacggauuucaaaacaagaaaugggaucuguucguggaaagauccaaggccuauucuaauuguuaccccuaugacgucccugauuacgcaucguugaggucacucguggccagcaguggcacucuggaguuuaacaaugaauccuucaacuggacagguguuacccagaaugggacgucuagcgcuugcauccggcgcuccaagaacucauuuuucagucgacugaauuggcucacucauuuaaacuuuaaauauccagcacugaaugugaccaugcccaacaacgagcaguucgacaagcuguacauuuggggaguccaccauccuggcacagauaaagaccagaucuuuuuguaugcccaagcuagcggccguauuacugugucuaccaagagaucccagcagacagccaucccaaauauagggucaaggccccggguacgcaacauuccuagcagaaucaguauuuacuggaccaucguuaaaccaggagauauccugcuaauuaauucuacggguaaccucauagcgccgaggggcuacuucaagauccgguccggaaagagcucgauuaugcgcucugacgcacccaucgggaaauguaauuccgagugcauaacuccuaacggcucaauuccaaaugacaagcccuuucagaacgugaaucgaaucacauauggugccuguccuagauacgucaaacaaaacacccugaaacuugcuacugggaugaggaaugugccagaaaaacagacacggggaaucuucggcgccauugcaggcuuuaucgagaacgggugggaaggaaugguggaugguugguauggcuuccgucaccagaauagugaggggcgcggacaagcugccgaccuuaagagcacccaggcggccauugaucagauaaacggcaaauugaauagacucaucgguaagacgaacgagaaguuccaccagauugaaaaagaguuuuccgaagucgaggggaggauccaagaccuggaaaaguacguugaggauaccaaaaucgacuuauggucuuauaacgcagagcugcucguggcucuugaaaaucagcauacaauugaucugacugacagcgagaugaacaaguuguucgaaaagaccaagaagcagcuacgggagaaugccgaagauaugggcaacggaugcuuuaaaauauaccacaagugugacaaugcuugcaucggcucaauucgaaacgggacauaugaucaugacguauaccgcgacgaggcccugaauaacagauuccagaucaaaggaguggagcucaagagugguuacaaagauuggauucuguggaucuccuuugcaauaagcugcucucuucugugugucgccuugcucggcuucaucaugugggcuugccaaaaggggaauauuagguguaacaucugcauuuga

SEQ ID NO: 131669 - RNA, 1701 nt, Artificial Sequence
  derived and/or modified CDS sequence (opt3) from hemagglutinin__InfluenzaA__ACZ05983
augaagaccaucauugcccugagcuacauacucugccuuguguucgcucagaaacugcccggcaacgacaauuccacagcaacuuuguguuuagggcaccaugccgucccuaacggaacgaucguuaagaccauuacaaaugaucaaaucgaggugacuaacgcgaccgaacugguacagucuucaaguacaggugagauuugcgacagcccacaccagauccuagauggcaaaaauuguacccucauagacgcucugcuuggggauccgcagugcgacggauuucaaaacaagaaaugggaucuguucguggaaagauccaaggccuauucuaauuguuaccccuaugacgucccugauuacgcaucguugaggucacucguggccagcaguggcacucuggaguuuaacaaugaauccuucaacuggacagguguuacccagaaugggacgucuagcgcuugcauccggcgcuccaagaacucauuuuucagucgacugaauuggcucacucauuuaaacuuuaaauauccagcacugaaugugaccaugcccaacaacgagcaguucgacaagcuguacauuuggggaguccaccauccuggcacagauaaagaccagaucuuuuuguaugcccaagcuagcggccguauuacugugucuaccaagagaucccagcagacagccaucccaaauauagggucaaggccccggguacgcaacauuccuagcagaaucaguauuuacuggaccaucguuaaaccaggagauauccugcuaauuaauucuacggguaaccucauagcgccgaggggcuacuucaagauccgguccggaaagagcucgauuaugcgcucugacgcacccaucgggaaauguaauuccgagugcauaacuccuaacggcucaauuccaaaugacaagcccuuucagaacgugaaucgaaacacauauggugccuguccuagauacgucaaacaaaauacccugaaacuugcuacugggaugaggaacgugccagaaaaacagacacggggaaucuucggcgccaucgcaggcuuuauugagaaugggugggaaggaaugguggaugguugguauggcuuccgucaccagaacagugaggggcgcggacaagcugccgaccuuaagagcacccaggcggccaucgaucagauuaauggcaaauugaacagacucauagguaagacgaacgagaaguuccaccagaucgaaaaagaguuuuccgaagucgaggggaggauucaagaccuggaaaaguacguugaggauaccaaaaucgacuuauggucuuauaaugcagagcugcucguggcucuugaaaaccagcauacaaucgaucugacugacagcgagaugaauaaguuguucgaaaagaccaagaagcagcuacgggagaacgccgaagauaugggcaauggaugcuuuaaaauuuaccacaagugugacaacgcuugcauaggcucaauccgaaaugggacauaugaucaugacguauaccgcgacgaggcccugaacaauagauuccagauuaaaggaguggagcucaagagugguuacaaagauuggauccuguggauuuccuuugcaaucagcugcuuccuucugugugucgccuugcucggcuuuauaaugugggcuugccaaaaggggaacaucagguguaauauuugcaucuga

SEQ ID NO: 131670 - RNA, 1701 nt, Artificial Sequence
  derived and/or modified CDS sequence (opt3) from hemagglutinin__InfluenzaA__ACZ05994
augaagaccaucauugcccugagcuacauacucugccuuguguucgcucagaaacugcccggcaacgacaauuccacagcaacuuuguguuuagggcaccaugccgucccuaacggaacgaucguuaagaccauuacaaaugaucaaaucgaggugacuaacgcgaccgaacugguacagucuucaaguacaggugagauuugcgacagcccacaccagauccuagauggcaaaaauuguacccucauagacgcucugcuuggggauccgcagugcgacggauuucaaaacaagaaaugggaucuguucguggaaagauccaaggccuauucuaauuguuaccccuaugacgucccugauuacgcaucguugaggucacucguggccagcaguggcacucuggaguuuaacaaugaauccuucaacuggacagguguuacccagaaugggacgucuagcgcuugcauccggcgcuccaagaacucauuuuucagucgacugaauuggcucacucauuuaaacuuuaaauauccagcacugaaugugaccguccccaacaacgagcaguucgacaagcuguacauuuggggagugcaccauccuggcacagauaaagaccagaucuuuuuguaugcccaagcuagcggccguauuacuguaucuaccaagagaucccagcagacagccaucccaaauauagggucaaggccccggguucgcaacauuccuagcagaaucaguauuuacuggaccaucgugaaaccaggagauauccugcuaauuaauucuacggguaaccucauagcgccgaggggcuacuucaagauccgguccggaaagagcucgauuaugcgcucugacgcacccaucgggaaauguaauuccgagugcauaacuccuaacggcucaauuccaaaugacaagcccuuucagaacgucaaucgaaucacauauggugccuguccuagauacgugaaacaaaacacccugaaacuugcuacugggaugaggaaugugccagaaaaacagacacggggaaucuucggcgccauugcaggcuuuaucgagaacgggugggaaggaauggucgaugguugguauggcuuccgucaccagaauagugaggggcgcggacaagcugccgaccuuaagagcacccaggcggccauugaucagauaaacggcaaauugaauagacucaucgguaagacgaacgagaaguuccaccagauugaaaaagaguuuuccgaaguugaggggaggauccaagaccuggaaaaguacguggaggauaccaaaaucgacuuauggucuuauaacgcagagcugcucguagcucuugaaaaucagcauacaauugaucugacugacagcgagaugaacaaguuguucgaaaagaccaagaagcagcuacgggagaaugccgaagauaugggcaacggaugcuuuaaaauauaccacaagugugacaaugcuugcaucggcucaauucgaaacgggacauaugaucaugacguguaccgcgacgaggcccugaauaacagauuccagaucaaaggagucgagcucaagagugguuacaaagauuggauucuguggaucuccuuugcaauaagcugcuuccuucuguguguggccuugcucggcuuuaucaugugggcuugccaaaaggggaauauuagguguaacaucugcauuuga

SEQ ID NO: 131671 - RNA, 1701 nt, Artificial Sequence; identical to SEQ ID NO: 131636
  derived and/or modified CDS sequence (opt3) from hemagglutinin__InfluenzaA__ACZ06005

SEQ ID NO: 131672 - RNA, 1701 nt, Artificial Sequence; identical to SEQ ID NO: 131636
  derived and/or modified CDS sequence (opt3) from hemagglutinin__InfluenzaA__ACZ06016

SEQ ID NO: 131673 - RNA, 1698 nt, Artificial Sequence
  derived and/or modified CDS sequence (opt3) from hemagglutinin__InfluenzaA__ACZ16013
augaaggugaaacugcucguccuucugugcaccuucacagccacuuacgcugacacgaucuguauuggcuaucacgcaaacaauagcaccgauacaguugacacuguguuggagaagaacguaaccgugacacauuccgucaauuuacuggaaaacucucacaaugggaaacuaugccuccugaagggaauagcgccccuucagcuggguaacuguucaguggccggcuggaucuuggggaauccugagugcgaacuccugauuaguaaagagagcugguccuacaucguugaaaagccaaacccggagaauggaaccuguuaucccggccauuuugcugauuacgaggaacugagagagcaacucucuucggugagcucauucgaaagguuugagauuuucccuaaggagaguuccuggccaaaccacacugucacaggugugucugccagcugcucccauaauggggaaaacucauuuuaucggaauuuacuguggcuuaccggaaagaacggcuuguaccccaaucugaguaagagcuaugcaaacaacaaagagaaggaaguucuaguacucuggggcgugcaccacccuccaaauaucgccgaccagaaaacgcuguaccauacugagaaggcuuacgucucugugguguccucacacuauagccgcaaguucacccccgaaauagcaaaacgaccuaagguccgugaucaggaggggagaaucaacuacuauuggacacuucuggagccaggagacacuauuaucuuugaagccaaugguaacuugauugcuccgagguacgccuucgcgcucagucggggcuuugggucuggaaucauaaauuccaacgcacccauggauaaaugugacgccaagugccagaccccucaaggcgcuauuaauagcucgcugccauuccagaacguucaucccgugacaaucggugaguguccuaaauauguacgcucugccaaguuaagaauggugaccgggcugaggaauauuccauccauccagucacggggacucuuuggcgcaaucgcuggcuucauugaagggggauggacggguauggucgauggcugguacggguaucaccaccagaacgagcaaggaaguggcuacgccgcggaccagaaaagcacucagaaugccauaaacgguaucacaaauaaggugaacuccguuauugaaaagaugaauacccaguuuacugcaguggggaaagaguucaacaaacuugagcgccgaauggaaaaccugaauaaaaaggucgaugacggcuucaucgauauauggacauacaacgcugaguugcuagugcugcucgaaaaugagagaacccuggacuuucaugacucuaacguuaaaaaucuuuaugaaaagguaaagagccaacugaaaaacaaugccaaggagauuggaaacggcugcuucgaguuuuaccacaaauguaaugaugaaugcauggagucagugaagaacgggacguaugacuaccccaaauauagugaagaguccaaguugaauagggagaagaucgauggagucaaacucgaaagcauggguguguaccagauccuggcuauuuauucuaccgucgccucaaguuuagugcugcuaguuagccucggcgcaaucuccuucuggaugugcucuaacgggucgcugcagugucggauuugcauauga

SEQ ID NO: 131674 - RNA, 1698 nt, Artificial Sequence
  derived and/or modified CDS sequence (opt3) from hemagglutinin__InfluenzaA__ACZ16023
augaaggugaaacugcucguccuucugugcaccuucacagccacuuacgcugacacgaucuguauuggcuaucacgcaaacaauagcaccgauacaguugacacuguguuggagaagaacguaaccgugacacauuccgucaauuuacuggaaaacucucacaaugggaaacuaugccuccugaagggaauagcgccccuucagcuggguaacuguucaguggccggcuggaucuuggggaauccugagugcgaacuccugauuaguaaagagagcugguccuacaucguugaaaagccaaacccggagaauggaaccuguuaucccggccauuuugcugauuacgaggaacugagagagcaacucucuucggugagcucauucgaaagguuugagauuuucccuaaggagaguuccuggccaaaccacacugucacaggugugucugccagcugcucccauaauggggaaaacucauuuuaucggaauuuacuguggcuuaccggaaagaacggcuuguaccccaaucugaguaagagcuaugcaaacaacaaagagaaggaagugcuaguucucuggggcgugcaccacccuccaaauaucgccgaccagaaaacgcuguaccauacugagaacgcuuacgucucugugguguccucacacuauagccgcaaguucacccccgaaauagcaaagcgaccuaaaguccgugaucaggaggggagaaucaauuacuauuggacacuucuggagccaggagacacuauuaucuuugaagccaacgguaauuugauugcuccgagguacgccuucgcgcucagucggggcuuugggucuggaaucauaaacuccaaugcacccauggauaagugugacgccaaaugccagaccccucaaggcgcuauuaacagcucgcugccauuccagaauguucaucccgugacaaucggugaguguccuaaguauguacgcucugccaaauuaagaauggugaccgggcugaggaacauuccauccauccagucacggggacucuuuggcgcaaucgcuggcuucauugaagggggauggacggguauggucgauggcugguacggguaucaccaccagaaugagcaaggaaguggcuacgccgcggaccagaaaagcacucagaacgccauaaaugguaucacaaacaaaguaaauuccguuauugaaaagaugaacacccaguuuacugcaguggggaaggaguucaacaaacuugagcgccgaauggaaaaucugaacaagaaagucgaugacggcuucaucgauauauggacauacaaugcugaguugcuagugcugcucgaaaacgagagaacccuggacuuucaugacucuaauguaaagaaccuuuaugaaaaaguuaagagccaacugaagaauaacgccaaagagauuggaaauggcugcuucgaguuuuaccacaaguguaacgaugaaugcauggagucagugaaaaaugggacguaugacuaccccaaguauagugaagaguccaaauugaacagggagaagaucgauggagucaagcucgaaagcauggguguguaccagauccuggcuauuuauucuaccgucgccucaaguuuagugcugcuaguuagccucggcgcaaucuccuucuggaugugcucuaaugggucgcugcagugucggauuugcauauga

SEQ ID NO: 131675 - RNA, 1698 nt, Artificial Sequence
  derived and/or modified CDS sequence (opt3) from hemagglutinin__InfluenzaA__ACZ16033
augaaggugaaacugcucguccuucugugcaccuucacagccacuuacgcugacacgaucuguauuggcuaucacgcaaacaauagcaccgauacaguugacacuguguuggagaagaacguaaccgugacacauuccgucaauuuacuggaaaacucucacaaugggaaacuaugccuccugaagggaauagcgccccuucagcuggguaacuguucaguggccggcuggaucuuggggaauccugagugcgaacuccugauuaguaaagagagcugguccuacaucguugaaaagccaaacccggagaauggaaccuguuaucccggccauuuugcugauuacgaggaacugagagagcaacucucuucggugucauccuucgaaagguuugagauuuucccuaaggagaguuccuggccaaaccacacugucacaggugccucugcaagcugcucccauaauggggaaaacucauuuuaucggaauuuacuguggcuuaccggaaagaacggcuuguaccccaaucugaguaagagcuaugccaacaacaaagagaaggaagugcuaguacucuggggcguucaccacccuccaaauaucgcugaccagaaaacgcuguaccauacugagaacgcauacgugucugucguguccucacacuauagccgcaaguucacccccgaaauagccaagcgaccuaaagugcgugaucaggaggggagaaucaauuacuauuggacacuucuggagccaggagacacuauuaucuuugaagcuaacgguaauuugauugccccgagguacgcguucgcacucagucggggcuuugggucuggaaucauaaacuccaaugcccccauggauaagugugacgcuaaaugccagaccccucaaggcgccauuaacagcucgcugccauuccagaauauccaucccgucacaauuggugaguguccuaaguauguucgcucugcaaaauuaagaauggugaccgggcugaggaacaucccauccauccagucacggggacucuuuggcgcuauugccggcuucauagaagggggauggacggguaugguagauggcugguacggguaucaccaccagaaugagcaaggaaguggcuacgcggccgaccagaaaagcacucagaacgcaaucaaugguauuacaaacaaagugaauagcgucaucgaaaagaugaacacccaguuuacugcuguggggaaggaguucaacaaacuugagcgccgaauggaaaaucugaacaagaaaguugaugacggcuucauagauauuuggacauacaaugccgaguugcuagugcugcucgaaaacgagagaacccuggacuuucaugacucuaaugucaagaaccuuuaugaaaaaguaaagagccaacugaagaauaacgcuaaagagaucggaaauggcugcuucgaguuuuaccacaaguguaacgaugaaugcauggagucagugaaaaaugggacguaugacuaccccaaguauagugaagaguccaaauugaacaaggagaagaucgauggaguuaaacucgaaagcauggguguguaccagauucuggccaucuauucuaccgucgcaucaaguuuagugcugcuagucagccucggcgccauuuccuucuggaugugcucuaaugggucgcugcaguguaggauaugcaucuga

SEQ ID NO: 131676 - RNA, 1701 nt, Artificial Sequence; identical to SEQ ID NO: 130704
  derived and/or modified CDS sequence (opt3) from hemagglutinin__InfluenzaA__ACZ16040

SEQ ID NO: 131677 - RNA, 1701 nt, Artificial Sequence; identical to SEQ ID NO: 130704
  derived and/or modified CDS sequence (opt3) from hemagglutinin__InfluenzaA__ACZ16050

SEQ ID NO: 131678 - RNA, 1701 nt, Artificial Sequence; identical to SEQ ID NO: 130704
  derived and/or modified CDS sequence (opt3) from hemagglutinin__InfluenzaA__ACZ16060

SEQ ID NO: 131679 - RNA, 1701 nt, Artificial Sequence
  derived and/or modified CDS sequence (opt3) from hemagglutinin__InfluenzaA__ACZ16070
augaaggccauccuggugguccuccuuuacaccuucgcuacagcaaacgccgacacucugugcauuggcuaucacgcgaauaacagcacggauaccguugacacaguguuggagaaaaauguaacugugacccauuccgucucuuuacuggaagauaagcacaacgggaaacuauguaagcucagaggaguggcuccccugcaucuugguaaaugcaauauagccggcuggauccuggggaacccugagugugaaucauugaguacagcaagcuccuggucuuacauuguugagaccucgucaagcgacaauggaacuugcuauccaggcgauuuuaucgacuacgaggagcucagggagcagcugaguuccgugucuagcuucgaacgguuugagauuuucccgaagacauccucauggcccaaccacgauaguaauaagggugucaccgccgcuuguccucaugcaggggccaagagcuuuuauaagaaccugaucuggcucgugaaaaagggaaauucuuacccaaaauuauccaagucauauauaaacgacaagggcaaagaaguacugguucuuuggggcauccaccaccccagcacgagugcugaucaacagucuuuguaccagaaugccgacgcguacguguucgucggguccagccgcuauucgaagaaauuuaagccugagauugcaauccgaccaaaagugcgugaucaggagggaagaaugaacuacuauuggacucugguggaacccggugacaagauuaccuucgaggccacaggcaaucuagucguuccuagguacgcuuuugccauggaacggaacgcagggucuggaaucauaauuuccgauacuccagugcaugacugcaacaccacaugucaaaccccgaaaggcgcuaucaauacgucacuccccuuccagaacauucacccuaucacuaucgguaagugcccaaaguauguaaaaaguacaaagcugcgccuugccaccgggcugagaaaugugcccagcauucaguccaggggauuguuuggcgcgauagccggcuucaucgaagggggauggacugguauggucgacggcugguacggguaucaucaccagaacgaacaaggaucuggcuacgcagcugaucucaaaagcacacagaaugccauugacgagaucaccaacaagguaaauucaguuauagagaaaaugaacacgcaguuuaccgcuguggguaaggaguucaaucaccuggaaaagcggauugaaaacuuaaauaaaaaggucgaugacggguuccuggauaucuggacauacaacgccgagcuccuugugcuguuggaaaaugagcgcacucuagacuaucaugauaguaacgugaaaaaucuguacgagaagguucgaucccagcucaaaaacaacgcaaaggaaaucggcaauggauguuuugaguucuaucacaagugcgacaacaccuguauggaaagcgugaaaaauggcacauacgauuauccuaaguacucugaggaagccaaacugaacagagaggagauugacggggucaaacuugaaucaacuaggaucuaucaaauucuggcuauauacaguaccguggcgagcuccuugguccucgugguuucucugggagcaaucucguuuuggaugugcagcaaugguuccuuacagugccggauuuguaucuga

SEQ ID NO: 131680 - RNA, 1701 nt, Artificial Sequence
  derived and/or modified CDS sequence (opt3) from hemagglutinin__InfluenzaA__ACZ16080
augaaggccauccuggugguccuccuuuacaccuucgcuacagcaaacgccgacacucugugcauuggcuaucacgcgaauaacagcacggauaccguugacacaguguuggagaaaaauguaacugugacccauuccgucaacuuacuggaagauaagcacaaugggaaacuauguaagcucagaggaguggcuccccugcaucuugguaaaugcaacauagccggcuggauccuggggaauccugagugugaaucuuugucaacagcaaguagcugguccuacauuguugagaccucuucgucagacaacggaacuugcuauccaggcgauuuuaucgacuacgaggagcucagggagcagcugagcaguguguccucuuucgaacgguuugagauuuucccgaagacaagcuccuggcccaaucacgauucaaacaagggugucaccgccgcuuguccucaugcaggggccaaaaguuuuuauaagaaucugaucuggcucgugaaaaagggaaacagcuacccaaaauuaucuaaguccuauauaaaugacaagggcaaagaaguacugguucuuuggggcauccaccaccccucaacgagcgcugaucaacagaguuuguaccagaacgccgacgcguacguguucgucgggucuucccgcuauagcaagaaauuuaagccugagauugcaauccgaccaaaagugcgugaucaggagggaagaaugaauuacuauuggacucugguggaacccggugacaagauuaccuucgaggccacaggcaaccuagucguuccuagguacgcuuuugccauggaacggaacgaugggucgggaaucauaauuucugacacuccagugcaugacugcaauaccacaugucaaaccccgaaaggcgcaaucaacacgucccuccccuuccagaauauucacccuaucacuaucgguaagugcccaaaguauguaaaaucaacaaagcugcgccuugcuaccgggcugagaaacgugcccaguauucagagcaggggauuguuuggcgccauagcgggcuucaucgaagggggauggacugguauggucgauggcugguacggguaucaucaccagaaugaacaaggauccggcuacgccgcagaccucaaaucuacacagaacgcuauugaugagaucaccaauaaggugaacagcguuauagagaaaaugaauacgcaguuuaccgccguggguaaggaguucaaccaccuggaaaagcggauugaaaauuuaaacaaaaaggucgacgauggguuccuggacaucuggacauacaaugcugagcuccuugugcuguuggaaaacgagcgcacucuagauuaucaugacucaaauguaaagaaccuguacgagaagguucgaagucagcucaaaaacaaugccaaggaaaucggcaacggauguuuugaguucuaucacaagugcgauaauaccuguauggaauccgugaaaaacggcacauacgacuauccuaaguacagcgaggaagcaaaacugaauagagaggagauugauggggucaaacuugaaucuacuaggaucuaucaaauucuggccauauacucaaccguggcuaguagcuugguccucgugguuucccugggagcgaucucuuuuuggaugugcucgaacgguagcuuacagugccggauuuguaucuga

SEQ ID NO: 131681 - RNA, 1701 nt, Artificial Sequence
  derived and/or modified CDS sequence (opt3) from hemagglutinin__InfluenzaA__ACZ16090
augaaggccauccugcucgugcuucuguacaccuucgcuacagcaaacgccgacacuuugugcauuggcuaucacgcgaauaacagcacggauaccgucgacacaguuuuagagaaaaaugugacuguaacccauuccgugaaccugcuagaagauaagcacaaugggaaacucuguaagcugagaggagucgcuccccuucaucuggguaaaugcaacauagccggcuggaucuuggggaauccugagugugaaucucucucaacagcaaguagcugguccuacauuguggagaccucuucgucagacaacggaacuugcuauccaggcgauuuuaucgacuacgaggagcugagggagcagcugagcaguauguccucuuucgaacgguuugagauuuucccgaagacaagcuccuggcccaaucacgauucaaacaaggguguuaccgccgcuuguccucaugcaggggccaaaaguuuuuauaagaaucucaucugguuagugaaaaagggaaacagcuacccaaaacugucuaaguccuauauaaaugacaagggcaaagaaguccuuguguuguggggcauccaccaccccucaacgagcgcugaucaacagagucuguaccagaacgccgacgcguacguauucguugggucuucccgcuauagcaagaaauuuaagccugagauugcaauccgaccaaaagugcgugaucaggagggaagaaugaauuacuauuggacucuagucgaacccggugacaagauuaccuucgaggccacaggcaaccucguggugccuagguacgcuuuugccauggaacggaacgcagggucgggaaucauaauuucugauacuccaguccaugacugcaauaccacaugucaaaccccgaaaggcgcuaucaacacgucccugcccuuccagaauauucacccuaucacuaucgguaagugcccaaaguauguuaaaucaacaaaacuucgccuggccaccggguugagaaacgugcccaguauucagagcaggggacucuuuggcgcgauagccggcuucaucgaagggggauggacugguaugguagacggcugguacggguaucaucaccagaaugaacaaggauccggcuacgcagcugaucugaaaucuacacagaacgccauugacgagaucaccaauaaggugaacagcgucauagagaaaaugaauacgcaguuuaccgcuguggguaaggaguucaaccacuuagaaaagcggauugaaaaucugaacaaaaagguugaugacggguuccucgauaucuggacauacaaugccgagcuucugguguugcuagaaaacgagcgcacucuggacuaucaugauucaaaugucaaaaaccucuacgagaaggugcgaagucagcugaaaaacaaugcaaaggaaaucggcaacggauguuuugaguucuaucacaagugcgacaauaccuguauggaauccguaaagaacggcacauacgauuauccuaaguacagcgaggaagccaaacuuaauagagaggagauugacgggguuaagcuggaaucuacuaggaucuaucaaauuuuggcuauauacucaaccguggcgaguagccucguccugguggucuccuuaggagcaaucucuuuuuggaugugcucgaacgguagccugcagugccggauuuguaucuga

SEQ ID NO: 131682 - RNA, 1701 nt, Artificial Sequence; identical to SEQ ID NO: 130704
  derived and/or modified CDS sequence (opt3) from hemagglutinin__InfluenzaA__ACZ16100

SEQ ID NO: 131683 - RNA, 1701 nt, Artificial Sequence; identical to SEQ ID NO: 130704
  derived and/or modified CDS sequence (opt3) from hemagglutinin__InfluenzaA__ACZ16110

SEQ ID NO: 131684 - RNA, 1701 nt, Artificial Sequence; identical to SEQ ID NO: 130704
  derived and/or modified CDS sequence (opt3) from hemagglutinin__InfluenzaA__ACZ16120

SEQ ID NO: 131685 - RNA, 1701 nt, Artificial Sequence; identical to SEQ ID NO: 131452
  derived and/or modified CDS sequence (opt3) from hemagglutinin__InfluenzaA__ACZ16130

SEQ ID NO: 131686 - RNA, 1701 nt, Artificial Sequence; identical to SEQ ID NO: 130704
  derived and/or modified CDS sequence (opt3) from hemagglutinin__InfluenzaA__ACZ16140

SEQ ID NO: 131687 - RNA, 1701 nt, Artificial Sequence; identical to SEQ ID NO: 130704
  derived and/or modified CDS sequence (opt3) from hemagglutinin__InfluenzaA__ACZ16150

SEQ ID NO: 131688 - RNA, 1701 nt, Artificial Sequence; identical to SEQ ID NO: 130704
  derived and/or modified CDS sequence (opt3) from hemagglutinin__InfluenzaA__ACZ16160

SEQ ID NO: 131689 - RNA, 1701 nt, Artificial Sequence; identical to SEQ ID NO: 130897
  derived and/or modified CDS sequence (opt3) from hemagglutinin__InfluenzaA__ACZ16170

SEQ ID NO: 131690 - RNA, 1701 nt, Artificial Sequence
  derived and/or modified CDS sequence (opt3) from hemagglutinin__InfluenzaA__ACZ16180
augaaggccauccuggugguccuccuuuacaccuucgcuacagcaaacgccgacacucugugcauuggcuaucacgcgaauaacagcacggauaccguugacacaguguuggagaaaaauguaacugugacccauuccgucaacuuacuggaagauaagcacaaugggaaacuauguaagcucagaggaguggcuccccugcaucuugguaaaugcaacauagccggcuggauccuggggaauccugagugugaaucuuuguacacagcaucaaguuggagcuauauuguugagaccuccucuucggacaacggaacuugcuacccaggcgauuuuaucgacuaugaggagcucagggagcagcugucaagcgugaguuccuucgaacgguuugagauuuucccgaagacaucuagcuggcccaaucacgauuccaacaagggugucaccgccgcuuguccucaugcaggggccaaaucauuuuacaagaaucugaucuggcucgugaaaaagggaaacaguuauccaaaauuaagcaagucuuacauaaaugacaagggcaaagaaguacugguucuuuggggcauccaccaccccuccacgucagcugaucaacagagcuuguaccagaacgccgacgcguauguguucgucgggaguucucgcuacuccaagaaauuuaagccugagauugcaauccgaccaaaagugcgugaucaggagggaagaaugaauuauuacuggacucugguggaacccggugacaagauuaccuucgaggccacaggcaaccuagucguuccuagguaugcuuuugccauggaacggaacgcagggagcggaaucauaauuucggauacuccagugcaugacugcaauaccacaugucaaaccccgaaaggcgcuaucaacacgucucuccccuuccagaauauucacccuaucacuaucgguaagugcccaaaguacguaaaauccacaaagcugcgccuugccaccgggcugagaaacgugcccucaauucagaguaggggauuguuuggcgcgauagccggcuucaucgaagggggauggacugguauggucgacggcugguauggguaccaucaccagaaugaacaaggaagcggcuacgcagcugaucucaaauccacacagaacgccauugacgagaucaccaauaaggugaacucuguuauagagaaaaugaauacgcaguuuaccgcuguggguaaggaguucaaccaccuggaaaagcggauugaaaauuuaaacaaaaaggucgaugacggguuccuggauaucuggacauauaaugccgagcuccuugugcuguuggaaaacgagcgcacucuagacuaccaugauagcaauguaaagaaccuguaugagaagguucgaucacagcucaaaaacaaugcaaaggaaaucggcaacggauguuuugaguucuaccacaagugcgacaauaccuguauggaaagugugaaaaacggcacauaugauuacccuaaguauuccgaggaagccaaacugaauagagaggagauugacggggucaaacuugaaagcacuaggaucuaccaaauucuggcuauauacucuaccguggcgucaaguuugguccucgugguuagccugggagcaaucuccuuuuggaugugcucuaacgguucguuacagugccggauuuguaucuga

SEQ ID NO: 131691 - RNA, 1701 nt, Artificial Sequence; identical to SEQ ID NO: 130704
  derived and/or modified CDS sequence (opt3) from hemagglutinin__InfluenzaA__ACZ16190

SEQ ID NO: 131692 - RNA, 1701 nt, Artificial Sequence
  derived and/or modified CDS sequence (opt3) from hemagglutinin__InfluenzaA__ACZ16200
augaaggccauccuggugguccuccuuuacaccuucgcuacagcaaaccccgacacucugugcauuggcuaucacgccaauaacagcacggauaccguugacacaguguuggagaaaaauguaacugugacccauuccgucaacuuacuggaagauaagcacaaugggaaacuauguaagcucagaggaguggcgccucugcaucuugguaaaugcaacauagcuggcuggauccuggggaauccagagugugaaucuuugucaacagccaguagcugguccuacauuguugagaccucuucgucagacaacggaacuugcuauccgggcgauuuuaucgacuacgaggagcucagggagcagcugagcaguguguccucuuucgaacgguuugagauuuuccccaagacaagcuccuggccuaaucacgauucaaacaagggugucaccgcagccuguccacaugcuggggcaaaaaguuuuuauaagaaucugaucuggcucgugaaaaagggaaacagcuaccccaaauuaucuaaguccuauauaaaugacaagggcaaagaaguacugguucuuuggggcauccaccacccuucaacgagcgccgaucaacagaguuuguaccagaacgcugacgccuacguguucgucgggucuucccgcuauagcaagaaauuuaagccagagauugcgauccgacccaaagugcgugaucaggagggaagaaugaauuacuauuggacucugguggaaccuggugacaagauuaccuucgaggcaacaggcaaccuagucguuccaagguacgccuuugcuauggaacggaacgccgggucgggaaucauaauuucugauacuccggugcaugacugcaauaccacaugucaaacccccaaaggcgcaaucaacacgucccucccuuuccagaauauucacccaaucacuaucgguaagugccccaaguauguaaaaucaacaaagcugcgccuugcuaccgggcugagaaacgugccuaguauucagagcaggggauuguuuggcgccauagcgggcuucaucgaagggggauggacugguauggucgacggcugguacggguaucaucaccagaaugaacaaggauccggcuacgccgcagaucucaaaucuacacagaacgcuauugacgagaucaccaauaaggugaacagcguuauagagaaaaugaauacgcaguuuaccgccguggguaaggaguucaaccaccuggaaaagcggauugaaaauuuaaacaaaaaggucgaugacggguuccuggauaucuggacauacaaugcugagcuccuugugcuguuggaaaacgagcgcacucuagacuaucaugauucaaauguaaagaaccuguacgagaagguucgaagucagcucaaaaacaaugccaaggaaaucggcaacggauguuuugaguucuaucacaagugcgacaauaccuguauggaauccgugaaaaacggcacauacgauuauccaaaguacagcgaggaagcaaaacugaauagagaggagauugacggggucaaacuugaaucuacuaggaucuaucaaauucuggccauauacucaaccguggcuaguagcuugguccucgugguuucccugggagcgaucucuuuuuggaugugcucgaacgguagcuuacagugccggauuuguaucuga

SEQ ID NO: 131693 - RNA, 1701 nt, Artificial Sequence; identical to SEQ ID NO: 130704
  derived and/or modified CDS sequence (opt3) from hemagglutinin__InfluenzaA__ACZ16210

SEQ ID NO: 131694 - RNA, 1701 nt, Artificial Sequence; identical to SEQ ID NO: 130704
  derived and/or modified CDS sequence (opt3) from hemagglutinin__InfluenzaA__ACZ16220

SEQ ID NO: 131695 - RNA, 1701 nt, Artificial Sequence; identical to SEQ ID NO: 131452
  derived and/or modified CDS sequence (opt3) from hemagglutinin__InfluenzaA__ACZ16230

SEQ ID NO: 131696 - RNA, 1701 nt, Artificial Sequence
  derived and/or modified CDS sequence (opt3) from hemagglutinin__InfluenzaA__ACZ16240
augaaggccauccuggugguccuccuuuacaccuucgcuacagcaaacgccgacacucugugcauuggcuaucacgcgaauaacagcacggauaccguugacacaguguuggagaaaaauguaacugugacccauuccgucaacauauuagaagauaagcacaaugggaaacuguguaagcuaagaggaguggcuccccuccaucuggguaaaugcaacaucgccggcuggauucuugggaauccugagugugaaucucugucaacagcaaguagcugguccuacaucguugagaccucuucgucagacaacggaacuugcuauccaggcgauuuuauugacuacgaagaguugagggagcagcucagcaguguguccucuuucgaacgguuugagaucuucccgaagacaagcuccuggcccaaucacgauucaaacaagggugucaccgccgcuuguccucaugcaggggccaaaaguuuuuauaagaaucugauauggcuggugaaaaagggaaacagcuacccaaaacucucuaaguccuauaucaaugacaagggcaaagaaguauuaguucuguggggcauucaccaccccucaacgagcgcugaucaacagagucuuuaccagaacgccgacgcguacguguucgucgggucuucccgcuauagcaagaaauuuaagccugagaucgcaauucgaccaaaagugcgugaucaggagggaagaaugaauuacuauuggacuuugguggaacccggugacaagaucaccuucgaggccacaggcaaccuggucguuccuagguacgcuuuugccauggaacggaacgcagggucgggaauaauuaucucugauacuccagugcaugacugcaauaccacaugucaaaccccgaaaggcgcuauuaacacgucccuacccuuccagaauauccacccuaucacuauugguaagugcccaaaguauguaaaaucaacaaagcuccgccuggccaccgggcuuagaaacgugcccaguauacagagcaggggacuguuuggcgcgaucgccggcuucauugaagggggauggacugguauggucgacggcugguacggguaucaucaccagaaugaacaaggauccggcuacgcagcugauuugaaaucuacacagaacgcccucgacgagaucaccaauaaggugaacagcguuauagagaaaaugaauacgcaguuuaccgcuguggguaaggaguucaaccaccuggagaagcggauugaaaauuuaaacaaaaaggucgaugacggguuccuggauaucuggacauacaaugccgagcuccuugugcuguuggaaaacgagcgcacucuagacuaucaugauucaaauguaaagaaccuguacgagaagguucgaagucagcucaaaaacaaugcaaaggaaaucggcaacggauguuuugaguucuaucacaagugcgacaauaccuguauggaauccgugaaaaacggcacauacgauuauccuaaguacagcgaggaagccaaacugaauagagaggagauugacggggucaaacuugaaucuacuaggaucuaucaaauucuggcuauauacucaaccguggcgaguagcuugguccucgugguuucccugggagcaaucucuuuuuggaugugcucgaacgguagcuuacagugccggauuuguaucuga

SEQ ID NO: 131697 - RNA, 1701 nt, Artificial Sequence; identical to SEQ ID NO: 130704
  derived and/or modified CDS sequence (opt3) from hemagglutinin__InfluenzaA__ACZ16260

SEQ ID NO: 131698 - RNA, 1701 nt, Artificial Sequence
  derived and/or modified CDS sequence (opt3) from hemagglutinin__InfluenzaA__ACZ16270
augaaggccauccuggugguccuccuuuacaccuucgcuacagcaaacgccgacacucugugcauuggcuaucacgcgaauaacagcacggauaccguugacacaguguuggagaagaauguaacugugacccauuccgucaacuuacuggaagauaagcacaaugggaaacuauguaagcucagaggaguggcuccccugcaucuugguaaaugcaacauagccggcuggauccuggggaauccugagugugaaucuuugucaacagcaaguagcugguccuacauuguugagaccucuucgucagacaacggaacuugcuauccaggcgauuuuaucgacuacgaggagcucagggagcagcugagcaguguguccucuuucgaacgguuugagauuuucccgaagacaagcuccuggcccaaucacgauucaaacaagggugucaccgccgcuuguccucaugcaggggccaaaaguuuuuauaagaaucugaucuggcucgugaaaaagggaaacagcuacccaaaauuaucuaaguccuauauaaaugacaagggcaaagaaguacugguucuuuggggcauccaccaccccucaacgagcgcugaucaacagaacuuguaccagaaugccgacgcguacguguucgucgggaguucucgcuauuccaagaaauuuaagccugagauugcaauccgaccaaaagugcgugaucaggagggaagaaugaacuacuauuggacucugguggaacccggugacaagauuaccuucgaggccacaggcaaccuagucguuccuagguacgcuuuugccauggaacggaaugcagggagcggaaucauaauuucggauacuccagugcaugacugcaacaccacaugucaaaccccgaaaggcgcuaucaauacgucucuccccuuccagaacauucacccuaucacuaucgguaagugcccaaaguauguaaaauccacaaagcugcgccuugccaccgggcugagaaaugugcccucaauucagaguaggggauuguuuggcgcgauagccggcuucaucgaagggggauggacugguauggucgacggcugguacggguaucaucaccagaacgaacaaggaagcggcuacgcagcugaucucaaauccacacagaaugccauugacgagaucaccaacaagguaaauucuguuauagagaaaaugaacacgcaguuuaccgcuguggguaaggaguucaaucaccuggaaaagcggauugaaaacuuaaauaaaaaggucgaugacggguuccuggauaucuggacauacaacgccgagcuccuugugcuguuggaaaaugagcgcacucuagacuaucaugauagcaacgugaaaaaccuguacgagaagguucgaucacagcucaaaaauaacgcaaaggaaaucggcaauggauguuuugaguucuaucacaagugcgacaacaccuguauggaaagugugaaaaauggcacauacgauuauccuaaguacuccgaggaagccaaacugaacagagaggagauugacggggucaaacuugaaagcacuaggaucuaucaaauucuggcuauauacucuaccguggcgucaaguuugauccucgucgugagccugggagcaauuuccuuuuggaugugcucuaaugguucguuacagugccggaucuguaucuga

SEQ ID NO: 131699 - RNA, 1701 nt, Artificial Sequence; identical to SEQ ID NO: 131379
  derived and/or modified CDS sequence (opt3) from hemagglutinin__InfluenzaA__ACZ16280

SEQ ID NO: 131700 - RNA, 1701 nt, Artificial Sequence; identical to SEQ ID NO: 130704
  derived and/or modified CDS sequence (opt3) from hemagglutinin__InfluenzaA__ACZ16290

SEQ ID NO: 131701 - RNA, 1701 nt, Artificial Sequence
  derived and/or modified CDS sequence (opt3) from hemagglutinin__InfluenzaA__ACZ16300
augaaggccauccuggugguccuccuuuacaccuucgcuacagcaaacgccgacacucugugcauuggcuaucacgcgaauaacagcacggauaccguugacacaguguuggagaaaaauguaauagugacucauuccgucaacuuacuggaagauaagcacaaugggaaacuauguaagcucagaggaguggcuccccugcaucuugguaaaugcaacaucgccggcuggauucuggggaauccugagugugaaucuuugucaaccgcaaguagcugguccuacaucguugagacaucuucgucagacaacggaaccugcuauccaggcgauuuuauugacuacgaggagcucagggagcagcugagcaguguguccucuuucgaacgguuugagaucuucccgaagacuagcuccuggcccaaucacgauucaaacaagggugucacagccgcuuguccucaugcaggggccaaaaguuuuuauaagaaucugauauggcucgugaaaaagggaaacagcuacccaaaauuaucuaaguccuauaucaaugacaagggcaaagaaguacugguucuuuggggcauucaccaccccucaaccagcgcugaucaacagaguuuguaccagaacgccgacgcguacguguucgucgggucuucccgcuauagcaagaaauuuaagccugagaucgcaauucgaccaaaagugcgugaucaggagggaagaaugaauuacuauuggacgcugguggaacccggugacaagaucacuuucgaggccaccggcaaccuacucgucccuagguacgcuuuugccauggaacggaacgcagggucgggaauaauuaucucugauacaccaguucaugacugcaauacuaccugucaaacaccgaaaggcgcuauuaacaccucccugcccuuccagaauauccacccuaucacgauugguaagugcccaaaguaugugaaaucaacuaaacuucgccuggccacaggguugagaaacguacccaguauacagagcaggggacucuuuggcgcgaucgccggcuucauugaagggggauggaccgguaugguggacggcugguacggguaucaucaccagaaugaacaaggauccggcuacgcagcugaucugaagucuacucagaacgccaucgacgagauaacaaauaaggucaacagcgugauugagaaaaugaauacccaguuuacggcuguugguaaggaguucaaccacuuagaaaagcggaucgaaaaucugaacaaaaagguggaugacggguuccucgauaucuggaccuacaaugccgagcuucuggucuugcuagaaaacgagcgcacacuggacuaucaugauucaaaugugaaaaaccucuacgagaagguacgaagucagcugaaaaacaaugcaaaggaaauuggcaacggauguuuugaguucuaucacaagugcgacaauacuuguauggaauccguuaaaaacggcaccuacgauuauccuaaguacagcgaggaagccaaacuuaauagagaggagaucgacggggugaagcuggaaucuacaaggauuuaucaaauauuggcuaucuacucaacugucgcgaguagccucgugcuggucguguccuuaggagcaauuucuuuuuggaugugcucgaacgguagccugcagugccggaucuguaucuga

SEQ ID NO: 131702 - RNA, 1701 nt, Artificial Sequence; identical to SEQ ID NO: 131447
  derived and/or modified CDS sequence (opt3) from hemagglutinin__InfluenzaA__ACZ16310

SEQ ID NO: 131703 - RNA, 1701 nt, Artificial Sequence
  derived and/or modified CDS sequence (opt3) from hemagglutinin__InfluenzaA__ACZ16320
augaaggccauccuggugguccuccuuuacaccuucgcuacagcaaacgccgacacucugugcauuggcuaucacgcgaauaacagcacggauaccguugacacaguguuggagaaaaauguaacugugacccauuccgucaacuuacuggaagauaagcacaaugggaaacuauguaagcucagaggaguggcuccccugcaucuugguaaaugcaacauagccggcuggauccuggggaauccugagugugaaucuuugucaacagcaaguagcugguccuacauuguugagaccucuucgucagacaacggaacuugcuauccaggcgauuuuaucgacuacgaggagcucagggagcagcugagcaguguguccucuuucgaacgguuugagauuuucccgaagacaagcuccuggcccaaucacgauucaaacaagggugucaccgccgcuuguccucaugcaggggccaaaaguuuuuauaagaaucugaucuggcucgugaaaaagggaaacagcuacccaaaauuaucuaaguccuauauaaaugacaagggcaaagaaguacugguucuuuggggcauccaccaccccucaacgagcgcugaucaacagaguuuguaccagaacgccgacgcguacguguucgucgggucuucccgcuauagcaagaaauuuaagccugagauugcaauccgaccaaaagugcgugaucaggagggaagaaugaauuacuauuggacucugguggaacccggugacaagauuaccuucgaggccacaggcaaccuagucguuccuagguacgcuuuugccauggaacggaacgcagggucgggaaucauaauuucugauacuccagugcaugacugcaauaccacaugucaaaccccgaaaggcgcuaucaacacgucccuccccuuccagaauauucacccuaucacuaucgguaagugcccaaaguauguaaaaucaacacgccugagacuugccaccgggcugaggaacgugcccaguauucagagccggggauuguuuggcgcgauagccggcuucaucgaagggggauggacugguauggucgacggcugguacggguaucaucaccagaaugaacaaggauccggcuacgcagcugaucucaagucuacacagaacgccauugacgagaucaccaauaaagugaacagcguuauagagaagaugaauacgcaguuuaccgcuguggguaaagaguucaaccaccuggaaaagcgcauugaaaauuuaaacaagaaagucgaugacggguuccuggauaucuggacauacaaugccgagcuccuugugcuguuggaaaacgagcgaacucuagacuaucaugauucaaauguaaagaaccuguacgagaaaguuagaagucagcucaagaacaaugcaaaagaaaucggcaacggauguuuugaguucuaucacaagugcgacaauaccuguauggaauccgugaagaacggcacauacgauuauccuaaauacagcgaggaagccaagcugaauagggaggagauugacggggucaaacuugaaucuacucggaucuaucaaauucuggcuauauacucaaccguggcgaguagcuugguccucgugguuucccugggagcaaucucuuuuuggaugugcucgaacgguagcuuacagugccguauuuguaucuga

SEQ ID NO: 131704 - RNA, 1701 nt, Artificial Sequence; identical to SEQ ID NO: 131447
  derived and/or modified CDS sequence (opt3) from hemagglutinin__InfluenzaA__ACZ16330

SEQ ID NO: 131705 - RNA, 1701 nt, Artificial Sequence; identical to SEQ ID NO: 130897
  derived and/or modified CDS sequence (opt3) from hemagglutinin__InfluenzaA__ACZ16340

SEQ ID NO: 131706 - RNA, 1701 nt, Artificial Sequence; identical to SEQ ID NO: 130704
  derived and/or modified CDS sequence (opt3) from hemagglutinin__InfluenzaA__ACZ16350

SEQ ID NO: 131707 - RNA, 1701 nt, Artificial Sequence; identical to SEQ ID NO: 130704
  derived and/or modified CDS sequence (opt3) from hemagglutinin__InfluenzaA__ACZ16360

SEQ ID NO: 131708 - RNA, 1701 nt, Artificial Sequence; identical to SEQ ID NO: 130897
  derived and/or modified CDS sequence (opt3) from hemagglutinin__InfluenzaA__ACZ16370

SEQ ID NO: 131709 - RNA, 1701 nt, Artificial Sequence; identical to SEQ ID NO: 130704
  derived and/or modified CDS sequence (opt3) from hemagglutinin__InfluenzaA__ACZ16380

SEQ ID NO: 131710 - RNA, 1701 nt, Artificial Sequence; identical to SEQ ID NO: 130704
  derived and/or modified CDS sequence (opt3) from hemagglutinin__InfluenzaA__ACZ16390

SEQ ID NO: 131711 - RNA, 1701 nt, Artificial Sequence; identical to SEQ ID NO: 130704
  derived and/or modified CDS sequence (opt3) from hemagglutinin__InfluenzaA__ACZ16400

SEQ ID NO: 131712 - RNA, 1701 nt, Artificial Sequence; identical to SEQ ID NO: 130704
  derived and/or modified CDS sequence (opt3) from hemagglutinin__InfluenzaA__ACZ16410

SEQ ID NO: 131713 - RNA, 1701 nt, Artificial Sequence; identical to SEQ ID NO: 131341
  derived and/or modified CDS sequence (opt3) from hemagglutinin__InfluenzaA__ACZ16420

SEQ ID NO: 131714 - RNA, 1701 nt, Artificial Sequence; identical to SEQ ID NO: 130704
  derived and/or modified CDS sequence (opt3) from hemagglutinin__InfluenzaA__ACZ16430

SEQ ID NO: 131715 - RNA, 1701 nt, Artificial Sequence; identical to SEQ ID NO: 130704
  derived and/or modified CDS sequence (opt3) from hemagglutinin__InfluenzaA__ACZ16440

SEQ ID NO: 131716 - RNA, 1701 nt, Artificial Sequence
  derived and/or modified CDS sequence (opt3) from hemagglutinin__InfluenzaA__ACZ16450
augaaggccauccuggugguccuccuuuacaccuucgcuacagcaaacgccgacacucugugcauuggcuaucacgcgaauaacagcacggauaccguugacacaguguuggagaaaaauguaacugugacccauuccgucaacuuacuggaagauaagcacaaugggaaacuauguaagcucagaggaguggcuccccugcaucuugguaaaugcaacauagccggcuggauccuggggaauccugagugugaaucuuugucaacagcaaguagcugguccuacauuguugagaccucuucgucagacaacggaacuugcuauccaggcgauuuuaucgacuacgaagaacucagggagcagcugagcaguguguccucuuucgaacgguuugagauuuucccgaagacaagcuccuggcccaaucacgauucaaacaagggugucaccgccgcuuguccucaugcaggggccaaaaguuuuuauaagaaucugaucuggcucgugaaaaagggaaacagcuacccaaaauuaucuaaguccuauauaaaugacaagggcaaagaaguacugguucuuuggggcauccaccaccccucaacgagcgcugaucaacagaguuuguaccagaacgccgacgcguacguguucgucgggucuucccgcuauagcaagaaauuuaagccugagauugcaauccgaccaaaagugcgugaucaggagggaagaaugaauuacuauuggacucuggugaagcccggugacaaaauuaccuucgaagccacaggcaaccuagucguuccuagguacgcuuuugccauggagcggaacgcagggucgggaaucauaauuucugauacuccagugcaugacugcaauaccacaugucaaaccccgaagggcgcuaucaacacgucccuccccuuccagaauauucacccuaucacuaucgguaagugcccaaaauauguaaagucaacaaaacugcgccuugccaccgggcugagaaacgugcccaguauucagagcaggggauuguuuggcgcgauagccggcuucaucgaagggggauggacugguauggucgacggcugguacggguaucaucaccagaaugagcaaggauccggcuacgcagcugaucucaagucuacacagaacgccauugacgaaaucaccaauaaagugaacagcguuauagagaagaugaauacgcaguuuaccgcuguggguaaggaguucaaccaccuggaaaaacggauugagaauuuaaacaagaaagucgaugacggguuccuggauaucuggacauacaaugccgaacuccuugugcuguuggagaacgaacgcacucuagacuaucaugauucaaauguaaagaaccuguacgagaaaguucgaagucagcucaagaacaaugcaaaggagaucggcaacggauguuuugaguucuaucacaaaugcgacaauaccuguauggaguccgugaagaacggcacauacgauuauccuaaauacagcgaagaggccaagcugaauagagaagagauugacggggucaaacuugagucuacuaggaucuaucaaauucuggcuauauacucaaccguggcgaguagcuugguccucgugguuucccugggagcaaucucuuuuuggaugugcucgaacgguagcuuacagugccggauuuguaucuga

SEQ ID NO: 131717 - RNA, 1701 nt, Artificial Sequence; identical to SEQ ID NO: 130897
  derived and/or modified CDS sequence (opt3) from hemagglutinin__InfluenzaA__ACZ16460

SEQ ID NO: 131718 - RNA, 1701 nt, Artificial Sequence; identical to SEQ ID NO: 130704
  derived and/or modified CDS sequence (opt3) from hemagglutinin__InfluenzaA__ACZ16470

SEQ ID NO: 131719 - RNA, 1701 nt, Artificial Sequence; identical to SEQ ID NO: 130704
  derived and/or modified CDS sequence (opt3) from hemagglutinin__InfluenzaA__ACZ16480

SEQ ID NO: 131720 - RNA, 1701 nt, Artificial Sequence; identical to SEQ ID NO: 131452
  derived and/or modified CDS sequence (opt3) from hemagglutinin__InfluenzaA__ACZ16490

SEQ ID NO: 131721 - RNA, 1701 nt, Artificial Sequence; identical to SEQ ID NO: 130704
  derived and/or modified CDS sequence (opt3) from hemagglutinin__InfluenzaA__ACZ16500

SEQ ID NO: 131722 - RNA, 1701 nt, Artificial Sequence; identical to SEQ ID NO: 130897
  derived and/or modified CDS sequence (opt3) from hemagglutinin__InfluenzaA__ACZ16510

SEQ ID NO: 131723 - RNA, 1701 nt, Artificial Sequence; identical to SEQ ID NO: 130704
  derived and/or modified CDS sequence (opt3) from hemagglutinin__InfluenzaA__ACZ16530

SEQ ID NO: 131724 - RNA, 1701 nt, Artificial Sequence
  derived and/or modified CDS sequence (opt3) from hemagglutinin__InfluenzaA__ACZ16540
augaaggccauccuggugguccuccuuuacaccuucgcuacagcaaacgccgacacucugugcauuggcuaucacgcgaauaacagcacggauaccguugacacaguguuggagaaaaauguaacugugacccauuccgucaacauauuagaagauaagcacaaugggaaacuguguaagcuaagaggaguggcuccccuccaucuggguaaaugcaacaucgccggcuggauucuugggaauccugagugugaaucucugucaacagcaaguagcugguccuacaucguugagaccucuucgucagacaacggaacuugcuauccaggcgauuuuauugacuacgaagaguugagggagcagcucagcaguguguccucuuucgaacgguuugagaucuucccgaagacaagcuccuggcccaaucacgauucaaacaagggugucaccgccgcuuguccucaugcaggggccaaaaguuuuuauaagaaucugauauggcuggugaaaaagggaaacagcuacccaaaacucucuaaguccuauaucaaugacaagggcaaagaaguauuaguucuguggggcauucaccaccccucaacgagcgcugaucaacagagucuuuaccagaacgccgacgcguacguguucgucgggucuucccgcuauagcaagaaauuuaagccugagaucgcaauucgaccaaaagugcgugaucaggagggaagaaugaauuacuauuggacuuugguggaacccggugacaagaucaccuucgaggccacaggcaaccuggucguuccuagguacgcuuuugccauggaacggaacgcagggucgggaauaauuaucucugauacuccagugcaugacugcaauaccacaugucaaaccccgaaaggcgcuauuaacacgucccuacccuuccagaauauccacccuaucacuauugguaagugcccaaaguauguaaaaucaacaaagcuccgccuggccaccgggcuuagaaacgugcccaguauacagagcaggggacuguugggcgcgaucgccggcuuuauugaagggggauggacugguauggucgacggcugguacggguaucaucaccagaaugagcaaggauccggcuacgcagcugaucucaaaucuacacagaacgccaucgacgagauaaccaauaaggugaacagcguuauugagaaaaugaauacgcaguucaccgcuguggguaaggaauuuaaccaccuggagaagcggaucgaaaauuuaaacaaaaaggucgaugacggguuccuggauaucuggacauacaaugccgagcuccuugugcuguuggaaaacgagcgcacucuagacuaucaugauucaaauguaaagaaccuguacgagaagguucgaagucagcucaaaaacaaugcaaaggaaauuggcaacggauguuucgaguuuuaucacaagugcgacaauaccuguauggaauccgugaaaaacggcacauacgauuauccuaaguacagcgaggaagccaaacugaauagagaggagaucgacggggucaaacuugaaucuacuaggauuuaucaaauacuggcuaucuacucaaccguggcgaguagcuugguccucgugguuucccugggagcaauuucuuucuggaugugcucgaacgguagcuuacagugccggaucuguaucuga

SEQ ID NO: 131725 - RNA, 1701 nt, Artificial Sequence; identical to SEQ ID NO: 131447
  derived and/or modified CDS sequence (opt3) from hemagglutinin__InfluenzaA__ACZ16550

SEQ ID NO: 131726 - RNA, 1701 nt, Artificial Sequence; identical to SEQ ID NO: 130704
  derived and/or modified CDS sequence (opt3) from hemagglutinin__InfluenzaA__ACZ16583

SEQ ID NO: 131727 - RNA, 1701 nt, Artificial Sequence; identical to SEQ ID NO: 131447
  derived and/or modified CDS sequence (opt3) from hemagglutinin__InfluenzaA__ACZ16593

SEQ ID NO: 131728 - RNA, 1701 nt, Artificial Sequence; identical to SEQ ID NO: 130704
  derived and/or modified CDS sequence (opt3) from hemagglutinin__InfluenzaA__ACZ16603

SEQ ID NO: 131729 - RNA, 1701 nt, Artificial Sequence; identical to SEQ ID NO: 131447
  derived and/or modified CDS sequence (opt3) from hemagglutinin__InfluenzaA__ACZ16630

SEQ ID NO: 131730 - RNA, 1701 nt, Artificial Sequence; identical to SEQ ID NO: 130704
  derived and/or modified CDS sequence (opt3) from hemagglutinin__InfluenzaA__ACZ16640

SEQ ID NO: 131731 - RNA, 1701 nt, Artificial Sequence; identical to SEQ ID NO: 130704
  derived and/or modified CDS sequence (opt3) from hemagglutinin__InfluenzaA__ACZ16650

SEQ ID NO: 131732 - RNA, 1701 nt, Artificial Sequence; identical to SEQ ID NO: 130704
  derived and/or modified CDS sequence (opt3) from hemagglutinin__InfluenzaA__ACZ16660

SEQ ID NO: 131733 - RNA, 1701 nt, Artificial Sequence; identical to SEQ ID NO: 130704
  derived and/or modified CDS sequence (opt3) from hemagglutinin__InfluenzaA__ACZ16670

SEQ ID NO: 131734 - RNA, 1701 nt, Artificial Sequence; identical to SEQ ID NO: 130704
  derived and/or modified CDS sequence (opt3) from hemagglutinin__InfluenzaA__ACZ16680

SEQ ID NO: 131735 - RNA, 1701 nt, Artificial Sequence; identical to SEQ ID NO: 130704
  derived and/or modified CDS sequence (opt3) from hemagglutinin__InfluenzaA__ACZ16690

SEQ ID NO: 131736 - RNA, 1701 nt, Artificial Sequence; identical to SEQ ID NO: 130704
  derived and/or modified CDS sequence (opt3) from hemagglutinin__InfluenzaA__ACZ16700

SEQ ID NO: 131737 - RNA, 1701 nt, Artificial Sequence; identical to SEQ ID NO: 130704
  derived and/or modified CDS sequence (opt3) from hemagglutinin__InfluenzaA__ACZ16710

SEQ ID NO: 131738 - RNA, 1701 nt, Artificial Sequence; identical to SEQ ID NO: 130704
  derived and/or modified CDS sequence (opt3) from hemagglutinin__InfluenzaA__ACZ16720

SEQ ID NO: 131739 - RNA, 1701 nt, Artificial Sequence; identical to SEQ ID NO: 131447
  derived and/or modified CDS sequence (opt3) from hemagglutinin__InfluenzaA__ACZ16730

SEQ ID NO: 131740 - RNA, 1701 nt, Artificial Sequence; identical to SEQ ID NO: 131447
  derived and/or modified CDS sequence (opt3) from hemagglutinin__InfluenzaA__ACZ16740

SEQ ID NO: 131741 - RNA, 1701 nt, Artificial Sequence; identical to SEQ ID NO: 130704
  derived and/or modified CDS sequence (opt3) from hemagglutinin__InfluenzaA__ACZ16750

SEQ ID NO: 131742 - RNA, 1701 nt, Artificial Sequence; identical to SEQ ID NO: 130704
  derived and/or modified CDS sequence (opt3) from hemagglutinin__InfluenzaA__ACZ16760

SEQ ID NO: 131743 - RNA, 1701 nt, Artificial Sequence; identical to SEQ ID NO: 130897
  derived and/or modified CDS sequence (opt3) from hemagglutinin__InfluenzaA__ACZ16770

SEQ ID NO: 131744 - RNA, 1701 nt, Artificial Sequence; identical to SEQ ID NO: 130704
  derived and/or modified CDS sequence (opt3) from hemagglutinin__InfluenzaA__ACZ16780

SEQ ID NO: 131745 - RNA, 1701 nt, Artificial Sequence; identical to SEQ ID NO: 130704
  derived and/or modified CDS sequence (opt3) from hemagglutinin__InfluenzaA__ACZ16790

SEQ ID NO: 131746 - RNA, 1701 nt, Artificial Sequence; identical to SEQ ID NO: 130704
  derived and/or modified CDS sequence (opt3) from hemagglutinin__InfluenzaA__ACZ16800

SEQ ID NO: 131747 - RNA, 1701 nt, Artificial Sequence; identical to SEQ ID NO: 130704
  derived and/or modified CDS sequence (opt3) from hemagglutinin__InfluenzaA__ACZ16810

SEQ ID NO: 131748 - RNA, 1701 nt, Artificial Sequence; identical to SEQ ID NO: 131379
  derived and/or modified CDS sequence (opt3) from hemagglutinin__InfluenzaA__ACZ16820

SEQ ID NO: 131749 - RNA, 1701 nt, Artificial Sequence; identical to SEQ ID NO: 130704
  derived and/or modified CDS sequence (opt3) from hemagglutinin__InfluenzaA__ACZ16830

SEQ ID NO: 131750 - RNA, 1701 nt, Artificial Sequence
  derived and/or modified CDS sequence (opt3) from hemagglutinin__InfluenzaA__ACZ16840
augaaggccauccuggugguccuccuuuacaccuucgcuacagcaaacgccgacacucugugcauuggcuaucacgcgaauaacagcacggauaccguugacacaguguuggagaaaaauguaacugugacccauuccgucaacuuacuggaagauaagcacaaugggaaacuauguaagcucagaggaguggcuccccugcaucuugguaaaugcaacauagccggcuggauccuggggaauccugagugugaaucuuugucaacagcaaguagcugguccuacauuguugagaccucuucgucagacaacggaacuugcuauccaggcgauuuuaucgacuacgaggagcucagggagcagcugagcaguguguccucuuucgaacgguuugagauuuucccgaagacaagcuccuggcccaaucacgauucaaacaagggugucaccgccgcuuguccucaugcaggggccaaaaguuuuuauaagaaucugaucuggcucgugaaaaagggaaacagcuacccaaaauuaucuaaguccuauauaaaugacaagggcaaagaaguacugguucuuuggggcauccaccaccccucaacgagcgcugaucaacagaguuuguaccagaacgccgacgcguacguguucgucgggucuucccgcuauagcaagaaauuuaagccugagauugcaauccgaacuaaagugcgugaucaggagggaagaaugaauuacuauuggacccugguggaaccaggugacaagauuacauucgaggccacuggcaaccuagucguucccagguacgcuuuugccauggaacggaacgcagggucgggaaucauaauuucugauaccccugugcaugacugcaauacaaccugucaaacgccaaaaggcgcuaucaacacuucccucccguuccagaauauucaccccaucacaaucgguaagugcccuaaguauguaaaaucaaccaagcugcgccuugccacugggcugagaaacgugccaaguauucagagcaggggauuguuuggcgcgauagccggcuucaucgaagggggauggacagguauggucgacggcugguacggguaucaucaccagaaugaacaaggauccggcuacgcagcugaucucaaaucuacccagaacgccauugacgagaucacgaauaaggugaacagcguuauagagaaaaugaauacccaguuuacagcuguggguaaggaguucaaccaccuggaaaagcggauugaaaauuuaaacaaaaaggucgaugacggguuccuggauaucuggacuuacaaugccgagcuccuugugcuguuggaaaacgagcgcacccuagacuaucaugauucaaauguaaagaaccuguacgagaagguucgaagucagcucaaaaacaaugcaaaggaaaucggcaacggauguuuugaguucuaucacaagugcgacaauacauguauggaauccgugaaaaacggcacuuacgauuaucccaaguacagcgaggaagccaaacugaauagagaggagauugacggggucaaacuugaaucuaccaggaucuaucaaauucuggcuauauacucaacaguggcgaguagcuugguccucgugguuucccugggagcaaucucuuuuuggaugugcucgaacgguagcuuacagugccggauuuguaucuga

SEQ ID NO: 131751 - RNA, 1701 nt, Artificial Sequence; identical to SEQ ID NO: 130704
  derived and/or modified CDS sequence (opt3) from hemagglutinin__InfluenzaA__ACZ16850

SEQ ID NO: 131752 - RNA, 1701 nt, Artificial Sequence
  derived and/or modified CDS sequence (opt3) from hemagglutinin__InfluenzaA__ACZ16860
augaaggccauccuggugguccuccuuuacaccuucgcuacagcaaacgccgacacucugugcauuggcuaucacgcgaauaacagcacggauaccguugacacaguguuggagaagaauguaacugugacccauuccgucaacuuacuggaagauaagcacaaugggaaacuauguaagcucagaggaguggcuccccugcaucuugguaaaugcaacauagccggcuggauccuggggaauccugagugugaaucuuugucaacagcaaguagcugguccuacauuguugagaccucuucgucagacaacggaacuugcuauccaggcgauuuuaucgacuacgaggagcucagggagcagcugagcaguguguccucuuucgaacgguuugagauuuucccgaagacaagcuccuggcccaaucacgauucaaacaagggugucaccgccgcuuguccucaugcaggggccaaaaguuuuuauaagaaucugaucuggcucgugaaaaagggaaacagcuacccaaaauuaucuaaguccuauauaaaugacaagggcaaagaaguacugguucuuuggggcauccaccaccccucaacgagcgcugaucaacagaguuuguaccagaacgccgacgcguacguguucgucgggucuucccgcuauagcaagaaauuuaagccugagauugcaauccgaccaaaagugcgugaucaggagggaagaaugaauuacuauuggacucugguggaacccggugacaagauuaccuucgaggccacaggcaaccuagucgcuccuagguacgccuuugcaauggaacggaacgcugggucgggaaucauaauuucugauacuccaguucaugacugcaauaccacaugucaaaccccgaaaggcgccaucaacacgucccuccccuuccagaauauucacccuaucacuaucgguaagugcccaaaguaugugaaaucaacaaagcugcgccuugcgaccgggcugagaaacguacccaguauucagagcaggggauuguuuggcgccauagcaggcuucaucgaagggggauggacugguaugguggacggcugguacggguaucaucaccagaaugaacaaggauccggcuacgcugccgaucucaaaucuacacagaacgcuauugacgagaucaccaauaaggucaacagcgugauagagaaaaugaauacgcaguuuaccgccguugguaaggaguucaaccaccuggaaaagcggauugaaaauuuaaacaaaaagguggaugacggguuccuggauaucuggacauacaaugcagagcuccuuguccuguuggaaaacgagcgcacucuagacuaucaugauucaaaugugaaaaaccuguacgagaagguacgaagucagcucaaaaacaaugccaaggaaaucggcaacggauguuuugaguucuaucacaagugcgacaauaccuguauggaauccguuaaaaacggcacauacgauuauccuaaguacagcgaggaagcuaaacugaauagagaggagauugacggggugaaacuugaaucuacuaggaucuaucaaauucuggcgauauacucaaccgucgcaaguagcuuggugcucgucgugucccugggagccaucucuuuuuggaugugcucgaacgguagcuuacagugccggauuuguaucuga

SEQ ID NO: 131753 - RNA, 1701 nt, Artificial Sequence; identical to SEQ ID NO: 131447
  derived and/or modified CDS sequence (opt3) from hemagglutinin__InfluenzaA__ACZ16870

SEQ ID NO: 131754 - RNA, 1701 nt, Artificial Sequence
  derived and/or modified CDS sequence (opt3) from hemagglutinin__InfluenzaA__ACZ16880
augaaggccauccuggugguccuccuuuacaccuucgcuacagcaaacgccgacacucugugcauuggcuaucacgcgaauaacagcacggauaccguugacacaguguuggagaaaaauguaacugugacccauuccgucaacuuacuggaagauaagcacaaugggaaacuauguaagcucagaggaguggcuccccugcaucuugguaaaugcaacauagccggcuggauccuggggaauccugagugugaaucuuugucaacagcaaguagcugguccuacauuguugagaccucuucgucagacaacggaacuugcuauccaggcgauuuuaucgacuacgaggagcucagggagcagcugagcaguguguccucuuucgaacgguuugagauuuucccgaagacaagcuccuggcccaaucacgauucaaacaagggugucaccgccgcuuguccucaugcaggggccaaaaguuuuuauaagaaucugaucuggcucgugaaaaagggaaacagcuacccaaaauuaucuaaguccuauauaaaugacaagggcaaagaaguacugguucuuuggggcauccaccaccccucaacgagcgcugaucaacagaguuuguaccagaacgccgacgcguacguguucgucgggucuucccgcuauagcaagaaauuuaagccugagauugcaauccgaccaaaagugcgugaucaggagggaagaaugaauuacuauuggacucugguggaacccggugacaagauuaccuucgaggccacaggcaaccuagucguuccuagguacgcuuuugccauggaacggaacgaugggucgggaaucauaauuucugacacuccagugcaugacugcaauaccacaugucaaaccccgaaaggcgcaaucaacacgucccuccccuuccagaauauucacccuaucacuaucgguaagugcccaaaguauguaaaaucaacaaagcugcgccuugcuaccgggcugagaaacgugcccaguauucagagcaggggauuguuuggcgccauagcgggcuucaucgaagggggauggacugguauggucgauggcugguacggguaucaucaccagaaugaacaaggauccggcuacgccgcagaccucaaaucuacacagaacgcuauugaugagaucaccaauaaggugaacagcguuauagagaaaaugaauacgcaguuuaccgccguggguaaggaguucaaccaccuggaaaagcggauugaaaauuuaaacaaaaaggucgacgauggguuccuggacaucuggacauacaaugcugagcuccuugugcuguuggaaaacgagcgcacucuagauuaucaugacucaaauguaaagaaccuguacgagaagguucgaagucagcucaaaaacaaugccaaggaaaucggcaacggauguuuugaguucuaucacaagugcaauaacaccuguauggaauccgugaaaaauggcacauacgauuauccuaaguacagcgaggaagcaaaacugaacagagaggagauugacggggucaaacuugaaucuacuaggaucuaucaaauucuggccauauacucaaccguggcuaguagcuugguccucgugguuucccugggagcgaucucuuuuuggaugugcucgaaugguagcuuacagugccggauuuguaucuga

SEQ ID NO: 131755 - RNA, 1701 nt, Artificial Sequence; identical to SEQ ID NO: 131452
  derived and/or modified CDS sequence (opt3) from hemagglutinin__InfluenzaA__ACZ16890

SEQ ID NO: 131756 - RNA, 1701 nt, Artificial Sequence; identical to SEQ ID NO: 130704
  derived and/or modified CDS sequence (opt3) from hemagglutinin__InfluenzaA__ACZ16900

SEQ ID NO: 131757 - RNA, 1701 nt, Artificial Sequence; identical to SEQ ID NO: 130704
  derived and/or modified CDS sequence (opt3) from hemagglutinin__InfluenzaA__ACZ16910

SEQ ID NO: 131758 - RNA, 1701 nt, Artificial Sequence; identical to SEQ ID NO: 130704
  derived and/or modified CDS sequence (opt3) from hemagglutinin__InfluenzaA__ACZ16920

SEQ ID NO: 131759 - RNA, 1701 nt, Artificial Sequence; identical to SEQ ID NO: 130717
  derived and/or modified CDS sequence (opt3) from hemagglutinin__InfluenzaA__ACZ16930

SEQ ID NO: 131760 - RNA, 1701 nt, Artificial Sequence; identical to SEQ ID NO: 130717
  derived and/or modified CDS sequence (opt3) from hemagglutinin__InfluenzaA__ACZ16940

SEQ ID NO: 131761 - RNA, 1701 nt, Artificial Sequence; identical to SEQ ID NO: 130704
  derived and/or modified CDS sequence (opt3) from hemagglutinin__InfluenzaA__ACZ16950

SEQ ID NO: 131762 - RNA, 1701 nt, Artificial Sequence; identical to SEQ ID NO: 130959
  derived and/or modified CDS sequence (opt3) from hemagglutinin__InfluenzaA__ACZ16960

SEQ ID NO: 131763 - RNA, 1701 nt, Artificial Sequence
  derived and/or modified CDS sequence (opt3) from hemagglutinin__InfluenzaA__ACZ16970
augaaggccauccuggugguccuccuuuacaccuucgcuacagcaaacgccgacacucugugcauuggcuaucacgcgaauaacagcacggauaccguugacacaguguuggagaaaaauguaacugugacccauuccgucaacuuacuggaagauaagcacaaugggaaacuauguaagcucagaggaguggcuccccugcaucuugguaaaugcaacauagccggcuggauccuggggaauccugagugugaaucuuugucaacagcaaguagcugguccuacauuguugagaccucuucgucagacaacggaacuugcuauccaggcgauuuuaucgacuacgaagaacucagggagcagcugagcaguguguccucuuucgaacgguuugagauuuucccgaagacaagcuccuggcccaaucacgauucaaacaagggugucaccgccgcuuguccucaugcaggggccaaaaguuuuuauaagaaucugaucuggcucgugaaagaaggaaacagcuacccaaaguuaucuaaauccuauauaaaugacaagggcaaggagguacugguucuuuggggcauccaccaccccucaacgagcgcugaucaacagaguuuguaccagaacgccgacgcguacguguucgucgggacuucucgcuauuccaaaaaguuuaaaccugagauugcaauccgaccaaaggugcgugaucaggaaggaagaaugaauuacuauuggacccugguggagcccggugacaaaauuacauucgaagccacuggcaaccuagucguuccuagguacgcuuuugccauggagcggaacgcagggagcggaaucauaauuucggauaccccagugcaugacugcaauacaaccugucaaacgccgaagggcgcuaucaacacuucucuccccuuccagaauauucacccuaucacaaucgguaaaugcccaaaguauguaaaguccaccaaacugcgccuugccacugggcugagaaacgugcccucaauucagaguaggggauuguuuggcgcgauagccggcuucaucgaagggggauggacagguauggucgacggcugguacggguaucaucaccagaaugagcaaggaagcggcuacgcagcugaucucaaguccacccagaacgccauugacgagaucacgaauaaagugaacucuguuauagaaaagaugaauacccaguuuacagcuguggguaaagaguucaaccaccuggaaaagcggauugagaauuuaaacaagaaagucgaugacggguuccuggauaucuggacuuacaaugccgaacuccuugugcuguuggagaacgagcgcacccuagacuaucaugauagcaauguaaagaaccuguacgaaaaaguucgaucacagcucaagaacaaugcaaaagagaucggcaacggauguuuugaguucuaucacaagugcgacaauacauguauggagagugugaagaacggcacuuacgauuauccuaaauacuccgaagaggccaagcugaauagagaggaaauugacggggucaaacuugagagcaccaggaucuaucaaauucuggcuauauacucuacaguggcgucaaguuugguccucgugguuagccugggagcaaucuccuuuuggaugugcucuaacgguucguuacagugccggauuuguaucuga

SEQ ID NO: 131764 - RNA, 1701 nt, Artificial Sequence; identical to SEQ ID NO: 130717
  derived and/or modified CDS sequence (opt3) from hemagglutinin__InfluenzaA__ACZ16980

SEQ ID NO: 131765 - RNA, 1701 nt, Artificial Sequence; identical to SEQ ID NO: 130717
  derived and/or modified CDS sequence (opt3) from hemagglutinin__InfluenzaA__ACZ17000

SEQ ID NO: 131766 - RNA, 1701 nt, Artificial Sequence
  derived and/or modified CDS sequence (opt3) from hemagglutinin__InfluenzaA__ACZ17010
augaaggccauccuggugguccuccuuuacaccuucgcuacagcaaacgccgacacucugugcauuggcuaucacgcgaauaacagcacggauaccguugacacaguguuggagaaaaauguaacugugacccauuccgucaacuuacuggaagauaagcacaaugggaaacuauguaagcucagaggaguggcuccccugcaucuugguaaaugcaacauagccggcuggauccuggggaauccugagugugaaucuuugucaacagcaaguagcugguccuacauuguugagaccucuucgucagacaacggaacuugcuauccaggcgauuuuaucgacuacgaggagcucagggagcagcugagcaguguguccucuuucgaacgguuugagauuuucccgaagacaagcuccuggcccaaucacgauucaaacaagggugucaccgccgcuuguccucaugcaggggccaaaaguuuuuauaagaaucugaucuggcucgugaaaaagggaaacagcuacccaaaauuaucuaaguccuauauaaaugacaagggcaaagaaguacugguucuuuggggcauccaccaccccucaacgagcgcugaucaacagaguuuguaccagaacgccgacgcguacguguucgucgggucuuccaaguauagcaaaaaguuuaaaccugagauugcaauccgcccaaaggugcgagaucaggagggacguaugaauuacuauuggacucugguggaacccggugacaaaauuaccuucgaggccacaggcaaccuagucguuccuagauacgcuuuugccauggaaaggaacgcagggucgggaaucauaauuucugauacuccagugcaugacugcaauaccacaugucaaaccccgaagggcgcuaucaacacgucccuccccuuccagaauauucacccuaucacuaucgguaagugcccaaaauauguaaagucaacaaaacugcggcuugccaccgggcugcgcaacgugcccaguauucagagcagaggauuguuuggcgcgauagccggcuucaucgaagggggauggacugguauggucgacggcugguacggguaucaucaccagaaugaacaaggauccggcuacgcagcugaucucaagucuacacagaacgccauugacaaaaucaccaauaaggugaacagcguuauagagaagaugaauacgcaguuuaccgcuguggguaaagaguucaaccaccuggaaaagaggauugagaauuuaaacaaaaaggucgaugacggguuccuggauaucuggacauacaaugccgaacuccuugugcuguuggagaacgaacggacucuagacuaucaugauucaaauguaaagaaccuguacgagaagguucgcagucagcucaagaacaaugcaaaagagaucggcaacggauguuuugaguucuaucacaagugcgacaauaccuguauggaauccgugaaaaacggcacauacgauuauccuaaguacagcgaagaggccaaacugaaucgagaagagauugacggggucaaacuugagucuacuagaaucuaucaaauucuggcuauauacucaaccguggcgaguagcuugguccucgugguuucccugggagcaaucucuuuuuggaugugcucgaacgguagcuuacagugcaggauuuguaucuga

SEQ ID NO: 131767 - RNA, 1701 nt, Artificial Sequence; identical to SEQ ID NO: 130717
  derived and/or modified CDS sequence (opt3) from hemagglutinin__InfluenzaA__ACZ17020

SEQ ID NO: 131768 - RNA, 1701 nt, Artificial Sequence
  derived and/or modified CDS sequence (opt3) from hemagglutinin__InfluenzaA__ACZ17030
augaaggccacccuggugguccuccuuuacacauucgcuacugcaaacgccgacacgcugugcaucggcuaucacgcgaauaacagcaccgauacaguugacacuguguuggagaaaaauguaaccgugacacauuccgucaacuuacuggaagauaagcacaaugggaaacuauguaagcucagaggaguggcuccccugcaucuugguaaaugcaacauugccggcuggauacuggggaauccugagugugaaucuuugucaaccgcaaguagcugguccuacaucguugaggccucuucgucagacaacggaacuugcuauccaggcgauuuuauugacuacgaggagcucagggagcagcugagcaguguguccucuuucgaacgguuugagaucuucccgaagacaagcuccuggcccaaucacgauucaaacaagggugucaccgcugcauguccucaugccggggcuaaaaguuuuuauaagaaucugauuuggcucgugaaaaagggaaacagcuacccaaaauuaucuaaguccuauaucaaugacaagggcaaagaaguacugguucuuuggggcauacaccaccccucaacgagcgccgaucaacagaguuuguaccagaacgcggacgcauacguguucgucgggacuucucgcuauuccaagaaauuuaagccugagaucgccauucgaccaaaagugcgugaucaggagggaagaaugaauuacuauuggacccugguggaacccggugacaagaucacauucgaggcuacuggcaaccuagucguuccuagguacgccuuugcaauggaacggaacgcugggagcggaauuaucauaucggauaccccagugcaugacugcaauacaaccugucaaacgccgaaaggcgccauuaacacuucucuccccuuccagaauauccacccuauuacaaucgguaagugcccaaaguauguaaaauccaccaagcugcgccuugcgacugggcugagaaacgugcccucaauccagaguaggggauuguuuggcgccauugcaggcuucauagaagggggauggacagguauggucgacggcugguacggguaucaucaccagaaugaacaaggaagcggcuacgcugccgaucucaaauccacccagaacgcuaucgacgagauuacgaauaaggugaacucuguuaucgagaaaaugaauacccaguuuacagccguggguaaggaguucaaccaccuggaaaagcggauagaaaauuuaaacaaaaaggucgaugacggguuccuggauauuuggacuuacaaugcagagcuccuugugcuguuggaaaacgagcgcacccuagacuaucaugauagcaauguaaagaaccuguacgagaagguucgaucacagcucaaaaacaaugccaaggaaaucggcaacggauguuuugaguucuaucacaagugcgacaauacauguauggaaagugugaaaaacggcacuuacgauuauccuaaguacuccgaggaagcuaaacugaauagagaggagaucgacggggucaaacuugaaagcaccaggauuuaucaaauccuggcgauuuacucuacaguggcaucaaguuugguccucgugguuagccugggagccauauccuuuuggaugugcucuaacgguucguuacagugccggaucuguauuuga

SEQ ID NO: 131769 - RNA, 1701 nt, Artificial Sequence
  derived and/or modified CDS sequence (opt3) from hemagglutinin__InfluenzaA__ACZ17040
augaaggccauccuggugguccuccuuuacaccuucgcuacagcaaacgccgacacucugugcauuggcuaucacgcgaauaacagcacggauaccguugacacaguguuggagaaaaauguaacugugacccauuccgucaacuuacuggaagauaagcacaaugggaaacuauguaagcucagaggaguggcuccccugcaucuugguaaaugcaacauagccggcuggauccuggggaauccugagugugaaucuuugucaacagcaaguagcugguccuacauuguugagaccucuucgucagacaacggaacuugcuauccaggcgauuuuaucgacuacgaggagcucagggagcagcugagcaguguguccucuuucgaacgguuugagauuuucccgaagacaagcuccuggcccaaucacgauucaaacaagggugucaccgccgcuuguccucaugcaggggccaaaaguuuuuauaagaaucugaucuggcucgugaaaaagggaaacagcuacccaaaauuaucuaaguccuauauaaaugacaagggcaaagaaguacugguucuuuggggcauccaccaccccucaacgagcgcugaucaacagaguuuguaccagaacgccgacgcguacguguucgucgggacuucucgcuauuccaagaaauuuaagccugagauugcaauccgaccaaaagugcgugaucaggagggaagaaugaauuacuauuggacccugguggaacccggugacaagauuacauucgaggccacuggcaaccuagucguuccuagguacgcuuuugccauggaacggaacgcagggagcggaaucauaauuucggauaccccagugcaugacugcaauacaaccugucaaacgccgaaaggcgcuaucaacacuucucuccccuuccagaauauucacccuaucacaaucgguaagugcccaaaguauguaaaauccaccaagcugcgccuugccacugggcugagaaacgugcccucaauucagaguaggggauuguuuggcgcgauagccggcuucaucgaagggggauggacagguauggucgacggcugguacggguaucaucaccagaaugaacaaggaagcggcuacgcagcugaucucaaauccacccagaacgccauugacgagaucacgaauaaggugaacucuguuauagagaaaaugaauacccaguuuacagcuguggguaaggaguucaaccaccuggaaaagcggauugaaaauuuaaacaaaaaggucgaugacggguuccuggauaucuggacuuacaaugccgagcuccuugugcuguuggaaaacgagcgcacccuagacuaucaugauagcaauguuaaaaaccuguacgagaagguacgaucacagcucaaaaacaaugcaaaggaaaucggcaacggauguuuugaguucuaucacaagugcgacaauacauguauggaaagugugaaaaacggcacuuacgauuauccuaaguacuccaaagaggccaagcugaauagagaagagauugacggggucaaacuugagagcaccaggaucuaucaaauucuggcuauauacucuacaguggcgucaaguuugguccucgugguuagccugggagcaaucuccuuuuggaugugcucuaacgguucguuacagugccggauuuguaucuga

SEQ ID NO: 131770 - RNA, 1701 nt, Artificial Sequence; identical to SEQ ID NO: 130717
  derived and/or modified CDS sequence (opt3) from hemagglutinin__InfluenzaA__ACZ17050

SEQ ID NO: 131771 - RNA, 1701 nt, Artificial Sequence; identical to SEQ ID NO: 130717
  derived and/or modified CDS sequence (opt3) from hemagglutinin__InfluenzaA__ACZ17060

SEQ ID NO: 131772 - RNA, 1701 nt, Artificial Sequence; identical to SEQ ID NO: 130717
  derived and/or modified CDS sequence (opt3) from hemagglutinin__InfluenzaA__ACZ17070

SEQ ID NO: 131773 - RNA, 1701 nt, Artificial Sequence; identical to SEQ ID NO: 130897
  derived and/or modified CDS sequence (opt3) from hemagglutinin__InfluenzaA__ACZ17080

SEQ ID NO: 131774 - RNA, 1701 nt, Artificial Sequence
  derived and/or modified CDS sequence (opt3) from hemagglutinin__InfluenzaA__ACZ17090
augaaggccauccuggugguccuccuuuacaccuucgcuacagcaaacgccgacacucugugcauuggcuaucacgcgaauaacagcacggauaccguugacacaguguuggagaaaaauguaacugugacccauuccgucaacuuacugggggauaagcacaauggaaaacuauguaagcucagagguguggcuccccugcaucuuggcaaaugcaacauagccggguggauccugggaaauccugaaugugagucuuugucaacagcaaguagcugguccuacauuguugaaaccucuucgucagacaacggcacuugcuauccaggugauuuuaucgacuacgaggaacucagggagcagcugagcaguguguccucuuucgagcgguuugaaauuuucccgaagacaagcuccuggcccaaucacgauucaaacaagggggucaccgccgcuuguccucaugcaggagccaaaaguuuuuauaagaaucugaucuggcucgugaaaaagggcaacagcuacccaaaauuaucuaaguccuauauaaaugacaagggcaaagagguacugguucuuugggggauccaccaccccucaacgagcgcugaucaacagaguuuguaccagaacgccgacgcguacguguucgucggaacuucucgcuauuccaagaaauuuaagccugaaauugcaauccgaccaaaagugcgugaucaggaggguagaaugaauuacuauuggacccugguggagcccggcgacaagauuacauucgaagccacugggaaccuagucguuccuagguacgcuuuugccauggagcggaacgcaggaagcggcaucauaauuucggauaccccagugcaugacugcaauacaaccugucaaacgccgaaaggugcuaucaacacuucucuccccuuccagaauauucacccuaucacaaucgggaagugcccaaaguauguaaaauccaccaagcugcgccuugccacuggacugagaaacgugcccucaauucagaguaggggcuuguuuggcgcgauagccggguucaucgaaggagguuggacaggcauggucgacgggugguacggauaucaucaccagaaugagcaaggcagcgguuacgcagcugaucucaaauccacccagaacgccauugacgaaaucacgaauaaggugaacucuguuauagagaaaaugaauacccaguuuacagcuguggggaaggaguucaaccaccuggaaaagcggauugagaauuuaaacaaaaaggucgaugacggcuuccuggauaucuggacuuacaaugccgaacuccuugugcuguuggagaacgaacgcacccuagacuaucaugauagcaauguuaaaaaccuguacgagaagguaaaaucacagcucaagaacaaugcaaaggagaucggaaacggcuguuuugaguucuaucacaaaugcgacaauacauguauggaaagugugaagaacgggacuuacgauuauccuaaauacuccgaagaggccaagcugaaucgagaagagauugacggagucaaacuugagagcaccagaaucuaucaaauucuggcuauauacucuacaguggcgucaaguuugguccucgugguuagccugggugcaaucuccuuuuggaugugcucuaacggcucguuacagugcaggauuuguaucuga

SEQ ID NO: 131775 - RNA, 1701 nt, Artificial Sequence; identical to SEQ ID NO: 130704
  derived and/or modified CDS sequence (opt3) from hemagglutinin__InfluenzaA__ACZ17100

SEQ ID NO: 131776 - RNA, 1701 nt, Artificial Sequence
  derived and/or modified CDS sequence (opt3) from hemagglutinin__InfluenzaA__ACZ17110
augaaggccauccuggugguccuccuuuacaccuucgcuacagcaaacgccgacacucugugcauuggcuaucacgcgaauaacagcacggauaccguugacacaguguuggagaaaaauguaacugugacccauuccgucaacuuacuggaagauaagcacaaugggaaacuauguaagcucagaggaguggcuccccugcaucuugguaaaugcaacauagccggcuggauccuggggaauccugagugugaaucuuugucaacagcaaguagcugguccuacauuguugagaccucuucgucagacaacggaacuugcuauccaggcgauuuuaucgacuacgaagaacucagggagcagcugagcaguguguccucuuucgaacgguuugagauuuucccgaagacaagcuccuggcccaaucacgauucaaacaagggugucaccgccgcuuguccucaugcaggggccaaaaguuuuuauaagaaucugaucuggcucgugaaaaagggaaacagcuacccagaauuaucuaaauccuauauaaaugacaagggcaaggagguacugguucuuuggggcauccaccaccccucaacgagcgcugaucaacagaguuuguaccagaacgccgacgcguacguguucgucgggacuucucgcuauuccaaaaaguuuaaaccugagauugcaauccgaccaaaggugcgugaucaggaaggaagaaugaauuacuauuggacccugguggagcccggugacaaaauuacauucgaagccacuggcaaccuagucguuccuagguacgcuuuugccauggagcggaacgcagggagcggaaucauaauuucggauaccccagugcaugacugcaauacaaccugucaaacgccgaagggcgcuaucaacacuucucuccccuuccagaauauucacccuaucacaaucgguaaaugcccaaaguauguaaaguccaccaaacugcgccuugccacugggcugagaaacgugcccucaauucagaguaggggauuguuuggcgcgauagccggcuucaucgaagggggauggacagguauggucgacggcugguacggguaucaucaccagaaugagcaaggaagcggcuacgcagcugaucucaaguccacccagaacgccauugacgagaucacgaauaaagugaacucuguuauagaaaagaugaauacccaguuuacagcuguggguaaagaguucaaccaccuggaaaagcggauugagaauuuaaacaagaaagucgaugacggguuccuggauaucuggacuuacaaugccgaacuccuugugcuguuggagaacgagcgcacccuagacuaucaugauagcaauguaaagaaccuguacgaaaaaguucgaucacagcucaagaacaaugcaaaagagaucggcaacggauguuuugaguucuaucacaagugcgacaauacauguauggagagugugaagaacggcacuuacgauuauccuaaauacuccgaagaggccaagcugaauagagaggaaauugacggggucaaacuugagagcaccaggaucuaucaaauucuggcuauauacucuacaguggcgucaaguuugguccucgugguuagccugggagcaaucuccuuuuggaugugcucuaacgguucguuacagugccggauuuguaucuga

SEQ ID NO: 131777 - RNA, 1701 nt, Artificial Sequence
  derived and/or modified CDS sequence (opt3) from hemagglutinin__InfluenzaA__ACZ17120
augaaggccauccuggugguccuccuuuacaccuucgcuacagcaaacgccgacacucugugcauuggcuaucacgcgaauaacagcacggauaccguugacacaguguuggagaaaaauguaacugugacccauuccgucaacuuacuggaagauaagcacaaugggaaacuauguaagcucagaggaguggcuccccugcaucuugguaaaugcaacauagccggcuggauccuggggaauccugagugugaaucuuugucaacagcaaguagcugguccuacauuguugagaccucuucgucagacaacggaacuugcuauccaggcgauuuuaucgacuacgaggagcucagggagcagcugagcaguguguccucuuucgaacgguuugagauuuucccgaagacaagcuccuggcccaaucacgauucaaacaagggugucaccgccgcuuguccucaugcaggggccaaaaguuuuuauaagaaucugaucuggcucgugaaaaagggaaacagcuacccaaaauuaucuaaguccuauauaaaugacaagggcaaagaaguacugguucuuuggggcauccaccaccccucaacgagcgcugaucaacagaguuuguaccagaacgccgacgcguacguguucgucgggacuucucgcuauuccaagaaauuuaagccugagauugcaauccgaccaaaagugcgugaucaggagggaagaaugaauuacuauuggacccugguggaacccggugacaagauuacauucgaggccacuggcaaccuagucguuccuagguacgcuuuugccauggaacggaacgcagggagcggaaucauaauuucggauaccccagugcaugacugcaauacaaccugucaaacgccgaaaggcgcuaucaacacuucucuccccuuccagaauauucacccuaucacaaucgguaagugcccaaaguauguaaaauccaccaagcugcgccuugccacugggcugagaaacgugcccucaauucagaguaggggauuguuuggcgcgauagccggcuucaucgaagggggauggacagguauggucgacggcugguacggguaucaucaccagaaugaacaaggaagcggcuacgcagcugaucucaaauccacccagaacgccauugacgagaucacgaauaaggugaacucuguuauagagaaaaugaauacccaguuuacagcuguggguaaggaguucaaccaccuggaaaagcggauugaaaauuuaaacaaaaaggucgaugacggguuccuggauaucuggacuuacaaugccgagcuccuugugcuguuggaaaacgagcgcacccuagacuaucaugauagcaauguaaagaaccuguacgagaagguucgaucacagcucaaaacaaacgcaaaggaaaucggcaauggauguuuugaguucuaucacaagugcgacaacacuuguauggaaagugugaaaaauggcaccuacgauuauccuaaguacuccgaggaagccaaacugaacagagaggagauugacggggucaaacuugaaagcacaaggaucuaucaaauucuggcuauauacucuaccguggcgucaaguuugguccucgugguuagccugggagcaaucuccuuuuggaugugcucuaaugguucguuacagugccggauuuguaucuga

SEQ ID NO: 131778 - RNA, 1701 nt, Artificial Sequence
  derived and/or modified CDS sequence (opt3) from hemagglutinin__InfluenzaA__ACZ17130
augaaggccauccuggugguccuccuuuacaccuucgcuacagcaaacgccgacacucugugcauuggcuaucacgcgaauaacagcacggauaccguugacacaguguuggagaaaaauguaacugugacccauuccgucaacuuacuggaagauaagcacaaugggaaacuauguaagcucagaggaguggcuccccugcaucuugguaaaugcaacauagccggcuggauccuggggaauccugagugugaaucuuugucaacagcaaguagcugguccuacauuguugagaccucuucgucagacaacggaacuugcuauccaggcgauuuuaucgacuacgaggagcucagggagcagcugagcaguguguccucuuucgaacgguuugagauuuucccgaagacaagcuccuggcccaaucacgauucaaacaagggugucaccgccgcuuguccucaugcaggggccaaaaguuuuuauaagaaucugaucuggcucgugaaaaagggaaacagcuacccaaaauuaucuaaguccuauauaaaugacaagggcaaagaaguacugguucuuuggggcauccaccaccccucaacgagcgcugaucaacagaguuuguaccagaacgccgacgcguacguguucgucgggacuucucgcuauuccaagaaauuuaagccugagauugcaauccgaccaaaagugcgugaucaggagggaagaaugaauuacuauuggacccugguggaacccggugacaagauuacauucgaggccacuggcaaccuagucguuccuagguacgcuuuugccauggaacggaacgcagggagcggaaucauaauuucggauaccccagugcaugacugcaauacaaccugucaaacgccgaaaggcgcuaucaacacuucucuccccuuccagaauauucacccuaucacaaucgguaagugcccaaaguauguaaaauccaccaagcugcgccuugccacugggcugagaaacgugcccucaauucagaguaggggauuguuuggcgcgauagccggcuucaucgaagggggauggacagguauggucgacggcugguacggguaucaucaccagaaugaacaaggaagcggcuacgcagcugaucucaaauccacccagaacgccauugacgagaucacgaauaaggugaacucuguuauagagaaaaugaaugcucaguuuaccgccguggguaaggaguucaaccaccuggaaaagcggauugaaaauuuaaacaaaaaggucgaugacggguuccuggauaucuggacauacaaugcagagcuccuugugcuguuggaaaacgagcgcacucuagacuaucaugauagcaauguaaagaaccuguacgagaagguucgaucacagcucaaaaacaaugccaaggaaaucggcaacggauguuuugaguucuaucacaagugcgacaauaccuguauggaaagugugaaaaacggcacauacgauuauccuaaguacuccgaggaagcuaaacugaauagagaggagauugacggggucaaacuugaaagcacuaggaucuaucaaauucuggcgauauacucuaccguggcaucaaguuugguccucgugguuagccugggagccaucuccuuuuggaugugcucuaacgguucguuacagugccggauuuguaucuga

SEQ ID NO: 131779 - RNA, 1701 nt, Artificial Sequence; identical to SEQ ID NO: 131515
  derived and/or modified CDS sequence (opt3) from hemagglutinin__InfluenzaA__ACZ17140

SEQ ID NO: 131780 - RNA, 1701 nt, Artificial Sequence; identical to SEQ ID NO: 131346
  derived and/or modified CDS sequence (opt3) from hemagglutinin__InfluenzaA__ACZ17150

SEQ ID NO: 131781 - RNA, 1701 nt, Artificial Sequence; identical to SEQ ID NO: 131346
  derived and/or modified CDS sequence (opt3) from hemagglutinin__InfluenzaA__ACZ17160

SEQ ID NO: 131782 - RNA, 1701 nt, Artificial Sequence; identical to SEQ ID NO: 131346
  derived and/or modified CDS sequence (opt3) from hemagglutinin__InfluenzaA__ACZ17170

SEQ ID NO: 131783 - RNA, 1701 nt, Artificial Sequence
  derived and/or modified CDS sequence (opt3) from hemagglutinin__InfluenzaA__ACZ17190
augaaggccauccuggugguccuccuuuacaccuucgcuacagcaaacgccgacacucugugcauuggcuaucacgcgaauaacagcacggauaccguugacacaguguuggagaaaaauguaacugugacccauuccgucaacuuacuggaagauaagcacaaugggaaacuauguaagcucagaggaguggcuccccugcaucuugguaaaugcaacauagccggcuggauccuggggaauccugagugugaaucuuugucaacagcaaguagcugguccuacauuguugagaccucuucgucagacaacggaacuugcuauccaggcgauuuuaucgacuacgaagaacucagggagcagcugagcaguguguccucuuucgaacgguuugagauuuucccgaagacaagcuccuggcccaaucacgauucaaacaagggugucaccgccgcuuguccucaugcaggggccaaaaguuuuuauaagaaucugaucuggcucgugaaaaagggaaacagcuacccaaaauuaucuaaguccuauauaaaugacaagggcaaagaaguacugguucuuuggggcauccaccaccccucaacgagcgcugaucaacagaguuuguaccagaacgccgacgcguacguguucgucgggacuucucgcuauuccaagaaauuuaagccugagauugcaauccgaccaaaagugcgugaucaggagggaagaaugaauuacuauuggacccugguggaacccggugacaagauuacauucgaggccacuggcaaccuagucguuccuagguacgcuuuugccauggaacggaacgcagggagcggaaucauaauuucggauaccccagugcaugacugcucuacaaccugucaaacgccggagggcgcuaucaauacuucccuccccuuccagaacauucacccuaucacaaucgguaaaugcccaaaguauguaaagucaaccaaacugcgccuugccacugggcugagaaaugugcccaguauucagagcaggggauuguuuggcgcgauagccggcuucaucgaagggggauggacagguauggucgacggcugguacggguaucaucaccagaacgagcaaggauccggcuacgcagcugaucucaagucuacccagaaugccauugacgagaucacgaacaaagugaauagcguuauagaaaagaugaacacccaguuuacagcuguggguaaagaguucaaucaccuggaaaagcggauugagaacuuaaauaagaaagucgaugacggguuccuggauaucuggacuuacaacgccgaacuccuugugcuguuggagaaugagcgcacccuagacuaucaugauucaaacguaaagaaucuguacgaaaaaguucgaagucagcucaagaacaacgcaaaagagaucggcaauggauguuuugaguucuaucacaagugcgacaacacauguauggaguccgugaagaauggcacuuacgauuauccuaaauacagcgaagaggccaagcugaacagagaggaaauugacggggucaaacuugagucuaccaggaucuaucaaauucuggcuauauacucaacaguggcgaguagcuugguccucgugguuucccugggagcaaucucuuuuuggaugugcucgaaugguagcuuacagugccggauuuguaucuga

SEQ ID NO: 131784 - RNA, 1701 nt, Artificial Sequence; identical to SEQ ID NO: 131783
  derived and/or modified CDS sequence (opt3) from hemagglutinin__InfluenzaA__ACZ17200

SEQ ID NO: 131785 - RNA, 1701 nt, Artificial Sequence; identical to SEQ ID NO: 130717
  derived and/or modified CDS sequence (opt3) from hemagglutinin__InfluenzaA__ACZ17220

SEQ ID NO: 131786 - RNA, 1701 nt, Artificial Sequence
  derived and/or modified CDS sequence (opt3) from hemagglutinin__InfluenzaA__ACZ17230
augaaggccauccuggugguccuccuuuacaccuucgcuacagcaaacgccgacacucugugcauuggcuaucacgcgaauaacagcacggauaccguugacacaguguuggagaaaaauguaacugugacccauuccgucaacuuacuggaagauaagcacaaugggaaacuauguaagcucagaggaguggcuccccugcaucuugguaaaugcaacauagccggcuggauccuggggaauccugagugugaaucuuugucaacagcaaguagcugguccuacauuguugagaccucuucgucagacaacggaacuugcuauccaggcgauuuuaucgacuacgaggagcucaaggagcagcugagcaguguguccucuuucgaaagguuugagauuuucccgaagacaagcuccuggcccaaucacgauucaaacaaaggugucaccgccgcuuguccucaugcaggggccaagaguuuuuauaaaaaucugaucuggcucgugaagaaaggaaacagcuacccaaaguuaucuaaguccuauauaaaugacaaaggcaaggaaguacugguucuuuggggcauccaccaccccucaacgagcgcugaucaacagaguuuguaccagaacgccgacgcguacguguucgucgggacuucucgguauuccaaaaaguuuaaaccugagauugcaauccgcccaaaggugcgagaucaggagggacguaugaauuacuauuggacccugguggaacccggugacaaaauuacauucgaggccacuggcaaccuagucguuccuagauacgcuuuugccauggaaaggaacgcagggagcggaaucauaauuucggauaccccagugcaugacugcaauacaaccugucaaacgccgaagggcgcuaucaacacuucucuccccuuccagaauauucacccuaucacaaucgguaagugcccaaaauauguaaaguccaccaaacugcggcuugccacugggcugcgcaacgugcccucaauucagaguagaggauuguuuggcgcgauagccggcuucaucgaagggggauggacagguauggucgacggcugguacggguaucaucaccagaaugaacaaggaagcggcuacgcagcugaucucaaguccacccagaacgccauugacgagaucacgaauaaagugaacucuguuauagagaagaugaauacccaguuuacagcuguggguaaggaauuuaaccaccuggagaaaaggauugaaaauuuaaacaagaaagucgaugacggguuccuggauaucuggacuuacaaugccgagcuccuugugcuguuggaaaacgagcggacccuagacuaucaugauagcaauguaaagaaccuguacgagaaaguucgcucacagcucaagaacaaugcaaaggaaaucggcaacggauguuucgaguucuaucacaaaugcgacaauacauguauggaaagugugaagaacggcacuuacgauuauccuaaauacuccgaggaagccaagcugaaucgagaggagauugacggggucaaacuugaaagcaccagaaucuaucaaauucuggcuauauacucuacaguggcgucaaguuugguccucgugguuagccugggagcaaucuccuuuuggaugugcucuaacgguucguuacagugcaggauuuguaucuga

SEQ ID NO: 131787 - RNA, 1701 nt, Artificial Sequence; identical to SEQ ID NO: 130717
  derived and/or modified CDS sequence (opt3) from hemagglutinin__InfluenzaA__ACZ17240

SEQ ID NO: 131788 - RNA, 1701 nt, Artificial Sequence; identical to SEQ ID NO: 130717
  derived and/or modified CDS sequence (opt3) from hemagglutinin__InfluenzaA__ACZ17250

SEQ ID NO: 131789 - RNA, 1701 nt, Artificial Sequence; identical to SEQ ID NO: 130717
  derived and/or modified CDS sequence (opt3) from hemagglutinin__InfluenzaA__ACZ17260

SEQ ID NO: 131790 - RNA, 1701 nt, Artificial Sequence
  derived and/or modified CDS sequence (opt3) from hemagglutinin__InfluenzaA__ACZ17270
augaaggccauccuggugguccuccuuuacaccuucgcuacagcaaacgccgacacucugugcauuggcuaucacgcgaauaacagcacggauaccguugacacaguguuggagaagaauguaacugugacccauuccgucaacuuacuggaagauaagcacaaugggaaacuauguaagcucagaggaguggcuccccugcaucuugguaggugcaacauagccggcuggauccuggggaauccugagugugaaucuuugucaacagcaaguagcugguccuacauuguugagaccucuucgucagacaacggaacuugcuauccaggcgauuuuaucgacuacgaggagcuccgggagcagcugagcaguguguccucuuucgaacgcuuugagauuuucccgaaaacaagcuccuggcccaaucacgauucaaacaagggugucaccgccgcuuguccucaugcaggggccaagaguuuuuauaaaaaucugaucuggcucgugaagaaaggaaacagcuacccaaaguuaucuaaauccuauauaaaugacaagggcaaggaaguacugguucuuuggggcauccaccaccccucaacgagcgcugaucaacagaguuuguaccagaacgccgacgcguacguguucgucgggacuucucgauauuccaaaaaguuuaaaccugagauugcaauccguccaaaggugagagaucaggagggaaggaugaauuacuauuggacccugguggaacccggugacaaaauuacauucgaggccacuggcaaccuagucguuccucgguacgcuuuugccauggaacgcaacgcagggagcggaaucauaauuucggauaccccagugcaugacugcaauacaaccugucaaacgccgaagggcgcuaucaacacuucucuccccuuccagaauauucacccuaucacaaucgguaaaugcccaaaguauguaaaguccaccaaacugagacuugccacugggcugaggaacgugcccucaauucagagucggggauuguuuggcgcgauagccggcuucaucgaagggggauggacagguauggucgacggcugguacggguaucaucaccagaaugaacaaggaagcggcuacgcagcugaucucaaguccacccagaacgccauugacgagaucacgaauaaagugaacucuguuauagagaagaugaauacccaguuuacagcuguggguaaagaguucaaccaccuggaaaagcgcauugaaaauuuaaacaagaaagucgaugacggguuccuggauaucuggacuuacaaugccgagcuccuugugcuguuggaaaacgagcgaacccuagacuaucaugauagcaauguaaagaaacuguacgagaagguuagaucacagcucaaaaacaacgcaaaggaaaucggcaauggauguuuugaguucuaucacaagugcgacaacacauguauggaaagugugaaaaauggcacuuacgauuauccuaaguacuccgaggaagccaaacugaacagggaggagauugacggggucaaacuugaaagcacccggguguaucaaauccuggcuauuuacucuacagucgcgucaaguuuggugcucguugugagccugggagcaauauccuuuuggaugugcucuaaugguucguuacagugccguaucuguauuuga

SEQ ID NO: 131791 - RNA, 1701 nt, Artificial Sequence; identical to SEQ ID NO: 130897
  derived and/or modified CDS sequence (opt3) from hemagglutinin__InfluenzaA__ACZ17290

SEQ ID NO: 131792 - RNA, 1701 nt, Artificial Sequence; identical to SEQ ID NO: 130897
  derived and/or modified CDS sequence (opt3) from hemagglutinin__InfluenzaA__ACZ17300

SEQ ID NO: 131793 - RNA, 1701 nt, Artificial Sequence; identical to SEQ ID NO: 130897
  derived and/or modified CDS sequence (opt3) from hemagglutinin__InfluenzaA__ACZ17310

SEQ ID NO: 131794 - RNA, 1701 nt, Artificial Sequence; identical to SEQ ID NO: 130717
  derived and/or modified CDS sequence (opt3) from hemagglutinin__InfluenzaA__ACZ17398

SEQ ID NO: 131795 - RNA, 1701 nt, Artificial Sequence; identical to SEQ ID NO: 130717
  derived and/or modified CDS sequence (opt3) from hemagglutinin__InfluenzaA__ACZ17408

SEQ ID NO: 131796 - RNA, 1701 nt, Artificial Sequence; identical to SEQ ID NO: 130717
  derived and/or modified CDS sequence (opt3) from hemagglutinin__InfluenzaA__ACZ17418

SEQ ID NO: 131797 - RNA, 1701 nt, Artificial Sequence
  derived and/or modified CDS sequence (opt3) from hemagglutinin__InfluenzaA__ACZ17438
augaaggccauccuggugguccuccuuuacaccuucgcuacagcaaacgccgacacucugugcauuggcuaucacgcgaauaacagcacggauaccguugacacaguguuggagaaaaauguaacugugacccauuccgucaacuuacuggaagauaagcacaaugggaaacuauguaagcucagaggaguggcuccccugcaucuugguaaaugcaacauagccggcuggauccuggggaauccugagugugaaucuuugucaacagcaaguagcugguccuacauuguugagaccucuucgucagacaacggaacuugcuauccaggcgauuuuaucgacuacgaggagcucagggagcagcugagcaguguguccucuuucgaacgguuugagauuuucccgaagacaagcuccuggcccaaucacgauucaaacaagggugucaccgccgcuuguccucaugcaggggccaaaaguuuuuauaagaaucugaucuggcucgugaaaaagggaaacagcuacccaaaauuaucuaaguccuauauaaaugacaagggcaaagaaguacugguucuuuggggcauccaccaccccucaacgagcgcugaucaacagaguuuguaccagaacgccgacucuuacguguucgucggguccagccgcuauucgaagaaauuuaagccugagauugcgauccgaccaaaagugcgugaucaggagggaagaaugaauuacuauuggacucugguggaacccggugacaagauuaccuucgaggcaacaggcaaccuagucguuccuagguacgccuuugcuauggaacggaacgccgggucuggaaucauaauuuccgauacuccagugcaugacugcaauaccacaugucaaaccccgaaaggcgcaaucaacacgucacuccccuuccagaauauucacccuaucacuaucgguaagugcccaaaguauguaaaaaguacaaagcugcgccuugcuaccgggcugagaaacgugcccagcauucaguccaggggauuguuuggcgccauagcgggcuucaucgaagggggauggacugguauggucgacggcugguacggguaucaucaccagaaugaacaaggaucuggcuacgccgcagaucucaaaagcacacagaacgcuauugacgagaucaccaauaaggugaacucaguuauagagaaaaugaauacgcaguuuaccgccguggguaaggaguucaaccaccuggaaaagcggauugaaaauuuaaacaaaaaggucgaugacggguuccuggauaucuggacauacaaugcugagcuccuugugcuguuggaaaacgagcgcacucuagacuaucaugauaguaauguaaagaaccuguacgagaagguucgaucccagcucaaaaacaaugccaaggaaaucggcaacggauguuuugaguucuaucacaagugcgacaauaccuguauggaaagcgugaaaaacggcacauacgauuauccuaaguacucugaggaagcaaaacugaauagagaggagauugacggggucaaacuugaaucaacuaggaucuaucaaauucuggccauauacaguaccguggcuagcuccuugguccucgugguuucucugggagcgaucucguuuuggaugugcagcaacgguuccuuacagugccggauuuguaucuga

SEQ ID NO: 131798 - RNA, 1701 nt, Artificial Sequence; identical to SEQ ID NO: 130704
  derived and/or modified CDS sequence (opt3) from hemagglutinin__InfluenzaA__ACZ17448

SEQ ID NO: 131799 - RNA, 1701 nt, Artificial Sequence; identical to SEQ ID NO: 130717
  derived and/or modified CDS sequence (opt3) from hemagglutinin__InfluenzaA__ACZ17458

SEQ ID NO: 131800 - RNA, 1701 nt, Artificial Sequence; identical to SEQ ID NO: 130704
  derived and/or modified CDS sequence (opt3) from hemagglutinin__InfluenzaA__ACZ17478

SEQ ID NO: 131801 - RNA, 1701 nt, Artificial Sequence; identical to SEQ ID NO: 130717
  derived and/or modified CDS sequence (opt3) from hemagglutinin__InfluenzaA__ACZ17488

SEQ ID NO: 131802 - RNA, 1701 nt, Artificial Sequence
  derived and/or modified CDS sequence (opt3) from hemagglutinin__InfluenzaA__ACZ18240
augaaggccauccuggugguccuccuuuacaccuucgcuacagcaaacgccgacacucugugcauuggcuaucacgcgaauaacagcacggauaccguugacacaguguuggagaaaaauguaacugugacccauuccgucaacuuacuggaagauaagcacaaugggaaacuauguaagcucagaggaguggcuccccugcaucuugguaaaugcaacauagccggcuggauccuggggaauccugagugugaaucuuugucaacaaccaguagcugguccuacauuguugagacuucuucgucagacaacggaacaugcuauccaggcgauuuuaucgacuacgaggagcucagggagcagcugagcaguguguccucuuucgaacgguuugagauuuucccgaagaccagcuccuggcccaaucacgauccuaacaagggugucacggcagccuguccacaugcuggggcaaaaucauuuuauaagaaucugaucuggcucgugaaaaagggaaacaguuaccccaaauuaagcaagucuuauauaaaugacaagggcaaagaaguacugguucuuuggggcauccaccacccuuccacuucagccgaucaacagagcuuguaccagaacgcugacgccuacguguucgucgggaccagucgcuauucuaagaaauuuaagccagagauugcgauccgacccaaagugcgugaucaggagggaagaaugaauuacuauuggacacugguggaaccuggugacaagauuacuuucgaggcaaccggcaaccuagucguuccaagguacgccuuugcuauggaacggaacgccggguccggaaucauaauuagcgauacaccggugcaugacugcaauaccacgugucaaacucccaaaggcgcaaucaacacaucgcucccuuuccagaauauucacccaaucaccaucgguaagugccccaaguauguaaaaucuacuaagcugcgccuugcuacagggcugagaaacgugccuuccauucagucaaggggauuguuuggcgccauagcgggcuucaucgaagggggauggaccgguauggucgacggcugguacggguaucaucaccagaaugaacaaggaaguggcuacgccgcagaucucaaaagcacgcagaacgcuauugacgagaucaccaauaaggugaacuccguuauagagaaaaugaauacacaguuuacugccguggguaaggaguucaaccaccuggaaaagcggauugaaaauuuaaacaaaaaggucgaugacggguuccuggauaucuggaccuacaaugcugagcuccuugugcuguuggaaaacgagcgcacacuagacuaucaugauucuaauguaaagaaccuguacgagaagguucgaagccagcucaaaaacaaugccaaggaaaucggcaacggauguuuugaguucuaucacaagugcgacaauacuuguauggaaucagugaaaaacggcaccuacgauuauccaaaguacagugaggaagcaaaacugaauagagaggagauugacggggucaaacuugaauccacaaggaucuaucaaauucuggccauauacagcaccguggcuucuucauugguccucgugguuagucugggagcgaucagcuuuuggaugugcuccaacgguucuuuacagugccggauuuguaucuga

SEQ ID NO: 131803 - RNA, 1701 nt, Artificial Sequence; identical to SEQ ID NO: 130717
  derived and/or modified CDS sequence (opt3) from hemagglutinin__InfluenzaA__ACZ18241

SEQ ID NO: 131804 - RNA, 1701 nt, Artificial Sequence
  derived and/or modified CDS sequence (opt3) from hemagglutinin__InfluenzaA__ACZ27800
augaaggccauccuggugguccuccuuuacaccuucgcuacagcaaacgccgacacucugugcauuggcuaucacgcgaauaacagcacggauaccguugacacaguguuggagaaaaauguaacugugacccauuccgucaacuuacuggaagauaagcacaaugggaaacuauguaagcucagaggaguggcuccccugcaucuugguaaaugcaacauagccggcuggauccuggggaauccugagugugaaucuuugucaacagcaaguagcugguccuacauuguugagaccucuucgucagacaacggaacuugcuauccaggcgauuuuaucgacuacgaagaacucagggagcagcugagcaguguguccucuuucgaacgguuugagauuuucccgaagacaagcuccuggcccaaucacgauucaaacaagggugucaccgccgcuuguccucaugcaggggccaaaaguuuuuauaagaaucugaucuggcucgugaaaaagggaaacagcuacccaaaauuaucuaaguccuauauaaaugacaagggcaaagaaguacugguucuuuggggcauccaccaccccucaacgagcgcugaucaacagaguuuguaccagaacgccgacgcguacguguucgucgggucuucccgcuauagcaaggaguuuaaaccugagauugcaauccgaccaaaggugcguggacaggaagguagaaugaauuacuauuggacucugguggagcccggcgauaaaauuaccuucgaagccacagggaaccuagucguuccuagguacgcuuuugccauggagcggaacgcaggaucgggcaucauaauuucugacacuccagugcaugauugcaauaccacaugucaaaccccgaagggugcuaucaacacgucccuccccuuccagaauauucacccuaucacuaucgggaaaugcccaaaguauguaaagucaacaaaacugcgccuugccaccggacugagaaacgugcccaguauucagagcaggggcuuguuuggcgcgauagccggguucaucgaaggagguuggacuggcauggucgacgggugguacggauaucaucaccagaaugagcaaggcuccgguuacgcagcugaccucaagucuacacagaacgccauugaugagaucaccaauaaagugaacagcguuauagaaaagaugaauacgcaguuuaccgcuguggggaaagaguucaaccaccuggaaaagcggauugagaauuuaaacaagaaagucgacgauggcuuccuggacaucuggacauacaaugccgaacuccuugugcuguuggagaacgagcgcacucuagauuaucaugacucaaauguaaagaaccuguacgaaaaaguucgaagucagcucaagaacaaugcaaaagagaucggaaacggcuguuuugaguucuaucacaagugcgauaauaccuguauggaguccgugaagaacgggacauacgacuauccuaaauacagcgaagaggccaagcugaauagagaggaaauugauggagucaaacuugagucuacuaggaucuaucaaauucuggcuauauacucaaccguggcgaguagcuugguccucgugguuucccugggugcaaucucuuuuuggaugugcucgaacggcagcuuacagugccggauuuguaucuga

SEQ ID NO: 131805 - RNA, 1701 nt, Artificial Sequence; identical to SEQ ID NO: 130717
  derived and/or modified CDS sequence (opt3) from hemagglutinin__InfluenzaA__ACZ27810

SEQ ID NO: 131806 - RNA, 1701 nt, Artificial Sequence; identical to SEQ ID NO: 130717
  derived and/or modified CDS sequence (opt3) from hemagglutinin__InfluenzaA__ACZ27820

SEQ ID NO: 131807 - RNA, 1701 nt, Artificial Sequence; identical to SEQ ID NO: 130717
  derived and/or modified CDS sequence (opt3) from hemagglutinin__InfluenzaA__ACZ27830

SEQ ID NO: 131808 - RNA, 1701 nt, Artificial Sequence; identical to SEQ ID NO: 131070
  derived and/or modified CDS sequence (opt3) from hemagglutinin__InfluenzaA__ACZ27840

SEQ ID NO: 131809 - RNA, 1701 nt, Artificial Sequence; identical to SEQ ID NO: 130704
  derived and/or modified CDS sequence (opt3) from hemagglutinin__InfluenzaA__ACZ45006

SEQ ID NO: 131810 - RNA, 1701 nt, Artificial Sequence
  derived and/or modified CDS sequence (opt3) from hemagglutinin__InfluenzaA__ACZ45007
augaaggccauccuggugguccuccuuuacaccuucgcuacagcaaacgccgacacucugugcauuggcuaucacgcgaauaacagcacggauaccguugacacaguguuggagaaaaauguaacugugacccauuccgucaacuuacuggaagauaagcacaaugggaaacuauguaagcucagaggaguggcuccccugcaucuugguaaaugcaacauagccggcuggauccuggggaauccugagugugaaucuuugucaacagcaaguagcugguccuacauuguugagaccucuucgucagacaacggaacuugcuauccaggcgauuuuaucgacuacgaggagcucagggagcagcugagcaguguguccucuuucgaacgguuugagauuuucccgaagacaagcuccuggcccaaucacgauucaaacaagggugucaccgccgcuuguccucaugcaggggccaaaaguuuuuauaagaaucugaucuggcucgugaaaaagggaaacagcuacccaaaauuaucuaaguccuauauaaaugacaagggcaaagaaguacugguucuuuggggcauccaccaccccucaacgagcgcugaucaacagaguuuguaccagaacgccgacgcguacguguucgucgggacuucucgcuauuccaagaaauuuaagccugagauugcaauccgaccaaaagugcgugaucaggagggaagaaugaauuacuauuggacccugguggaacccggugacaagauuacauucgaggccacuggcaaccuagucguuccuagguacgcuuuugccauggaacggaacgcagggagcggaaucauaauuucggauaccccagugcaugacugcaauacaaccugucaaacgccgaaaggcgcuaucaacacuucucuccccuuccagaauauucacccuaucacaaucgguaagugcccaaaguauguaaaauccaccaagcugcgccuugccacugggcugagaaacgugcccucaauucagaguaggggauuguuuggcgcgauagccggcuucaucgaagggggauggacagguauggucgacggcugguacggguaucaucaccagaaugaacaaggaagcggcgaugcagcugaccucaaauccacccagaacgccauugaugagaucacgaauaaggugaacucuguuauagagaaaaugaauacccaguuuacagcuguggguaaggaguucaaccaccuggaaaagcggauugaaaauuuaaacaaaaaggucgacgauggguuccuggacaucuggacuuacaaugccgagcuccuugugcuguuggaaaacgagcgcacccuagauuaccaugacagcaauguaaagaaccuguaugagaagguucgaucacagcucaaaaacaaugcaaaggaaaucggcaacggauguuuugaguucuaccacaagugcgauaauacauguauggaaagugugaaaaacggcacuuaugacuacccuaaguauuccgaggaagccaaacugaauagagaggagauugauggggucaaacuugaaagcaccaggaucuaccaaauucuggcuauauauucuacaguggcgucaaguuugguccucgugguuagccugggagcaaucuccuuuuggaugugcucuaacgguucguuacagugccggauuuguaucuga

SEQ ID NO: 131811 - RNA, 1701 nt, Artificial Sequence; identical to SEQ ID NO: 131070
  derived and/or modified CDS sequence (opt3) from hemagglutinin__InfluenzaA__ACZ45008

SEQ ID NO: 131812 - RNA, 1701 nt, Artificial Sequence; identical to SEQ ID NO: 131070
  derived and/or modified CDS sequence (opt3) from hemagglutinin__InfluenzaA__ACZ45009

SEQ ID NO: 131813 - RNA, 1701 nt, Artificial Sequence; identical to SEQ ID NO: 130959
  derived and/or modified CDS sequence (opt3) from hemagglutinin__InfluenzaA__ACZ45010

SEQ ID NO: 131814 - RNA, 1701 nt, Artificial Sequence; identical to SEQ ID NO: 130717
  derived and/or modified CDS sequence (opt3) from hemagglutinin__InfluenzaA__ACZ45012

SEQ ID NO: 131815 - RNA, 1701 nt, Artificial Sequence
  derived and/or modified CDS sequence (opt3) from hemagglutinin__InfluenzaA__ACZ45013
augaaggccauccuggugguccuccuuuacaccuucgcuacagcaaacgccgacacucugugcauuggcuaucacgcgaauaacagcacggauaccguugacacaguguuggagaaaaauguaacugugacccauuccgucaacuuacuggaagauaagcacaaugggaaacuauguaagcucagaggaguggcuccccugcaucuugguaaaugcaacauagccggcuggauccuggggaauccugagugugaaucuuugucaacagcaaguagcugguccuacauuguugagaccucuucgucagacaacggaacuugcuauccaggcgauuuuaucgacuacgaagaacucagggagcagcugagcaguguguccucuuucgaacgguuugagauuuucccgaagacaagcuccuggcccaaucacgauucaaguaagggugucaccgccgcuuguccucaugcaggggccaagagcuuuuauaagaaccugaucuggcucgugaaaaagggaaauucuuacccaaaauuauccaagucauauauaaacgacaagggcaaagaaguacugguucuuuggggcauccaccaccccagcacgagugcugaucaacagucuuuguaccagaaugccgacgcguacguguucgucgggacuucccgcuauagcaagaaauuuaagccugagauugcaauccgaccaaaagugcgugagcaggaaggaagaaugaacuacuauuggacccugguggagcccggugauaagauuacauucgaagccacuggcaaucuagucguuccuagguacgcuuuugccauggagcggaacgcagggucgggaaucauaauuucugacaccccagugcaugauugcaacacaaccugucaaacgccgaaaggcgcuaucaauacuucccuccccuuccagaacauucacccuaucacaaucgguaagugcccaaaguauguaaaaucaaccaagcugcgccuugccacugggcugagaaaugugcccaguauucagagcaggggauuguuuggcgcgauagccggcuucaucgaagggggauggacagguauggucgacggcugguacggguaucaucaccagaacgagcaaggauccggcuacgcagcugaccucaaaucuacccagaaugccauugaugagaucacgaacaaggugaauagcguuauagagaaaaugaacacccaguuuacagcuguggguaaggaguucaaucaccuggaaaagcggauugagaacuuaaauaaaaaggucgacgauggguuccuggacaucuggacuuacaacgccgaacuccuugugcuguuggagaaugagcgcacccuagauuaucaugacucaaacguuaaaaaucuguacgaaaagguacgaagucagcucaaaaacaacgcaaaggagaucggcaauggauguuuugaguucuaucacaagugcgauaacacauguauggaauccgugaaaaauggcacuuacgacuauccuaaguacagcgaagaggccaaacugaacagagaggaaauugauggggucaaacuugagucuaccaggaucuaucaaauucuggcuauauacucaacaguggcgaguagcuugguccucgugguuucccugggagcaaucucuuuuuggaugugcucgaaugguagcuuacagugccggauuuguaucuga

SEQ ID NO: 131816 - RNA, 1701 nt, Artificial Sequence; identical to SEQ ID NO: 130717
  derived and/or modified CDS sequence (opt3) from hemagglutinin__InfluenzaA__ACZ45014

SEQ ID NO: 131817 - RNA, 1701 nt, Artificial Sequence; identical to SEQ ID NO: 130717
  derived and/or modified CDS sequence (opt3) from hemagglutinin__InfluenzaA__ACZ45016

SEQ ID NO: 131818 - RNA, 1701 nt, Artificial Sequence
  derived and/or modified CDS sequence (opt3) from hemagglutinin__InfluenzaA__ACZ45028
augaaggccauccuggugguccuccuuuacaccuucgcuacagcaaacgccgacacucugugcauuggcuaucacgcgaauaacagcacggauaccguugacacaguguuggagaagaauguaacugugacccauuccgucaacuuacuggaagauaagcacaaugggaaacuauguaagcucagaggaguggcuccccugcaucuugguaaaugcaacauagccggcuggauccuggggaauccugagugugaaucuuugucaacagcaaguagcugguccuacauuguugagaccucuucgucagacaacggaacuugcuauccaggcgauuuuaucgacuacgaggagcucagggagcagcugagcaguguguccucuuucgaacgguuugagauuuucccgaagacaagcuccuggcccaaucacgauucaaacaagggugucaccgccgcuuguccucaugcaggggccaaaaguuuuuauaagaaucugaucuggcucgugaaaaagggaaacagcuacccaaaauuaucuaaguccuauauaaaugacaagggcaaagaaguacugguucuuuggggcauccaccaccccucaacgagcgcugaucaacagaguuuguaccagaacgccgacgcguacguguucgucgggacuucucgcuauuccaagaaauuuaagccugagauugcaauccgaccaaaagugcgugaucaggagggaagaaugaauuacuauuggacccugguggaacccggugacaagauuacauucgaggccacuggcaaccuagucguuccuagguacgcuuuugccauggaacggaacgcagggagcggaaucauaauuucggauaccccagugcaugacugcaauacaaccugucaaacgccgaaaggcgcuaucaacacuucucuccccuuccagaauauucacccuaucacaaucgguaagugcccaaaguauguaaaauccaccaagcugcgccuugccacugggcugagaaacauucccucaauacagaguaggggauuguuuggcgcgaucgccggcuucauugaagggggauggacagguaugguggacggcugguacggguaucaucaccagaaugaacaaggaagcggcuacgcagcugaucucaaauccacccagaacgccaucgacgagauaacgaauaaggucaacucugugauugagaaaaugaauacccaguuuacagcuguugguaaggaguucaaccaccuggaaaagcggaucgaaaauuuaaacaaaaagguggaugacggguuccuggauaucuggacuuacaaugccgagcuccuuguccuguuggaaaacgagcgcacccuagacuaucaugauagcaaugugaaaaaccuguacgagaagguacgaucacagcucaaaaacaaugcaaaggaaauuggcaacggauguuuugaguucuaucacaagugcgacaauacauguauggaaaguguuaaaaacggcacuuacgauuauccuaaguacuccgaggaagccaaacugaauagagaggagaucgacggggugaaacuugaaagcaccaggauuuaucaaauacuggcuaucuacucuacagucgcgucaaguuuggugcucgucgugagccugggagcaauuuccuuuuggaugugcucuaacgguucguuacagugccggaucuguaucuga

SEQ ID NO: 131819 - RNA, 1701 nt, Artificial Sequence
  derived and/or modified CDS sequence (opt3) from hemagglutinin__InfluenzaA__ACZ45029
augaaggccauccuggugguccuccuuuacaccuucgcuacagcaaacgccgacacucugugcauuggcuaucacgcgaauaacagcacggauaccguugacacaguguuggagaaaaauguaacugugacccauuccgucaacuuacuggaagauaagcacaaugggaaacuauguaagcucagaggaguggcuccccugcaucuugguaaaugcaacauagccggcuggauccuggggaauccugagugugaaucuuugucaacagcaaguagcugguccuacauuguugagaccucuucgucaggaaacggcacuugcuauccaggugacuuuaucgauuacgaagaacucagggagcagcugagcaguguguccucuuucgaacgguuugagauuuucccgaagacaagcuccuggcccaaucacgacucaaacaagggggucaccgccgcuuguccucaugcaggagccaaaaguuuuuauaagaaucugaucuggcucgugaaaaagggcaacagcuacccaaaauuaucuaaguccuauauaaaugauaagggcaaagaaguacugguucuuugggggauccaccaccccucaacgagcgcugaccaacagaguuuguaccagaacgccgaugcguacguguucgucggaacuucucgcuauuccaagaaauuuaagccugagauugcaauccgaccaaaagugcgugaccaggaggguagaaugaauuacuauuggacccugguggaacccggcgauaagauuacauucgaggccacugggaaccuagucguuccuagguacgcuuuugccauggaacggaacgcaggaagcggcaucauaauuucggacaccccagugcaugauugcaauacaaccugucaaacgccgaaaggugcuaucaacacuucucuccccuuccagaauauucacccuaucacaaucgggaagugcccaaaguauguaaaauccaccaagcugcgccuugccacuggacugagaaacgugcccucaauucagaguaggggcuuguuuggcgcgauagccggguucaucgagggagguuggacaggcauggucgacgggugguacggauaucaucaccagaaugaacaaggcagcgguuacgcagcugaccucaaauccacccagaacgccauugaugagaucacgaauaaggugaacucuguuauagagaaaaugaauacccaguuuacagcuguggggaaggaguucaaccaccuggagaagcggauugaaaauuuaaacaaaaaggucgacgauggcuuccuggacaucuggacuuacaaugccgagcuccuugugcuguuggaaaacgagcgcacccuagauuaucaugacagcaauguaaagaaccuguacgagaagguucgaucacagcucaaaaacaaugcaaaggaaaucggaaacggcuguuuugaguucuaucacaagugcgauaauacauguauggaaagugugaaaaacgggacuuacgacuauccuaaguacuccgaggaagccaaacugaauagagaggagauugauggagucaaacuugaaagcaccaggaucuaucaaauucuggcuauauacucuacaguggcgucaaguuugguccucgugguuagccugggugcaaucuccuuuuggaugugcucuaacggcucguuacagugccggauuuguaucuga

SEQ ID NO: 131820 - RNA, 1701 nt, Artificial Sequence
  derived and/or modified CDS sequence (opt3) from hemagglutinin__InfluenzaA__ACZ45030
augaaggccauccuggugguccuccuuuacaccuucgcuacagcaaacgccgacacucugugcauuggcuaucacgcgaauaacagcacggauaccguugacacaguguuggagaagaauguaacugugacccauuccgucaacuuacuggaagauaagcacaaugggaaacuauguaagcucagaggaguggcuccccugcaucuugguaaaugcaacauagccggcuggauccuggggaauccugagugugaaucuuugucaacagcaaguagcugguccuacauuguugagaccucuucgucagacaacggaacuugcuauccaggcgauuuuaucgacuacgaggagcucagggagcagcugagcaguguguccucuuucgaacgguuugagauuuucccgaagacaagcuccuggcccaaucacgauucaaacaagggugucaccgccgcuuguccucaugcaggggccaaaaguuuuuauaagaaucugaucuggcucgugaaaaagggaaacagcuacccaaaauuaucuaaguccuauauaaaugacaagggcaaagaaguacugguucuuuggggcauccaccaccccucaacgagcgcugaucaacagaguuuguaccagaacgccgacgcguacguguucgucgggacuucuaccuauuccaagaaauuuaagccugagauugcaauccgcccaaaagugcgagaucaggagggacguaugaauuacuauuggacacugguggaacccggugacaagauuacuuucgaggccaccggcaaccuagucguuccuagauacgcuuuuacaauggaaaggaacgccgggagcggaaucauaauuucggauaccccagugcaugacugcaauacgacuugucaaacaccgaaaggcgcaaucaacaccucucuccccuuccagaauauucacccuaucacuaucgguaagugcccaaaguauguaaaauccacaaagcugcggcuugcuaccgggcugcgcaacauucccucaauacagaguagaggauuguuuggcgccaucgcgggcuucauugaagggggauggacggguaugguggacggcugguacggguaucaucaccagaaugaacaaggaagcggcuacgccgcagaucucaaauccacccagaacgcuaucgacgagauaacaaauaaggucaacucugugauugagaaaaugaauacucaguuuaccgccguugguaaggaguucaaccaccuggaaaagaggaucgaaaauuuaaacaaaaagguggaugacggguuccuggauaucuggacauacaaugcugagcuccuuguccuguuggaaaacgagcggacucuagacuaucaugauagcaaugugaaaaaccuguacgagaagguacgcucacagcucaaaaacaaugccaaggaaauuggcaacggauguuuugaguucuaucacaagugcgacaauaccuguauggaaaguguuaaaaacggcacauacgauuauccuaaguacuccgaggaagcaaaacugaaucgagaggagaucgacggggugaaacuugaaagcaccagaauuuaucaaauacuggccaucuacucuacugucgcuucaaguuuggugcucgucgugagccugggagcgauuuccuuuuggaugugcucuaacgguucguuacagugcaggaucuguaucuga

SEQ ID NO: 131821 - RNA, 1701 nt, Artificial Sequence
  derived and/or modified CDS sequence (opt3) from hemagglutinin__InfluenzaA__ACZ45031
augaaggccauccuggugguccuccuuuacaccuucgcuacagcaaacgccgacacucugugcauuggcuaucacgcgaauaacagcacggauaccguugacacaguguuggagaaaaauguaacugugacccauuccgucaacuuacuggaagauaagcacaaugggaaacuauguaagcucagaggaguggcuccccugcaucuugguaaaugcaacauagccggcuggauccuggggaauccugagugugaaucuuugucaacagcaaguagcugguccuacauuguugagaccucuucgucagacaacggaacuugcuauccaggcgauuuuaucgacuacgaagaacucagggagcagcugagcaguguguccucuuucgaacgguuugagauuuucccgaagacaagcuccuggcccaaucacgauucaaacaagggugucaccgccgcuuguccucaugcaggggccaaaaguuuuuauaagaaucugaucuggcucgugaaaaagggaaacagcuacccaaaauuaucuaaguccuauauaaaugacaagggcaaagaaguacugguucuuuggggcauccaccaccccucaacgagcgcugaucaacagaguuuguaccagaacgccgacgcguacguguucgucgggacuucucgcuauuccaagaaauuuaagccugagauugcaauccgaccaaaagugcgugagcaggaaggaagaaugaauuacuauuggacccugguggagcccggugauaagauuacauucgaagccacuggcaaccuagucguuccuagguacgcuuuuaccauggagcggaacguggggagcggaaucauaauuucggacacaccaguacaugauugcaauaccacgugucaaacuccgaaaggcgccaucaacacaucucuccccuuccagaauauucacccuaucaccaucgguaagugcccaaaguaugugaaauccacuaagcugcgccuugcaacagggcugagaaacguccccucaauucagaguaggggauuguuuggcgcuauagccggcuucaucgaagggggauggaccgguaugguggacggcugguacggguaucaucaccagaaugagcaaggaagcggcuacgcggccgaccucaaauccacgcagaacgcaauugaugagaucaccaauaagguuaacucugugauagaaaagaugaauacacaguuuacugcugucgguaaggaguucaaccaccuggaaaagcggauugagaauuuaaacaaaaagguggacgauggguuccuggacaucuggaccuacaaugccgaacuccuuguacuguuggagaacgagcgcacacuagauuaucaugacagcaauguuaaaaaccuguacgaaaaggugcgaucacagcucaaaaacaaugcuaaggagaucggcaacggauguuuugaguucuaucacaagugcgauaauacuuguauggagagugucaaaaacggcaccuacgacuauccuaaguacuccgaagaggccaaacugaauagagaggaaauugauggggugaaacuugagagcacaaggaucuaucaaauucuggcaauauacucuaccgucgccucaaguuuggugcucguugugagccugggagcuaucuccuuuuggaugugcucuaacgguucguuacagugccggauuuguaucuga

SEQ ID NO: 131822 - RNA, 1701 nt, Artificial Sequence
  derived and/or modified CDS sequence (opt3) from hemagglutinin__InfluenzaA__ACZ45034
augaaggccauccuggugguccuccuuuacaccuucgcuacagcaaacgccgacacucugugcauuggcuaucacgcgaauaacagcacggauaccguugacacaguguuggagaagaauguaacugugacccauuccgucaacuuacuggaagauaagcacaaugggaaacuauguaagcucagaggaguggcuccccugcaucuugguaaaugcaacauagccggcuggauccuggggaauccugagugugaaucuuugucaacagcaaguagcugguccuacauuguugagaccucuucgucagacaacggaacuugcuauccaggcgauuuuaucgacuacgaggagcucagggagcagcugagcaguguguccucuuucgaacgguuugagauuuucccgaagacaagcuccuggcccaaucacgauucaaacaagggugucaccgccgcuuguccucaugcaggggccaaaaguuuuuauaagaaucugaucuggcucgugaaaaagggaaacagcuacccaaaauuaucuaaguccuauauaaaugacaagggcaaagaaguacugguucuuuggggcauccaccaccccucaacgagcgcugaucaacagaguuuguaccagaacgccgacgcguacguguucgucgggacuucucgcuauuccaagaaauuuaagccugagauugcaauccgaccaaaagugcgugaucaggagggaagaaugaauuacuauuggacccugguggaacccggugacaagauuacauucgaggccacuggcaaccuagucguuccuagguacgcuuuugccauggaacggaacgcagggagcggaaucauaauuucggauaccccagugcaugacugcaauacaaccugucaaacgccgaaaggcgcuaucaacacuucucuccccuuccagaauguacacccuauuacaaucgguaagugcccaaaguaugugaaauccaccaagcugcgccuugccacugggcugagaaacgugcccccuauccagucaaggggauuguuuggcgcgauugccggcuucauagaagggggauggacagguauggucgacggcugguacggguaucaucaccagaaugaacaaggaaguggcuacgcagcugaucucaaaagcacccagaacgccaucgacgagauuacgaauaagguuaacuccgugaucgagaaaaugaauacccaguuuacagcugucgguaaggaguucaaccaccuggaaaagcggauagaaaauuuaaacaaaaagguggaugacggguuccuggauauuuggacuuacaaugccgagcuccuuguacuguuggaaaacgagcgcacccuagacuaucaugauucuaauguuaaaaaccuguacgagaaggugcgaagccagcucaaaaacaaugcaaaggaaaucggcaacggauguuuugaguucuaucacaagugcgacaauacauguauggaaucagucaaaaacggcacuuacgauuauccaaaguacagugaggaagccaaacugaauagagaggagaucgacggggugaaacuugaauccaccaggauuuaucaaauccuggcuauuuacagcacagucgcgucuucauuggugcucguugugagucugggagcaaucagcuuuuggaugugcuccaacgguucuuuacagugccggauauguauuuga

SEQ ID NO: 131823 - RNA, 1701 nt, Artificial Sequence; identical to SEQ ID NO: 130717
  derived and/or modified CDS sequence (opt3) from hemagglutinin__InfluenzaA__ACZ45036

SEQ ID NO: 131824 - RNA, 1701 nt, Artificial Sequence; identical to SEQ ID NO: 130717
  derived and/or modified CDS sequence (opt3) from hemagglutinin__InfluenzaA__ACZ45037

SEQ ID NO: 131825 - RNA, 1701 nt, Artificial Sequence; identical to SEQ ID NO: 131818
  derived and/or modified CDS sequence (opt3) from hemagglutinin__InfluenzaA__ACZ45038

SEQ ID NO: 131826 - RNA, 1701 nt, Artificial Sequence; identical to SEQ ID NO: 131070
  derived and/or modified CDS sequence (opt3) from hemagglutinin__InfluenzaA__ACZ45039

SEQ ID NO: 131827 - RNA, 1701 nt, Artificial Sequence; identical to SEQ ID NO: 130717
  derived and/or modified CDS sequence (opt3) from hemagglutinin__InfluenzaA__ACZ45040

SEQ ID NO: 131828 - RNA, 1701 nt, Artificial Sequence; identical to SEQ ID NO: 130717
  derived and/or modified CDS sequence (opt3) from hemagglutinin__InfluenzaA__ACZ52567

SEQ ID NO: 131829 - RNA, 1701 nt, Artificial Sequence; identical to SEQ ID NO: 130717
  derived and/or modified CDS sequence (opt3) from hemagglutinin__InfluenzaA__ACZ52568

SEQ ID NO: 131830 - RNA, 1701 nt, Artificial Sequence; identical to SEQ ID NO: 131286
  derived and/or modified CDS sequence (opt3) from hemagglutinin__InfluenzaA__ACZ52569

SEQ ID NO: 131831 - RNA, 1701 nt, Artificial Sequence
  derived and/or modified CDS sequence (opt3) from hemagglutinin__InfluenzaA__ACZ53956
augaagaccaucauugcccugagcuacauauucugccucgcucuugcacagaaacugcccggcaacgacaauuccacagccacuuuguguuuagggcaccaugcggugccuaacggaacgcuggucaagaccaucacaaaugaucaaauugagguuacuaacgcuaccgaacuugugcagucuucaaguacagguagaaucugcgacagcccacaccagauucucgauggcgagaauuguacccugaucgacgcccuucugggggauccgcauugcgacggauuucagaacaaagaaugggauuuguucguagagagguccaaggcauauucuaauuguuaccccuaugacgugccugauuacgccucgcuccggucacuggucgcuagcaguggcacucuggaauuuaacaaugaguccuucaacuggacagguguggcacaaaaugggaccucuagcgccugcaaacgccgauccauaaagucauuuuucaguacgcucaacugguuacaccagcugcagaaucguuauccagcucuuaacguuacuaugcccaauaacgacaaguuugauaaauuguacaucuggggagugcaucacccuagcaccgacucugaucagauuuccgucuaugcccaagcgucaggcagagugacaguaagcacuaagaggagucagcagaccguuaucccaaacauuggcucucggcccugggugcgcggggucuccagcagaaucucgauauacuggacaauugugaaaccuggagacauccugcuaauuaauucuaccgguaaccucaucgcaccaaggggcuacuucaagauccgguccgggaaaucaaguauuaugcgcagcgacgccccgauaggaaaguguaauuccgagugcaucacgcccaacggcucuauuccuaaugauaagccauuucagaacgugaaucgaaucacuuauggugcuugucccagauacgucaaacaaaacacacugaagcuagccaccgggaugaggaauguuccugaaaaacagacucggggaauauucggcgcaauugcuggcuuuaucgagaacgggugggaaggaaugauggacgguugguauggcuuccgucaccagaauagcgaggggacaggacaagccgcggaucugaagucaacccaggccgcaaucaaccagauuaauggcaaauugaaccgccucaucgagaagacgaaugaaaaauuucaucagauugagaaggaguucagugaaguggaagguagaauacaagaccuggagaaguacguagaggauaccaaaaucgacuuaugguccuauaacgcugaacugcucguggcccuugagaaccagcacacaauugaucugacugacagcgaaaugaauaaguuguucgagaggacccggaaacagcuacgagaaaacgcugaggauauggggaauggcugcuuuaagaucuaccauaaaugugacaacgccugcaucggaucuauucgcaauggcacauaugaucacgacgucuacagagacgaggcacugaacaauagguuccagauaaaggggguggaacucaagucaggauacaaagauuggauccuguggauuaguuuugccaucagcugcuuccuucuguguguuguguugcucgguuuuauuaugugggcuugccaacggggcaacauccgcuguaauauaugcaucuga

SEQ ID NO: 131832 - RNA, 1701 nt, Artificial Sequence
  derived and/or modified CDS sequence (opt3) from hemagglutinin__InfluenzaA__ACZ53967
augaagaccaucauugcccugagcuacauauucugccucgcucuugcacagaaacugcccggcaacgacaauuccacagccacuuuguguuuagggcaccaugcggugccuaacggaacgcuggucaagaccaucacaaaugaucaaauugagguuacuaacgcuaccgaacuugugcagucuucaaguacagguagaaucugcgacagcccacaccagauucucgauggcgagaauuguacccugaucgacgcccuucugggggauccgcauugcgacggauuucagaacaaagaaugggauuuguucguagagagguccaaggcauauucuaauuguuaccccuaugacgugccugauuacgccucgcuccggucacuggucgcuagcaguggcacucuggaauuuaacaaugaguccuucaacuggacagguguggcacaaaaugggaccucuagcgccugcaaacgccgauccauaaagucauuuuucaguacgcucaacugguuacaccagcugcagaaucguuauccagcucuuaacguuacuaugcccaauaacgacaaguuugauaaauuguacaucuggggagugcaucacccuagcaccgacucugaucagacaucccuguaugcccaagcgucaggcagagucacugugagcaccaagaggagucagcagacaguaauuccaaacaucggcucucggcccuggguucgcgggguguccagcagaauuucgaucuacuggaccauagucaaaccuggagacgugcuagugauuaauucuaacgguaaucucaucgcaccaaggggcuacuucaagaugcgguccgggaaaucaaguauuaugcgcagcgacgccccgaucggaaaguguaacuccgagugcaucacgcccaauggcucuauuccuaacgauaagccauuucagaaugucaaccgaauaacuuauggugcuugucccagauacguuaaacaaaauacacugaagcuagccaccgggaugaggaacgugccugaaaaacagacucggggaaucuucggcgcaauugcuggcuuuaucgagaaugggugggaaggaaugauggacgguugguauggcuuccgucaccagaacagcgaggggacaggacaagccgcggaucugaagucaacccaggccgcaauaaaucagauuaacggcaaauugaauaagcucaucgagaaaacgaacgaaaaguuucaucagaucgagaaggaguucagugaaguagaaggucgcauucaagaccuggagaaauacguggaggauaccaagaucgacuuaugguccuauaacgcugaacugcucgucgcccuugagaaucagcacacaauugaucugacugacagcgaaaugaacaaauuguucgagagaaccaggaagcagcuacgggaaaaugcugaggauauggggaacggcugcuuuaaaauauaccauaagugugacaaugccugcaucggaucuauucgaaacggcacauaugaucacgacguguaccgcgacgaggcacugaauaacagauuccagaucaaggggguugaacucaaaucaggauacaaggauuggauccuguggauuaguuuugccauaagcugcuuccuucuguguguggucuugcucgguuccaucaugugggcuugccaaaggggcaauauucgguguaacaucugcauuuga

SEQ ID NO: 131833 - RNA, 1701 nt, Artificial Sequence
  derived and/or modified CDS sequence (opt3) from hemagglutinin__InfluenzaA__ACZ53978
augaagaccaucauugcccugagcuacauauucugccucgcucuugcacagaaacugcccggcaacgacaauuccacagccacuuuguguuuagggcaccaugcggugccuaacggaacgcuggucaagaccaucacaaaugaucaaauugagguuacuaacgcuaccgaacuugugcagucuucaaguacagguagaaucugcgacagcccacaccagauucucgauggcgagaauuguacccugaucgacgcccuucugggggauccgcauugcgacggauuucagaacaaagaaugggauuuguucguagagagguccaaggcauauucuaauuguuaccccuaugacgugccugauuacgccucgcucaaaucacugauagcuagcaguggcacucuggaauuuaacaaugaguccuucaacuggaucggugucucucaaaaugggacaagcuccgcaugcaagcggauuucaaucaccgugaguuuuaacaagcucaauugguuacaccagcugaaauaucgcuacccagcccuuaacguuacgaugcccaauaacgacaaguucgauaaauuguauauuuggggagugcaucacccuagcacugacucugaucagaccucccuguacgcucaggccucaggccgagucacagugagcacuaagcguagucaacagaccguaaucccaaacauaggcucuagacccuggguuaggggaguguccagccggauuucgaucuacuggacaauugucaaaccuggggacgugcuagugaucaauucuaacgguaaucucaucgcgccacgcggcuauuuuaagaugagauccgggaagucaaguauuaugaggagcgacgcaccgauaggaaaauguaacuccgagugcaucacccccaauggcucuauuccuaacgauaagccauuccagaaugucaaccggaucacguacggugccuguccccgcuauguuaaacagaauacucugaagcuagcuacagggaugcgaaacgugccugaaaaacaaaccagaggaauauuuggcgccauugcaggcuucaucgagaaugggugggaaggaaugguagacgguugguacggcuuuaggcaccagaacagcgaggggacuggacaggcugccgaucugaagucaacacaagcggccaucaaucagauuaccggcaaauugaacaagcucaucgagaagacgaaugaaaaauuccaucagauugagaaggaauuuagugagguggaaggucggauacaggaccuggagaaauaugucgaggauaccaagaucgacuuaugguccuacaacgcagaacugcucguggcucuugagaaccaacacacaauugaucugacugacagcgaaaugaauaaauuguucgagcguacccgcaagcagcuaagagaaaacgccgaggauauggggaauggcugcuucaagaucuaucauaaaugugacaacgcuugcaucggaucuauuaggaauggcacauacgaucacgacguuuaccgggacgaggcccugaacaaucgauuucagauaaaggggguggaacucaaaucaggauauaaggauuggauccuguggauuaguuucgcaaucagcugcuuucuucugugugucguguugcucgguuucauuaugugggccugccagcgcggcaacaucagauguaauauaugcaucuga

SEQ ID NO: 131834 - RNA, 1701 nt, Artificial Sequence
  derived and/or modified CDS sequence (opt3) from hemagglutinin__InfluenzaA__ACZ56080
augaaggccauccuggugguccuccuuuacaccuucgcuacagcaaacgccgacacucugugcauuggcuaucacgcgaauaacagcacggauaccguugacacaguguuggagaaaaauguaacugugacccauuccgucaacuuacuggaagauaagcacaaugggaaacuauguaagcucagaggaguggcuccccugcaucuugguaaaugcaacauagccggcuggauccuggggaauccugagugugaaucuuugucaacagcaaguagcugguccuacauuguugagaccucuucgucagacaacggaacuugcuauccaggcgauuuuaucgacuacgaagaacucagggagcagcugagcaguguguccucuuucgaacgguuugagauuuucccgaagacaagcuccuggcccaaucacgauucaaacaagggugucaccgccgcuuguagucaugcaggggccaagagcuuuuauaagaaucugaucuggcucgugaaaaagggaaacucuuacccuaaauuauccaagucauauauaaaugacaagggcaaagaaguacugguucuuuggggcauccaccacccaagcacgagugcugaucaacagucuuuguaccagaacgccgacgcguacguguucgucgggacuucccgcuauagcaagaaauuuaagcccgagauugcaauccgaccuaaagugcguggacaggaggguagaaugaauuacuauuggacccugguggaaccaggcgauaagauuacauucgaggccacugggaaccuagucguucccagguacgcuuuugccauggaacggaacgcaggaucgggcaucauaauuucugacaccccugugcaugauugcaauacaaccugucaaacgccaaaaggugcuaucaacacuucccucccguuccagaauauucaccccaucacaaucgggaagugcccuaaguauguaaaaucaaccaagcugcgccuugccacuggacugagaaacgugccaaguauucagagcaggggcuuguuuggcgcgauagccggguucaucgagggagguuggacaggcauggucgacgggugguacggauaucaucaccagaaugaacaaggcuccgguuacgcagcugaccucaaaucuacccagaacgccauugaugagaucacgaauaaggugaacagcguuauagagaaaaugaauacccaguuuacagcuguggggaaggaguucaaccaccuggagaagcggauugaaaauuuaaacaaaaaggucgacgauggcuuccuggacaucuggacuuacaaugccgagcuccuugugcuguuggaaaacgagcgcacccuagauuaucaugacucaaauguuaaaaaccuguacgagaagguacgaagucagcucaaaaacaaugcaaaggaaaucggaaacggcuguuuugaguucuaucacaagugcgauaauacauguauggaauccgugaaaaacgggacuuacgacuaucccaaguacagcgaggaagccaaacugaauagagaggagauugauggagucaaacuugaaucuaccaggaucuaucaaauucuggcuauauacucaacaguggcgaguagcuugguccucgugguuucccugggugcaaucucuuuuuggaugugcucgaacggcagcuuacagugccggauuuguaucuga

SEQ ID NO: 131835 - RNA, 1701 nt, Artificial Sequence
  derived and/or modified CDS sequence (opt3) from hemagglutinin__InfluenzaA__ACZ61118
augaaggccauccuggugguccuccuuuacaccuucgcuacagcaaacgccgacacucugugcauuggcuaucacgcgaauaacagcacggauaccguugacacaguguuggagaaaaauguaacugugacccauuccgucaacuuacuggaagauaagcacaaugggaaacuauguaagcucagaggaguggcuccccugcaucuugguaaaugcaacauagccggcuggauccuggggaauccugagugugaaucuuugucaacagcaaguagcugguccuacauuguugagaccucuucgucagacaacggaacuugcuauccaggcgauuuuaucgacuacgaggagcucagggagcagcugagcaguguguccucuuucgaacgguuugagauuuucccgaagacaagcuccuggcccaaucacgauucaaacaagggugucaccgccgcuuguccucaugcaggggccaaaaguuuuuauaagaaucugaucuggcucgugaaaaagggaaacagcuacccaaaauuaucuaaguccuauauaaaugacaagggcaaagaaguacugguucuuuggggcauccaccaccaaucaacgagcgcugaucagcagaguuuguaccagaacgccgacgcguacguguucgucgggucuucccgcuauagcaagaaauuuaagcccgagauugcaauccgaccuaaagugcgugaucaagagggaagaaugaauuacuauuggacucugguggaaccaggugacaagauuaccuucgaggccacaggcaaccuagucguucccagguacgcuuuugccauggaacggaacgcagggucgggaaucauaauuucugauacuccugugcaugacugcaauaccacaugucagaccccaaaaggcgcuaucaacacgucccucccguuccagaauauucaccccaucacuaucgguaagugcccuaaguauguaaaaucaacaaagcugcgccuugccaccgggcugagaaacgugccaaguauucagagcaggggauuguuuggcgcgauagccggcuucaucgaagggggauggacugguauggucgacggcugguacggguaucaucaccaaaaugaacagggauccggcuacgcagcugaucucaaaucuacacagaacgccauugacgagaucaccaauaaggugaacagcguuauagagaaaaugaauacgcaguuuaccgcuguggguaaggaguucaaccaccuggaaaagcggauugaaaauuuaaacaaaaaggucgaugacggguuccuggauaucuggacauacaaugccgagcuccuugugcuguuggaaaacgagcgcacucuagacuaucaugauucaaauguaaagaaccuguacgagaagguucgaagucaacucaaaaacaaugcaaaggaaaucggcaacggauguuuugaguucuaucacaagugcgacaauaccuguauggaauccgugaaaaacggcacauacgauuaucccaaguacagcgaggaagccaaacugaauagagaggagauugacggggucaaacuugaaucuacuaggaucuaucagauucuggcuauauacucaaccguggcgaguagcuugguccucgugguuucccugggagcaaucucuuuuuggaugugcucgaacgguagcuuacagugccggauuuguaucuga

SEQ ID NO: 131836 - RNA, 1701 nt, Artificial Sequence
  derived and/or modified CDS sequence (opt3) from hemagglutinin__InfluenzaA__ACZ61119
auggaggccauccuggugguccuccuuuacaccuucgcuacagcaaacgccgacacucugugcauuggcuaucacgcgaauaacagcacggauaccguugacacaguguuggaaaagaauguaacugugacccauuccgucaacuuacuggaggauaaacacaaugggaagcuauguaaacucagaggaguggcuccccugcaucuugguaagugcaacauagccggcuggauccuggggaauccugaaugugagucuuugucaacagcaaguagcugguccuacauuguugaaaccucuucgucagacaacggaacuugcuauccaggcgauuuuaucgacuacgaggagcucagggaacagcugagcaguguguccucuuucgagcgguuugaaauuuucccgaaaacaagcuccuggcccaaucacgauucaaacaagggugucaccgccgcuuguccucaugcaggggccaagaguuuuuauaaaaaucugaucuggcucgugaagaaaggaaacagcuacccaaaguuaucuaaauccuauauaaaugacaagggcaaggagguacugguucuuuggggcauccaccaccccucaacgagcgcugaucaacagaguuuguaccagaacgccgacgcguacguguucgucgggucuucccgcuauagcaaaaaguuuaaaccugagauugcaauccgaccaaaggugcgugaucaggaaggaagaaugaauuacuauuggacucugguggagcccggugacaaaauuaccuucgaagccacaggcaaccuagucguuccuagguacgcuuuugccauggagcggaacgcagggucgggaaucauaauuucugauacuccagugcaugacugcaauaccacaugucaaaccccgaagggcgcuaucaacacgucccuccccuuccacaauauucauccuaucacuaucgguaaaugcccaaaguauguaaagucaacaaaacugcgccuugccaccgggcugagaaacgugcccaguauucagagcaggggauuguuuggcgcgauagccggcuucaucgaagggggauggacugguauggucgacggcugguacggguaucaccaccagaaugagcagggauccggcuacgcagcugaucucaagucuacacaaaacgccauugacgagaucaccaauaaagugaacagcguuauagaaaagaugaauacgcaguuuaccgcuguggguaaagaguucaaccaucuggaaaagcggauugagaauuuaaacaagaaagucgaugacggguuccuggauaucuggacauacaaugccgaacuccuuauccuguuggagaacgagcgcacucuagacuaucacgauucaaaugugaagaaccuguacgaaaaaguacgaagucagcucaagaacaaugcaaaagagauuggcaacggauguuuugaguucuaucauaagugcgacaauaccuguauggaauccguuaagaacggcacauacgauuauccuaaauacagcgaagaggccaagcugaauagagaggaaaucgacggggugaaacuugagucuacuaggauuuaucagauacuggcuaucuacucaaccgucgcgaguagcuuggugcucgucgugucccugggagcaauuucuuuuuggaugugcucgaacgguagcuuacaaugccggaucuguaucuga

SEQ ID NO: 131837 - RNA, 1701 nt, Artificial Sequence; identical to SEQ ID NO: 130717
  derived and/or modified CDS sequence (opt3) from hemagglutinin__InfluenzaA__ACZ61122

SEQ ID NO: 131838 - RNA, 1701 nt, Artificial Sequence; identical to SEQ ID NO: 130717
  derived and/or modified CDS sequence (opt3) from hemagglutinin__InfluenzaA__ACZ61123

SEQ ID NO: 131839 - RNA, 1701 nt, Artificial Sequence; identical to SEQ ID NO: 131515
  derived and/or modified CDS sequence (opt3) from hemagglutinin__InfluenzaA__ACZ74627

SEQ ID NO: 131840 - RNA, 1698 nt, Artificial Sequence
  derived and/or modified CDS sequence (opt3) from hemagglutinin__InfluenzaA__ACZ81554
augaaggugaaacugcucguccuucugugcaccuucacagccacuuacgcugacacgaucuguauuggcuaucacgcaaacaauagcaccgauacaguugacacuguguuggagaagaacguaaccgugacacauuccgucaauuuacuggaaaacaaucacaacgggaaacuaugccuccugaagggaauagcgccccuucagcuggguaauuguaccguggccggcuggaucuuggggaacccugagugcgaacuccugauuucuaaagagucauggaguuacaucguugaaaagccaaauccggagaacggaacuuguuaucccggccauuuugcugauuacgaggaacugagagagcaacucagcuccgugucuucguucgaaagguuugagauuuucccuaaggagucaagcuggccaaaucacacagucaccggugugagugccuccugcucucauaacggggaaaauagcuuuuaucggaacuuacuguggcuuacgggcaaaaauggauuguaccccaaccuguccaagucauaugcaaacaauaaagagaaggaaguucuaguacucuggggcgugcaccacccuccaaacaucgccgaccagaaaacucuguaccauaccgagaaugcuuacgucaguguggugagcucucacuauucccgcaaguucacacccgaaauagcaaagcgaccuaaaauccgugaucaggaggggagaauuaacuacuauuggacucuucuggagccaggagacaccaucauuuuugaagccaaugguaacuugaucgcuccgagguacgccuucgcgcucucacggggcuuugggagcggaauaauuaauaguaacgcacccauggauaagugugacgccaaaugccagacaccucaaggcgcuaucaauucuucccugccauuccagaacguccaucccguuaccauuggugaguguccuaaguaugugcgcagcgccaaauuaagaaugguaacggggcugaggaauaucccaucgauccagucucggggacucuuuggcgcaauugcuggcuucauagaagggggauggacugguaugguggauggcugguacggguaucaccaccagaacgagcaaggauccggcuacgccgcggaccagaagucaacacagaaugccaucaacgguauuaccaauaaagucaacagugugaucgaaaagaugaacacucaguuuacagcaguugggaaggaguucaauaaacuugagcgccgaauggaaaaccugaauaagaaaguggaugacggcuucauagauauuuggaccuacaacgcugaguugcuaguccugcucgaaaaugagagaacgcuggacuuucaugacagcaacgugaagaaucuuuaugaaaaaguaaagucccaacugaagaacaaugccaaagagaucggaaacggcugcuucgaguuuuaccacaaguguaaugaugaaugcauggagucuguuaaaaacgggaccuaugacuaccccaaguauagcgaagagucaaaauugaauagggagaagaucgauggagugaagcucgaaaguaugggugucuaccagauucuggcuaucuauuccacaguggccagcucuuuaguccugcuagugucacucggcgcaauuaguuucuggaugugcagcaacgggucccugcagugucggauaugcaucuga

SEQ ID NO: 131841 - RNA, 1698 nt, Artificial Sequence
  derived and/or modified CDS sequence (opt3) from hemagglutinin__InfluenzaA__ACZ81555
augaaggugaaacugcucguccuucugugcaccuucacagccacuuacgcugacacgaucuguauuggcuaucacgcaaacaauagcaccgauacaguugacacuguguuggagaagaacguaaccgugacacauuccgucaauuuacuggaaaacucucacaaugggaaacuaugccuccugaagggaauagcgccccuucagcuggguaacuguucaguggccggcuggaucuuggggaauccugagugcgaacuccugauuaguaaagagagcugguccuacaucguugaaaagccaaacccggagaauggaaccuguuaucccggccauuuugcugauuacgaggaacugagagagcaacucucuucggugagcucauucgaaagguuugagauuuucccuaaggagaguuccuggccaaaccacacugucacaggugugucugccagcugcucccauaauggggaaaacucauuuuaucggaauuuacuguggcuuaccggaaagaacggcuuguaccccaaucugaguaagagcuaugcaaacaacaaagagaaggaagugcuaguucucuggggcgugcaccacccuccaaauaucggggaccagaaaacgcuguaccauacugagaacgccuacgucucugugguguccucacacuauagccgcaaguucacccccgaaauagcuaagcgaccuaaaguccgugaucaggagggaagaaucaauuacuauugggcacuucuggagccaggugacacaauuaucuuugaagccaacggcaauuugauugcuccgagguacgccuucgcgcucagucggggguuuggaucuggcaucauaaacuccaaugcacccauggauaagugugacgccaaaugccagacuccucaaggugcuauuaacagcucgcugccauuccagaauguucaucccgugaccaucggggaguguccuaaguauguacgcucugccaaauuaagaauggugacaggacugaggaacauuccauccauccagucacggggccucuuuggcgcaaucgcuggguucauugaaggagguuggaccggcauggucgaugggugguacggauaucaccaccagaaugagcaaggcagugguuacgccgcggaccagaaaagcacgcagaacgccauaaaugggaucacuaacaaaguaaauuccguuauugaaaagaugaacacacaguuuaccgcagugggcaaggaguucaacaaacuugagcgccgaauggaaaaucugaacaagaaagucgaugacggauucaucgauauauggacuuacaaugcugaguugcuagugcugcucgaaaacgagagaacacuggacuuucaugacucuaauguaaagaaccuuuaugaaaaaguuaagagccaacugaagaauaacgccaaagagauuggcaaugggugcuucgaguuuuaccacaaguguaacgaugaaugcauggagucagugaaaaauggaaccuaugacuaccccaaguauagugaagaguccaaauugaacagggagaagaucgauggugucaagcucgaaagcaugggcguguaccagauccuggcuauuuauucuacggucgccucaaguuuagugcugcuaguuagccucggggcaaucuccuucuggaugugcucuaauggaucgcugcagugucggauuugcauauga

SEQ ID NO: 131842 - RNA, 1698 nt, Artificial Sequence
  derived and/or modified CDS sequence (opt3) from hemagglutinin__InfluenzaA__ACZ81556
augaaggugaaacugcucguccuucugugcaccuucacagccacuuacgcugacacgaucuguauuggcuaucacgcaaacaauagcaccgauacaguugacacuguguuggagaagaacguaaccgugacacauuccgucaauuuacuggaaaacucucacaaugggaaacuaugccuccugaagggaauagcgccccuucagcuggguaacuguucaguggccggcuggaucuuggggaauccugagugcgaacuccugauuaguaaagagagcugguccuacaucguugaaaagccaaacccggagaauggaaccuguuaucccggccauuuugcugauuacgaggaacugagagagcaacucucuucggugagcucauucgaaagguuugagauuuucccuaaggagaguuccuggccaaaccacacugucacaggugccucugcaagcugcucccauaauggggaaaacucauuuuaucggaauuuacuguggcuuaccggaaagaacggcuuguaccccaaucugaguaagagcuaugccaacaacaaagagaaggaagugcuaguacucuggggcguucaccacccuccaaauaucgcugaccagaaaacgcuguaccauacugagaacgcauacgugucugucguguccucacacuauagccgcaaguucacccccgaaauagccaagcgaccuaaagugcgugaucaggaggggagaaucaauuacuauuggacacuucuggagccaggagacacuauuaucuuugaagcuaacgguaauuugauugccccgagguacgcguucgcacucagucggggcuuugggucuggaaucauaaacuccaaugcccccauggauaagugugacgcuaaaugccagaccccucaaggcgccauuaacagcucgcugccauuccagaauguccaucccguuacaaucggugaguguccuaaguaugugcgcucugcaaaauuaagaaugguaaccgggcugaggaacauuccauccauccagucacggggacucuuuggcgcuaucgccggcuucauugaagggggauggacggguaugguggauggcugguacggguaucaccaccagaaugagcaaggaaguggcuacgcggccgaccagaaaagcacucagaacgcaauaaaugguaucacaaacaaagucaauuccgugauugaaaagaugaacacccaguuuacugcuguugggaaggaguucaacaaacuugagcgccgaauggaaaaucugaacaagaaaguggaugacggcuucaucgauauauggacauacaaugccgaguugcuaguccugcucgaaaacgagagaacccuggacuuucaugacucuaaugugaagaaccuuuaugaaaaaguaaagagccaacugaagaauaacgcuaaagagauuggaaauggcugcuucgaguuuuaccacaaguguaacgaugaaugcauggagucaguuaaaaaugggacguaugacuaccccaaguauagugaagaguccaaauugaacaaggagaagaucgauggagugaaacucgaaagcaugggugucuaccagauccuggccauuuauucuaccguggcaucaaguuuaguccugcuagugagccucggcgccaucuccuucuggaugugcucuaaugggucgcugcaguguaggauuugcauauga

SEQ ID NO: 131843 - RNA, 1701 nt, Artificial Sequence
  derived and/or modified CDS sequence (opt3) from hemagglutinin__InfluenzaA__ACZ81557
augaagaccaucauugcccugagcuacauacucugccuuguguucgcucagaaacugcccggcaacgacaauuccacagcaacuuuguguuuagggcaccaugccgucccuaacggaacgaucguuaagaccauuacaaaugaucaaaucgaggugacuaacgcgaccgaacugguacagucuucaaguacaggugagauuugcggcagcccacaccagauccuagacgggaaaaauuguacccucauagaugcucugcuuggagacccgcagugcgauggcuuucaaaacaagaaaugggaccuguucguggaaagauccaaggccuauucuaauuguuaccccuaugaugucccugacuacgcaucguugaggucacucguggccagcagugguacucuggaguuuaacaaugaauccuucaacuggacagggguuacccagaauggaacgucuagcgcuugcauccggcgcuccaagaacucauuuuucagucgacugaauuggcucacucauuuaaacuuuaaauaucaggcacugaaugugaccaugccaaacaacgagcaguucgauaagcuguacauuuggggcguccaccaucccggcacagacaaagaucaaaucuuuuuguaugcccaggcuagcgggcguauuacugugucuaccaagagaucccagcagacaguaaucccuaauauaggaucaaggccacggguucgcaacauucccagcagaaucaguauuuacuggaccaucgugaaaccuggugacauccugcuaauuaauucuacgggcaaccucauagccccaaggggguacuucaagauccaauccggaaagagcucgauuaugcggucugaugcgccgaucggcaaauguaauuccgagugcauaacucccaacgguucaauuccuaaugacaagccauuucagaacgucaaucgcaucacauauggggcauguccccgauacgugaaacagaacacccugaaacuugccacuggaaugagaaaugugccugaaaaacaaacaaggggcaucuucggcgcuauugccggguuuaucgagaacggaugggaagguauggucgacggcugguauggguuccggcaccagaauagugagggacguggccaggcagcugaucuuaagagcacccaggccgcgauugaccaaauaaacgguaaauugaaucgccucaucgggaagacgaacgagaaguuccaccagauugaaaaagaguuuuccgaaguugagggcagaauccaggaucuggaaaaguacguggaggacaccaaaaucgauuuauggucuuauaacgccgagcugcucguagcacuugaaaaucagcauacaauugaccugacugauagcgagaugaacaaguuguucgaaaagaccaagaagcaacuaagggagaaugcugaagacaugggaaacggcugcuuuaaaauauaccacaagugugauaaugccugcaucgggucaauucggaacggaacauaugaccaugauguguaccgagacgaggcucugaauaaccgcuuccagaucaaaggugucgagcucaagaguggcuacaaagacuggauucuguggaucuccuuugccauaagcugcuuccuucuguguguggcauugcucggguuuaucaugugggccugccagaagggaaauauuagauguaacaucugcauuuga

SEQ ID NO: 131844 - RNA, 1701 nt, Artificial Sequence
  derived and/or modified CDS sequence (opt3) from hemagglutinin__InfluenzaA__ACZ81558
augaagaccaucauugcccugagcuacauacucugccuuguguucgcucagaaacugcccggcaacgacaauuccacagcaacuuuguguuuagggcaccaugccgucccuaacggaacgaucguuaagaccauuacaaaugaucaaaucgaggugacuaacgcgaccgaacugguacagucuucaaguacaggugagauuugcgacagcccacaccagauccuagauggcaaaaauuguacccucauagacgcucugcuuggggauccgcauugcgacggauuucagaacaagaaaugggaucuguucguggaaagauccaaggccuauucuaauuguuaccccuaugacgucccugauuacgcaucguugaggucacucguggccagcaguggcacucuggaguuuaacaaugaauccuucaacuggacagguguuacccaaaaugggacgucuagcgcuugcauccggcgcuccaagaacucauuuuucagucgacugaauuggcucacucacuuaaacuuuaaauauccagcacugaaugugaccaugcccaacaacgagcaguucgacaagcuguacauuuggggaguccaucacccuggcacagauaaagaccagaucuuuuuguaugcccaggcuagcggccguauuacugugucuaccaagagaucccaacagacagccaucccaaauauagggucaaggccccggguacgcaacauuccuagcagaaucaguauuuacuggaccaucguuaaaccaggagauauccugcuaauuaauucuacggguaaccucauagcgccgaggggcuacuucaagauccgguccggaaagagcucgauuaugcgcucugacgcacccaucgggaaauguaauuccgagugcauaacuccuaacggcucaauuccaaaugacaagcccuuucagaacgugaaucgaaucacauauggugccuguccuagauacgucaaacagaacacccugaaacuugcuacugggaugaggaaugugccagaaaagcaaacacggggaaucuucggcgccauugcaggcuuuaucgagaacgggugggaaggaaugguggaugguugguauggcuuccgucaccagaauagugaggggcgcggacaggcugccgaccuuaagagcacccaagcggccauugaucagauaaacggcaaauugaauagacucaucgagaagacgaacgaaaaguuccaucagauugagaaagaauuuuccgaggucgaagguaggauccaggaccuggagaaguacguugaggauaccaaaaucgacuuauggucuuauaacgcagaacugcucguggcucuugagaaucaacacacaauugaucugacugacagcgaaaugaacaaguuguucgagaaaaccaagaagcagcuacgggaaaaugccgaggauauggggaacggcugcuuuaaaauauaccauaagugugacaaugcuugcaucggaucaauucgaaacggcacauaugaucacgacguauaccgcgacgaggcccugaauaacagauuccagaucaaagggguggaacucaagaguggauacaaagauuggauucuguggaucuccuuugcaauaagcugcuuccuucugugugucgccuugcucgguuuuaucaugugggcuugccagaagggcaauauuagguguaacaucugcauuuga

SEQ ID NO: 131845 - RNA, 1701 nt, Artificial Sequence
  derived and/or modified CDS sequence (opt3) from hemagglutinin__InfluenzaA__ACZ81559
augaagaccaucauugcccugagcuacauacucugccuuguguucgcucagaaacugcccggcaacgacaauuccacagcaacuuuguguuuagggcaccaugccgucccuaacggaacgaucguuaagaccauuacaaaugaucaaaucgaggugacuaacgcgaccgaacugguacagucuucaaguacaggugagauuugcgacagcccacaccagauccuagauggcaaaaauuguacccucauagacgcucugcuuggggauccgcauugcgacggauuucagaacaagaaaugggaucuguucguggaaagauccaaggccuauucuaauuguuaccccuaugacgucccugauuacgcaucguugaggucacucguggccagcaguggcacucuggaguuuaacaaugaauccuucaacuggacagguguuacccaaaaugggacgucuagcgcuugcauccggcgcuccaagaacucauuuuucagucgacugaauuggcucacucacuuaaacuuuaaauauccagcacugaaugugaccaugcccaacaacgagcaguucgacaagcuguacauuuggggaguccaucacccuggcacagauaaagaccagaucuuuuuguaugcccaggcuagcggccguauuacugugucuaccaagagaucccaacagacagccaucccaaauauagggucaaggccccggguacgcaacauuccuagcagaaucaguauuuacuggaccaucguuaaaccaggagauauccugcuaauuaauucuacggguaaccucauagcgccgaggggcuacuucaagauccgguccggaaagagcucgauuaugcgcucugacgcacccaucgggaaauguaauuccgagugcauaacuccuaacggcucaauuccaaaugacaagcccuuucagaacgugaaucgaaucacauauggugccuguccuagauacgucaaacagaacacccugaaacuugcuacugggaugaggaaugugccagaaaaacaaacacggggaaucuucggcgccauugcaggcuuuaucgagaacgggugggaaggaaugguggaugguugguauggcuuccgucaccagaauagugaggggcgcggacaggcugccgaccuuaagagcacccaagcggccauugaucagauaaacggcaaauugaauagacucaucgguaagacgaacgagaaguuccaucagauugaaaaagaguuuuccgaagucgaggggaggauccaggaccuggaaaaguacguugaggauaccaaaaucgacuuauggucuuauaacgcagagcugcucguggcucuugaaaaucaacacacaauugaucugacugacagcgagaugaacaaguuguucgaaaagaccaagaagcagcuacgggagaaugccgaagauaugggcaacggaugcuuuaaaauauaccauaagugugacaaugcuugcaucggcucaauucgaaacgggacauaugaucacgacguauaccgcgacgaggcccugaauaacagauuccagaucaaaggaguggagcucaagagugguuacaaagauuggauucuguggaucuccuuugcaauaagcugcuuccuucugugugucgccuugcucggcuuuaucaugugggcuugccagaaggggaauauuagguguaacaucugcauuuga

SEQ ID NO: 131846 - RNA, 1701 nt, Artificial Sequence; identical to SEQ ID NO: 130717
  derived and/or modified CDS sequence (opt3) from hemagglutinin__InfluenzaA__ACZ81632

SEQ ID NO: 131847 - RNA, 1701 nt, Artificial Sequence; identical to SEQ ID NO: 130717
  derived and/or modified CDS sequence (opt3) from hemagglutinin__InfluenzaA__ACZ81642

SEQ ID NO: 131848 - RNA, 1701 nt, Artificial Sequence
  derived and/or modified CDS sequence (opt3) from hemagglutinin__InfluenzaA__ACZ81652
augaaggccauccuggugguccuccuuuacaccuucgcuacagcaaacgccgacacucugugcauuggcuaucacgcgaauaacagcacggauaccguugacacaguguuggagagaaauguaacugugacccauuccgucaacuuacuggaagauaaacacaaugggaagcuauguaaacucaggggaguggcuccccugcaucuugguaagugcaacauagccggcuggauccuggggaauccugagugugaaucuuugucaacagcaaguagcugguccuacauuguugagaccucuucgucagacaacggaacuugcuauccaggcgauuuuaucgacuacgaagaacuccgggagcagcugagcaguguguccucuuucgaacgcuuugagauuuucccgaaaacaagcuccuggcccaaucacgauucaaacaagggugucaccgccgcuuguccucaugcagaagccaagaguuuuuauaaaaaucugaucuggcucgugaagaaagggaacagcuacccaaaguuaucuaaauccuauauaaaugacaagggaaaggagguacugguucuuuggggcauccaccaccccucaacgagcgcugaucaacagaguuuguaccagaacgccgacgcguacguguucgucggcacuucucgauauuccaaaaaguuuaaaccugagauugcaauccguccaaaggugagagggcaggaaggaaggaugaauuacuauuggacccugguggagcccggugauaaaauuacauucgaagccacuggcaaccuagucguuccucgguacgcuuuugccauggagcgcaacgcagggagcggaaucauaauuucggacaccccagugcaugauugcaauacaaccugucaaacgccgaagggcgcuaucaacacuucucuccccuuccagaauauucacccuaucacaaucgguaaaugcccaaaguauguaaaguccaccaaacugagacuugccacugggcugaggaacgugcccucaauucagagucggggauuguuuggcgcgauagccggcuucaucgaagggggauggacagguauggucgacggcugguacggguaucaucaccagaaugagcaaggaagcggcuacgcagcugaccucaaguccacccagaacgccauugaugagaucacgaauaaagugaacucuguuauagaaaagaugaauacccaguuuacagcuguggguaaagaguucaaccaccuggaaaagcgcauugagaauuuaaacaagaaagucgacgauggguuccuggacaucuggacuuacaaugccgaacuccuugugcuguuggagaacgagcgaacccuagauuaucaugacagcaauguaaagaaccuguacgaaaaaguuagaucacagcucaagaacaaugcaaaagagaucggcaacggauguuuugaguucuaucacaagugcgauaauacauguauggagagugugaagaacggcacuuacgacuauccuaaauacuccgaagaggccaagcugaauagggaggaaauugauggggucaaacuugagagcacccggaucuaucaaauucuggcuauauacucuacaguggcgucaaguuugguccucgugguuagccugggagcaaucuccuuuuggaugugcucuaacgguucguuacagugccguauuuguaucuga

SEQ ID NO: 131849 - RNA, 1701 nt, Artificial Sequence
  derived and/or modified CDS sequence (opt3) from hemagglutinin__InfluenzaA__ACZ92130
auggaggccauccuggugguccuccuuuacaccuucgcuacagcaaacgccgacacucugugcauuggcuaucacgcgaauaacagcacggauaccguugacacaguguuggaaaagaauguaacugugacccauuccgucaacuuacuggaggauaaacacaaugggaagcuauguaaacucagaggaguggcuccccugcaucuugguaagugcaacauagccggcuggauccuggggaauccugaaugugagucuuugucaacagcaaguagcugguccuacauuguugaaaccucuucgucagacaacggaacuugcuauccaggcgauuuuaucgacuacgaggagcucagggaacagcugagcaguguguccucuuucgagcgguuugaaauuuucccgaaaacaagcuccuggcccaaucacgauucaaacaagggugucaccgccgcuuguccucaugcaggggccaagaguuuuuauaaaaaucugaucuggcucgugaagaaaggaaacagcuacccaaaguuaucuaaauccuauauaaaugacaagggcaaggagguacugguucuuuggggcauccaccaccccucaacgagcgcugaucaacagaguuuguaccagaacgccgacgcguacguguucgucgggucuucccgcuauagcaaaaaguuuaaaccugagauugcaauccgaccaaaggugcgugaucaggaaggaagaaugaauuacuauuggacucugguggagcccggugacaaaauuaccuucgaagccacaggcaaccuagucguuccuagguacgcuuuugccauggagcggaacgcagggucgggaaucauaauuucugauacuccagugcaugacugcaauaccacaugucaaaccccgaagggcgcuaucaacacgucccuccccuuccacaauauucauccuaucacuaucgguaaaugcccaaaguauguaaagucaacaaaacugcgccuugccaccgggcugagaaacgugcccaguauucagagcaggggauuguuuggcgcgauagccggcuucaucgaagggggauggacugguauggucgacggcugguacggguaucaccaccagaaugagcagggauccggcuacgcagcugaucucaagucuacacaaaacgccauugacgagaucaccaauaaagugaacagcguuauagaaaagaugaauacgcaguuuaccgcuguggguaaagaguucaaccaucuggaaaagcggauugagaauuuaaacaagaaagucgaugacggguuccuggauaucuggacauacaaugccgaacuccuugugcuguuggagaacgagcgcacucuagacuaucacgauucaaauguaaagaaccuguacgaaaaaguucgaagucagcucaagaacaaugcaaaagagaucggcaacggauguuuugaguucuaucauaagugcgacaauaccuguauugaauccgugaagaacggcacauacgauuauccuaaauacagcgaagaggccaagcugaauagagaggaaaucgacggggucaaacuugagucuacuaggauuuaucagauacuggcuaucuacucaaccguggcgaguagcuugguccucgugguuucccugggagcaauuucuuuuuggaugugcucgaacgguagcuuacaaugccggaucuguaucuga

SEQ ID NO: 131850 - RNA, 1701 nt, Artificial Sequence; identical to SEQ ID NO: 130959
  derived and/or modified CDS sequence (opt3) from hemagglutinin__InfluenzaA__ACZ92131

SEQ ID NO: 131851 - RNA, 1701 nt, Artificial Sequence; identical to SEQ ID NO: 130959
  derived and/or modified CDS sequence (opt3) from hemagglutinin__InfluenzaA__ACZ92132

SEQ ID NO: 131852 - RNA, 1701 nt, Artificial Sequence; identical to SEQ ID NO: 130959
  derived and/or modified CDS sequence (opt3) from hemagglutinin__InfluenzaA__ACZ92133

SEQ ID NO: 131853 - RNA, 1701 nt, Artificial Sequence; identical to SEQ ID NO: 130717
  derived and/or modified CDS sequence (opt3) from hemagglutinin__InfluenzaA__ACZ92134

SEQ ID NO: 131854 - RNA, 1701 nt, Artificial Sequence; identical to SEQ ID NO: 130717
  derived and/or modified CDS sequence (opt3) from hemagglutinin__InfluenzaA__ACZ95465

SEQ ID NO: 131855 - RNA, 1701 nt, Artificial Sequence; identical to SEQ ID NO: 130704
  derived and/or modified CDS sequence (opt3) from hemagglutinin__InfluenzaA__ACZ95837

SEQ ID NO: 131856 - RNA, 1701 nt, Artificial Sequence; identical to SEQ ID NO: 130717
  derived and/or modified CDS sequence (opt3) from hemagglutinin__InfluenzaA__ACZ95847

SEQ ID NO: 131857 - RNA, 1701 nt, Artificial Sequence
  derived and/or modified CDS sequence (opt3) from hemagglutinin__InfluenzaA__ACZ95857
augaaggccauccuggugguccuccuuuacaccuucgcuacagcaaacgccgacacucugugcauuggcuaucacgcgaauaacagcacggauaccguugacacaguguuggagaaaaauguaacugugacccauuccgucaacuuacuggaagauaagcacaaugggaaacuauguaagcucagaggaguggcuccccugcaucuugguaaaugcaacauagccggcuggauccuggggaauccugagugugaaucuuugucaacagcaaguagcugguccuacauuguugagaccucuucgucagacaacggaacuugcuauccaggcgauuuuaucgacuacgaggagcucagggagcagcugagcaguguguccucuuucgaacgguuugagauuuucccgaagacaagcuccuggcccaaucacgauucaaacaagggugucaccgccgcuuguccucaugcaggggccaaaaguuuuuauaagaaucugaucuggcucgugaaaaagggaaacagcuacccaaaauuaucuaaguccuauauaaaugacaagggcaaagaaguacugguucuuuggggcauccaccaccccucaacgagcgcugaucaacagaguuuguaccagaacgccgacgcguacguguucgucgggacuucucgcuauuccaagaaauuuaagccugagauugcaauccgaccaaaagugcgugaucaggagggaagaaugaauuacuauuggacccugguggaacccggugacaagauuacauucgaggccacuggcaaccuagucguuccuagguacgcuuuugccauggaacggaacgcagggagcggaaucauaauuucggauaccccagugcaugacugcaauacaaccugucaaacgucuaaaggcgcuaucaacacuucccucccguuccagaauauucaccccaucacaaucgguaagugcccuaaguauguaaaaucaaccaagcugcgccuugccacugggcugagaaacgugccaaguauucagagcaggggauuguuuggcgcgauagccggcuucaucgaagggggauggacagguauggucgacggcugguacggguaucaucaccagaaugaacaaggauccggcuacgcagcugaucucaaaucuacccagaacgccauugacgagaucacgaauaaggugaacagcguuauagagaaaaugaauacccaguuuacagcuguggguaaggaguucaaccaccuggaaaagcggauugaaaauuuaaacaaaaaggucgaugacggguuccuggauaucuggacuuacaaugccgagcuccuugugcuguuggaaaacgagcgcacccuagacuaucaugauucaaauguaaagaaccuguacgagaagguucgaagucagcucaaaaacaaugcaaaggaaaucggcaacggauguuuugaguucuaucacaagugcgacaauacauguauggaauccgugaaaaacggcacuuacgauuaucccaaguacagcgaggaagccaaacugaauagagaggagauugacggggucaaacuugaaucuaccaggaucuaucaaauucuggcuauauacucaacaguggcgaguagcuugguccucgugguuucccugggagcaaucucuuuuuggaugugcucgaacgguagcuuacagugccggauuuguaucuga

SEQ ID NO: 131858 - RNA, 1701 nt, Artificial Sequence; identical to SEQ ID NO: 130717
  derived and/or modified CDS sequence (opt3) from hemagglutinin__InfluenzaA__ACZ95867

SEQ ID NO: 131859 - RNA, 1701 nt, Artificial Sequence
  derived and/or modified CDS sequence (opt3) from hemagglutinin__InfluenzaA__ACZ95887
auggaggccauccuggugguccuccuuuacaccuucgcuacagcaaacgccgacacucugugcauuggcuaucacgcgaauaacagcacggauaccguugacacaguguuggaaaagaauguaacugugacccauuccgucaacuuacuggaggauaaacacaaugggaagcuauguaaacucagaggaguggcuccccugcaucuugguaagugcaacauagccggcuggauccuggggaauccugaaugugagucuuugucaacagcaaguagcugguccuacauuguugaaaccucuucgucagacaacggaacuugcuauccaggcgauuuuaucgacuacgaggagcucagggaacagcugagcaguguguccucuuucgagcgguuugaaauuuucccgaaaacaagcuccuggcccaaucacgauucaaacaagggugucaccgccgcuuguccucaugcaggggccaagaguuuuuauaaaaaucugaucuggcucgugaagaaaggaaacagcuacccaaaguuaucuaaauccuauauaaaugacaagggcaaggagguacugguucuuuggggcauccaccaccccucaacgagcgcugaucaacagaguuuguaccagaacgccgacgcguacguguucgucgggucuucccgcuauagcaaaaaguuuaaaccugagauugcaauccgaccaaaggugcguaaucaggaaggaagaaugaacuacuauuggacucugguggagcccggugauaaaauuaccuucgaagccacaggcaaccuagucguuccuagguacgcuuuugccauggagcggaaugcagggucgggaaucauaauuucugacacuccagugcaugauugcaacaccacaugucaaaccccgaagggcgcuaucaauacgucccuccccuuccacaacauucauccuaucacuaucgguaaaugcccaaaguauguaaagucaacaaaacugcgccuugccaccgggcugagaaaugugcccaguauucagagcaggggauuguuuggcgcgauagccggcuucaucgaagggggauggacugguauggucgacggcugguacggguaucaccaccagaacgagcagggauccggcuacgcagcugaccucaagucuacacaaaaugccauugaugagaucaccaacaaagugaauagcguuauagaaaagaugaacacgcaguuuaccgcuguggguaaagaguucaaucaucuggaaaagcggauugagaacuuaaauaagaaagucgacgauggguuccuggacaucuggacauacaacgccgaacuccuugugcuguuggagaaugagcgcacucuagauuaucacgacucaaacguaaagaaccuguacgaaaaaguucgaagucagcucaagaauaacgcaaaagagaucggcaauggauguuuugaguucuaucauaagugcgauaacaccuguauggaauccgugaagaauggcacauacgacuauccuaaauacagcgaagaggccaagcugaacagagaggaaauugauggggucaaacuugagucuacuaggaucuaucagauucuggcuauauacucaaccguggcgaguagcuugguccucgugguuucccugggagcaaucucuuuuuggaugugcucgaaugguagcuuacaaugccggauuuguaucuga

SEQ ID NO: 131860 - RNA, 1701 nt, Artificial Sequence; identical to SEQ ID NO: 130717
  derived and/or modified CDS sequence (opt3) from hemagglutinin__InfluenzaA__ACZ95897

SEQ ID NO: 131861 - RNA, 1701 nt, Artificial Sequence
  derived and/or modified CDS sequence (opt3) from hemagglutinin__InfluenzaA__ACZ95907
augaaggccauccuggugguccuccuuuacaccuucgcuacagcaaacgccgacacucugugcauuggcuaucacgcgaauaacagcacggauaccguugacacaguguuggagaaaaauguaacugugacccauuccgucaacuuacuggaagauaagcacaaugggaaacuauguaagcucagaggaguggcuccccugcaucuugguaaaugcaacauagccggcuggauccuggggaauccugagugugaaucuuugucaacagcaaguagcugguccuacauuguugagaccucuucgucagacaacggaacuugcuauccaggcgauuuuaucgacuacgaggagcucagggagcagcugagcaguguguccucuuucgaacgguuugagauuuucccgaagacaagcuccuggcccaaucacgauucaaacaagggugucaccgccgcuuguccucaugcaggggccaaaaguuuuuauaagaaucugaucuggcucgugaaaaagggaaacagcuacccaaaauuaucuaaguccuauauaaaugacaagggcaaagaaguacugguucuuuggggcauccaccaccccucaacgagcgcugaucaacagaguuuguaccagaacgccgacgcguacguguucgucgggacuucucgcuauuccaagaaauuuaagccugagauugcaauccgaccaaaagugcgugaucaggagggaagaaugaauuacuauuggacccugguggaacccggugacaagauuacauucgaggccacuggcaaccuagucguuccuagguacgcuuuugccauggaacggaacgcagggagcggaaucauaauuucggauaccccaguguaugacugcaauacaaccugucaaacgccgaaaggcgcuaucaacacuucucuccccuuccagaauauucauccuaucacaaucgguaagugcccaaaguacguaaaauccaccaagcugcgccuugccacugggcugagaaacgugcccucaauucagaguaggggauuguuuggcgcgauagccggcuucaucgaagggggauggacagguauggucgacggcugguauggguaccaccaucagaaugaacaaggaagcggcuacgcagcugaucucaaauccacccagaacgccauugacgagaucacgaauaaggugaacucuguuauagagaaaaugaauacccaguuuacagcuguggguaaggaguucaaccaccuggaaaagcggauugaaaauuuaaacaaaaaggucgaugacggguuccuggauaucuggacuuauaaugccgagcuccuugugcuguuggaaaacgagcgcacccuagacuaccacgauagcaauguaaagaaccuguaugagaagguucgaucacagcucaaaaacaaugcaaaggaaaucggcaacggauguuuugaguucuaccauaagugcgacaauacauguauggaaagugugaaaaacggcacuuaugauuacccuaaguauuccgaggaagccaaacugaauagagaggagauugacggggucaaacuugaaagcaccaggaucuaccaaauucuggcuauauacucuacaguggcgucaaguuugguccucgugguuagccugggagcaaucuccuuuuggaugugcucuaacgguucguuacagugccggauuuguaucuga

SEQ ID NO: 131862 - RNA, 1701 nt, Artificial Sequence; identical to SEQ ID NO: 130717
  derived and/or modified CDS sequence (opt3) from hemagglutinin__InfluenzaA__ACZ95927

SEQ ID NO: 131863 - RNA, 1701 nt, Artificial Sequence
  derived and/or modified CDS sequence (opt3) from hemagglutinin__InfluenzaA__ACZ95937
auggaggccauccuggugguccuccuuuacaccuucgcuacagcaaacgccgacacucugugcauuggcuaucacgcgaauaacagcacggauaccguugacacaguguuggaaaagaauguaacugugacccauuccgucaacuuacuggaggauaaacacaaugggaagcuauguaaacucagaggaguggcuccccugcaucuugguaagugcaacauagccggcuggauccuggggaauccugaaugugagucuuugucaacagcaaguagcugguccuacauuguugaaaccucuucgucagacaacggaacuugcuauccaggcgauuuuaucgacuacgaggagcucagggaacagcugagcaguguguccucuuucgagcgguuugaaauuuucccgaaaacaagcuccuggcccaaucacgauucaaacaagggugucaccgccgcuuguccucaugcaggggccaagaguuuuuauaaaaaucugaucuggcucgugaagaaaggaaacagcuacccaaaguuaucuaaauccuauauaaaugacaagggcaaggagguacugguucuuuggggcauccaccaccccucaacgaacgcugaucaacagagcuuguaccagaaugccgacgcguacguguucgucgggaguucucgcuauuccaaaaaguuuaaaccugagauugcaauccgaccaaaggugcgugaucaggaaggaagaaugaacuacuauuggacucugguggagcccggugacaaaauuaccuucgaagccacaggcaaccuagucguuccuagguacgcuuuugccauggagcggaaugcagggagcggaaucauaauuucggauacuccagugcaugacugcaacaccacaugucaaaccccgaagggcgcuaucaauacgucucuccccuuccacaacauucauccuaucacuaucgguaaaugcccaaaguauguaaaguccacaaaacugcgccuugccaccgggcugagaaaugugcccucaauucagaguaggggauuguuuggcgcgauagccggcuucaucgaagggggauggacugguauggucgacggcugguacggguaucaccaccagaacgagcagggaagcggcuacgcagcugaucucaaguccacacaaaaugccauugacgagaucaccaacaaaguuaauucugugauagaaaagaugaacacgcaguuuaccgcuguggguaaagaguucaaucaucuggaaaagcggauugagaacuuaaauaagaaagucgaugacggguuccuggauaucuggacauacaacgccgaacuccuugugcuguuggagaaugagcgcacucuagacuaucacgauagcaacguaaagaaccuguacgaaaaaguucgaucacagcucaagaauaacgcaaaagagaucggcaauggauguuuugaguucuaucauaagugcgacaacaccuguauggaaagugugaagaauggcacauacgauuauccuaaauacuccgaagaggccaagcugaacagagaggaaauugacggggucaaacuugagagcacuaggaucuaucagauucuggcuauauacucuaccguggcgucaaguuugguccucgugguuagccugggagcaaucuccuuuuggaugugcucuaaugguucguuacaaugccggauuuguaucuga

SEQ ID NO: 131864 - RNA, 1701 nt, Artificial Sequence; identical to SEQ ID NO: 130959
  derived and/or modified CDS sequence (opt3) from hemagglutinin__InfluenzaA__ACZ95947

SEQ ID NO: 131865 - RNA, 1701 nt, Artificial Sequence; identical to SEQ ID NO: 130717
  derived and/or modified CDS sequence (opt3) from hemagglutinin__InfluenzaA__ACZ95957

SEQ ID NO: 131866 - RNA, 1701 nt, Artificial Sequence; identical to SEQ ID NO: 130959
  derived and/or modified CDS sequence (opt3) from hemagglutinin__InfluenzaA__ACZ95967

SEQ ID NO: 131867 - RNA, 1701 nt, Artificial Sequence; identical to SEQ ID NO: 131863
  derived and/or modified CDS sequence (opt3) from hemagglutinin__InfluenzaA__ACZ95977

SEQ ID NO: 131868 - RNA, 1701 nt, Artificial Sequence
  derived and/or modified CDS sequence (opt3) from hemagglutinin__InfluenzaA__ACZ95987
augaaggccauccuggugguccuccuuuacaccuucgcuacagcaaacgccgacacucugugcauuggcuaucacgcgaauaacagcacggauaccguugacacaguguuggagaaaaauguaacugugacccauuccgucaacuuacuggaagauaagcacaaugggaaacuauguaagcucagaggaguggcuccccugcaucuugguaaaugcaacauagccggcuggauccuggggaauccugagugugaaucuuugucaacagcaaguagcugguccuacauuguugagaccucuucgucagacaacggaacuugcuauccaggcgauuuuaucgacuacgaggagcucagggagcagcugagcaguguguccucuuucgaacgguuugagauuuucccgaagacaagcuccuggcccaaucacgauucaaacaagggugucaccgccgcuuguccucaugcaggggccaaaaguuuuuauaagaaucugaucuggcucgugaaaaagggaaacagcuacccaaaauuaucuaaguccuauauaaaugacaagggcaaagaaguacugguucuuuggggcauccaccaccccucaacgagcgcugaucaacagaguuuguaccagaacgccgacgcguacguguucgucgggacuucucgcuauuccaagaaauuuaagccugagauugcaauccgaccaaaagugcgugaucaggagggaagaaugaauuacuauuggacccugguggaacccggugacaagauuacauucgaggccacuggcaaccuagucguuccuagguacgcuuuugccauggaacggaacgcagggagcggaaucauaauuucggauaccccagugcaugacugcaauacaaccugucaaacgccgaaaggcgcuaucaacacuucucuccccuuccagaauauucacccuaucacaaucgguaagugcccaaaguauguaaaauccaccaagcugcgccuugccacugggcugagaaacauucccucaauacagaguaggggauuguuuggcgcgaucgccggcuucauugaagggggauggacagguaugaucgacggcugguacggguaucaucaccagaaugaacaaggaagcggcuacgcagcugaucucaaauccacccagaacgccauagacgagauuacgaauaaggugaacucugucaucgagaaaaugaauacccaguuuacagcuguggguaaggaguucaaccaccuggaaaagcggaucgaaaauuuaaacaaaaagguugaugacggguuccuggauauuuggacuuacaaugccgagcuccuugugcuguuggaaaacgagcgcacccuagacuaucaugauagcaaugucaaaaaccuguacgagaaggugcgaucacagcucaaaaacaaugcaaaggaaaucggcaacggauguuuugaguucuaucacaagugcgacaauacauguauggaaaguguaaagaacggcacuuacgauuauccuaaguacuccgaggaagccaaacugaauagagaggagauugacgggguuaaacuugaaagcaccaggauauaucaaauccuggcuauuuacucuacaguggcgucaaguuugguccucguggucagccugggagcaaucuccuuuuggaugugcucuaacgguucguuacagugccggaucuguauuuga

SEQ ID NO: 131869 - RNA, 1701 nt, Artificial Sequence; identical to SEQ ID NO: 130717
  derived and/or modified CDS sequence (opt3) from hemagglutinin__InfluenzaA__ACZ95997

SEQ ID NO: 131870 - RNA, 1701 nt, Artificial Sequence; identical to SEQ ID NO: 130717
  derived and/or modified CDS sequence (opt3) from hemagglutinin__InfluenzaA__ACZ96007

SEQ ID NO: 131871 - RNA, 1701 nt, Artificial Sequence; identical to SEQ ID NO: 130704
  derived and/or modified CDS sequence (opt3) from hemagglutinin__InfluenzaA__ACZ96017

SEQ ID NO: 131872 - RNA, 1701 nt, Artificial Sequence; identical to SEQ ID NO: 130717
  derived and/or modified CDS sequence (opt3) from hemagglutinin__InfluenzaA__ACZ96027

SEQ ID NO: 131873 - RNA, 1701 nt, Artificial Sequence; identical to SEQ ID NO: 131863
  derived and/or modified CDS sequence (opt3) from hemagglutinin__InfluenzaA__ACZ96047

SEQ ID NO: 131874 - RNA, 1701 nt, Artificial Sequence
  derived and/or modified CDS sequence (opt3) from hemagglutinin__InfluenzaA__ACZ96057
augaaggccauccuggugguccuccuuuacaccuucgcuacagcaaacgccgacacucugugcauuggcuaucacgcgaauaacagcacggauaccguugacacaguguuggagaaaaauguaacugugacccauuccgucaacuuacuggaagauaagcacaaugggaaacuauguaagcucagaggaguggcuccccugcaucuugguaaaugcaacauagccggcuggauccuggggaauccugagugugaaucuuugucaacagcaaguagcugguccuacauuguugagaccucuucgucagacaacggaacuugcuauccaggcgauuuuaucgacuacgaggagcucagggagcagcugagcaguguguccucuuucgaacgguuugagauuuucccgaagacaagcuccuggcccaaucacgauucaaacaagggugucaccgccgcuugucugcaugcaggggccaaaaguuuuuauaagaaucucaucugguuagugaaaaagggaaacagcuacccuaaacugucuaaguccuauauaaaugacaagggcaaagaaguacuuguuuuguggggcauccaccacccaucaacgagcgcugaucaacagagucuguaccagaacgccgacgcguacguguucgucgggacuucucgcuauuccaagaaauuuaagcccgagauugcaauccgaccuaaagugcgugaucaggagggaagaaugaauuacuauuggacccuaguggaaccaggugacaagauuacauucgaggccacuggcaaccucgucguucccagguacgcuuuugccauggaacggaacgcagggagcggaaucauaauuucggauaccccugugcaugacugcaauacaaccugucaaacgccaaaaggcgcuaucaacacuucucugccguuccagaauauucaccccaucacaaucgguaagugcccuaaguauguaaaauccaccaaacuucgccuggccacuggguugagaaacauuccaucaauacagaguaggggacucuuuggcgcgaucgccggcuucauugaagggggauggacagguaugguggacggcugguacggguaucaucaccagaaugaacaaggaagcggcuacgcagcugaucugaaguccacccagaacgccaucgacgagauaacgaauaaggucaacucugugauugagaaaaugaauacccaguuuacagcuguugguaaggaguucaaccacuuagaaaagcggaucgaaaaucugaacaaaaagguggaugacggguuccucgauaucuggacuuacaaugccgagcuucuggucuugcuagaaaacgagcgcacccuggacuaucaugauagcaaugugaaaaaccucuacgagaagguacgaucacagcugaaaaacaaugcaaaggaaauuggcaacggauguuuugaguucuaucacaagugcgacaauacauguauggaaaguguuaaaaacggcacuuacgauuaucccaaguacuccgaggaagccaaacuuaauagagaggagaucgacggggugaagcuggaaagcaccaggauuuaucaaauauuggcuaucuacucuacagucgcgucaagucucgugcuggucgugagcuuaggagcaauuuccuuuuggaugugcucuaacgguucgcugcagugccggaucuguaucuga

SEQ ID NO: 131875 - RNA, 1701 nt, Artificial Sequence
  derived and/or modified CDS sequence (opt3) from hemagglutinin__InfluenzaA__ACZ96069
augaaggccauccuggugguccuccuuuacaccuucgcuacagcaaacgccgacacucugugcauuggcuaucacgcgaauaacagcacggauaccguugacacaguguuggagaagaauguaacugugacccauuccgucaacuuacuggaagauaagcacaaugggaaacuauguaagcucagaggaguggcuccccugcaucuugguaaaugcaacauagccggcuggauccuggggaauccugagugugaaucuuugucaacagcaaguagcugguccuacauuguugagaccucuucgucagacaacggaacuugcuauccaggcgauuuuaucgacuacgaggagcucagggagcagcugagcaguguguccucuuucgaacgguuugagauuuucccgaagacaagcuccuggcccaaucacgauucaaacaagggugucaccgccgcuuguccucaugcaggggccaaaaguuuuuauaagaaucugaucuggcucgugaaaaagggaaacagcuacccaaaauuaucuaaguccuauauaaaugacaagggcaaagaaguacugguucuuuggggcauccaccaccccucaacgagcgcugaucaacagaguuuguaccagaacgccgacgcguacguguucgucgggacuucucgcuauuccaagaaauuuaagccugagauugcaauccgaccaaaagugcgugaucaggagggaagaaugaauuacuauuggacccugguggaacccgguaacaagauuacauucgaggccacuggcaaccuagucguuccuagguacgcuuuugccauggaacggaaugcagggagcggaaucauaauuucggacaccccagugcaugauugcaacacaaccugucaaacgccgaaaggcgcuaucaauacuucucuccccuuccagaacauucacccuaucacaaucgguaagugcccaaaguauguaaaauccaccaagcugcgccuugccacugggcugagaaaugugcccucaauucagaguaggggauuguuuggcgcgauagccggcuucaucgaagggggauggacagguauggucgacggcugguacggguaucaucaccagaacgaacaaggaagcggcuacgcagcugaccucaaauccacccagaaugccauugaugagaucacgaacaagguaaauucuguuauagagaaaaugaacacccaguuuacagcuguggguaaggaguucaaucaccuggaaaagcggauugaaaacuuaaauaaaaaggucgacgauggguuccuggacaucuggacuuacaacgccgagcuccuugugcuguuggaaaaugagcgcacccuagauuaucaugacagcaacgugaaaaaccuguacgagaagguucgaucacagcucaaaaauaacgcaaaggaaaucggcaauggauguuuugaguucuaucacaagugcgauaacacauguauggaaagugugaaaaauggcacuuacgacuauccuaaguacuccgaggaagccaaacugaacagagaggagauugauggggucaaacuugaaagcaccaggaucuaucaaauucuggcuauauacucuacaguggcgucaaguuugguccucgugguuagccugggagcaaucuccuuuuggaugugcucuaaugguucguuacagugccggauuuguaucuga

SEQ ID NO: 131876 - RNA, 1701 nt, Artificial Sequence; identical to SEQ ID NO: 131863
  derived and/or modified CDS sequence (opt3) from hemagglutinin__InfluenzaA__ACZ96089

SEQ ID NO: 131877 - RNA, 1701 nt, Artificial Sequence
  derived and/or modified CDS sequence (opt3) from hemagglutinin__InfluenzaA__ACZ96119
augaaggccauccuggugguccuccuuuacaccuucgcuacagcaaacgccgacacucugugcauuggcuaucacgcgaauaacagcacggauaccguugacacaguguuggagaaaaauguaacugugacccauuccgucaacuuacuggaagauaagcacaaugggaaacuauguaagcucagaggaguggcuccccugcaucuugguaaaugcaacauagccggcuggauccuggggaauccugagugugaaucuuugucaacagcaaguagcugguccuacauuguugagaccucuucgucagacaacggaacuugcuauccaggcgauuuuaucgacuacgaggagcucagggagcagcugagcaguguguccucuuucgaacgguuugagauguucccgaagacaagcuccuggcccaaucacgauucaaacaagggugucaccgccgcuuguccucaugcaggggccaaaaguuuuuauaagaaucugauuuggcucgugaaaaagggaaacagcuacccaaaauuaucuaaguccuauaucaaugacaagggcaaagaaguacugguucuuuggggcauacaccaccccucaacgagcgcugaucaacagaguuuguaccagaacgccgacgcguacguguucgucgggacuucucgcuauuccaagaaauuuaagccugagaucgcaauucgaccaaaagugcgugaucaggagggaagaaugaauuacuauuggacccugguggaacccggugacaagaucacauucgaggccacuggcaaccuagucguuccuagguacgcuuuugccauggaacggaacgcagggagcggaauuaucauaucggauaccccagugcaugacugcaauacaaccugucaaacgccgaaaggcgcuauuaacacuucucuccccuuccagaauauccacccuauuacaaucgguaagugcccaaaguauguaaaauccaccaagcugcgccuugccacugggcugagaaacgugcccucaauccagaguaggggauuguuuggcgcgauugccggcuucauagaagggggauggacagguauggucgacggcugguacggguaucaucaccagaaugaacaaggaagcggcuacgcagcugaucucaaauccacccagaacgccaucgacgagauuacgaauaaggugaacucuguuaucgagaaaaugaauacccaguuuacagcuguggguaaggaguucaaccaccuggaaaagcggauagaaaauuuaaacaaaaaggucgaugacggguuccuggauauuuggacuuacaaugccgagcuccuugugcuguuggaaaacgagcgcacccuagacuaucaugauagcaauguaaagaaccuguacgagaagguucgaucacagcucaaaaacaaugcaaaggaaaucggcaacggauguuuugaguucuaucacaagugcgacaauacauguauggaaagugugaaaaacggcacuuacgauuauccuaaguacuccgaggaagccaaacugaauagagaggagaucgacggggucaaacuugaaagcaccaggauuuaucaaauccuggcuauuuacucuacaguggcgucaaguuugguccucgugguuagccugggagcaauauccuuuuggaugugcucuaacgguucguuacagugccggaucuguauuuga

SEQ ID NO: 131878 - RNA, 1701 nt, Artificial Sequence
  derived and/or modified CDS sequence (opt3) from hemagglutinin__InfluenzaA__ACZ96129
augaaggccauccuggugguccuccuuuacaccuucgcuacagcaaacgccgacacucugugcauuggcuaucacgcgaauaacagcacggauaccguugacacaguguuggagaaaaauguaacugugacccauuccgucaacuuacuggaagauaagcacaaugggaaacuauguaagcucagaggaguggcuccccugcaucuugguaaaugcaacauagccggcuggauccuggggaauccugagugugaaucuuugucaacagcaaguagcugguccuacauuguugagaccucuucgucagacaacggaacuugcuauccaggcgaauuuaucgauuacgaggagcucagggaacagcugagcaguguguccucuuucgagcgguuugaaauuuucccgaagacaagcuccuggcccaaucacgacucaaacaagggugucaccgccgcuuguccucaugcaggggccaaaaguuuuuauaagaaucugaucuggcucgugaaaaagggaaacagcuacccaaaauuaucuaaguccuauauaaaugauaagggcaaagagguacugguucuuuggggcauccaccaccccucaacgagcgcugaccaacagaguuuguaccagaacgccgaugcguacguguucgucgggacuucucgcuauuccaagaaauuuaagccugagauugcaauccgaccaaaagugcgugaccaggaaggaagaaugaauuacuauuggacccugguggagcccggugauaagauuacauucgaagccacuggcaaccuagucguuccuagguacgcuuuugccauggagcggaacgcagggagcggaaucauaauuucggacaccccagugcaugauugcaauacaaccugucaaacgccgaaaggcgcuaucaacacuucucuccccuuccagaauauucacccuaucacaaucgguaagugcccaaaguauguaaaauccaccaagcugcgccuugccacugggcugagaaacgugcccucaauucagaguaggggauuguuuggcgcgauagccggcuucaucgaagggggauggacagguauggucgacggcugguacggguaucaucaccagaaugagcaaggaagcggcuacgcagcugaccucaaauccacccagaacgccauugaugagaucacgaauaaggugaacucuguuauagaaaagaugaauacccaguuuacagcuguggguaaggaguucaaccaccuggaaaagcggauugagaauuuaaacaaaaaggucgacgauggguuccuggacaucuggacuuacaaugccgaacuccuugugcuguuggagaacgagcgcacccuagauuaucaugacagcaauguuaaaaaccuguacgaaaagguacgaucacagcucaaaaacaaugcaaaggagaucggcaacggauguuuugaguucuaucacaagugcgauaauacauguauggaaagugugaaaaacggcacuuacgacuauccuaaguacuccgaagaggccaaacugaauagagaggaaauugauggggucaaacuugagagcaccaggaucuaucaaauucuggcuauauacucuacaguggcgucaaguuugguccucgugguuagccugggagcaaucuccuuuuggaugugcucuaacgguucguuacagugccggauuuguaucuga

SEQ ID NO: 131879 - RNA, 1701 nt, Artificial Sequence; identical to SEQ ID NO: 130717
  derived and/or modified CDS sequence (opt3) from hemagglutinin__InfluenzaA__ACZ96149

SEQ ID NO: 131880 - RNA, 1701 nt, Artificial Sequence; identical to SEQ ID NO: 130717
  derived and/or modified CDS sequence (opt3) from hemagglutinin__InfluenzaA__ACZ96159

SEQ ID NO: 131881 - RNA, 1701 nt, Artificial Sequence
  derived and/or modified CDS sequence (opt3) from hemagglutinin__InfluenzaA__ACZ96179
augaaggccauccuggugguccuccuuuacaccuucgcuacagcaaacgccgacacucugugcauuggcuaucacgcgaauaacagcacggauaccguugacacaguguuggagaaaaauguaacugugacccauuccgucaacuuacuggaagauaagcacaaugggaaacuauguaagcucagaggaguggcuccccugcaucuugguaaaugcaacauagccggcuggauccuggggaauccugagugugaaucuuugucaacagcaaguagcugguccuacauuguugagaccucuucgucagacaacggaacuugcuauccaggcgauuuuaucgacuacgaggagcucagggagcagcugagcaguguguccucuuucgaacgguuugagauuuucccgaagacaagcuccuggcccaaucacgauucaaacaagggugucaccgccgcuuguccucaugcaggggccaaaaguuuuuauaagaaucugaucuggcucgugaaaaagggaaacagcuacccaaaauuaucuaaguccuauauaaaugacaagggcaaagaaguacugguucuuuggggcauccaccaccccucaacgagcgcugaucaacagaguuuguaccagaacgccgacgcguacguguucgucgggacuucucgcuauuccaagaaauuuaagccugagauugcaauccgaccaaaagugcgugaucaggagggaagaaugaauuacuauuggacccugguggaacccggugacaagauuacauucgaggccacuggcaaccuagucguuccuagguacgcuuuugccauggaacggaacgcagggagcggaaucauaauuucggauaccccagugcaugacugcaauacaaccugucaaacgccgaaaggcgcuaucaacacuucucuccccuuccagaauauucacccuaucacaaucgguaagugcccaaaguauguaaaauccaccaagcugcgccuugccacugggcugagaaacgugcccucaauucagaguaggggauuguuuggcgcgauagccggcuucaucgaagggggauggacagguauggucgacggcugguacggguaucaucaccagaaugaacaaggaagcggcuacgcagcugaucucaaauccacccagaacgccauugacaagaucacgaauaaagugaacucuguuauagagaagaugaauacccaguuuacagcuguggguaaggaguucaaccaccuggaaaaacggauugagaauuuaaacaagaaagucgaugacggguuccuggauaucuggacuuacaaugccgaacuccuugugcuguuggagaacgaacgcacccuagacuaucaugauagcaauguaaagaaccuguacgagaaaguucgaucacagcucaagaacaaugcaaaggagaucggcaacggauguuuugaguucuaucacaaaugcgacaauacauguauggaaagugugaagaacggcacuuacgauuauccuaaauacuccgaagaggccaagcugaauagagaagagauugacggggucaaacuugagagcaccaggaucuaucaaauucuggcuauauacucuacaguggcgucaaguuugguccucgugguuagccugggagcaaucuccuuuuggaugugcucuaacgguucguuacagugccggauuuguaucuga

SEQ ID NO: 131882 - RNA, 1701 nt, Artificial Sequence; identical to SEQ ID NO: 131874
  derived and/or modified CDS sequence (opt3) from hemagglutinin__InfluenzaA__ACZ96189

SEQ ID NO: 131883 - RNA, 1701 nt, Artificial Sequence; identical to SEQ ID NO: 131881
  derived and/or modified CDS sequence (opt3) from hemagglutinin__InfluenzaA__ACZ96199

SEQ ID NO: 131884 - RNA, 1701 nt, Artificial Sequence; identical to SEQ ID NO: 130717
  derived and/or modified CDS sequence (opt3) from hemagglutinin__InfluenzaA__ACZ96209

SEQ ID NO: 131885 - RNA, 1701 nt, Artificial Sequence
  derived and/or modified CDS sequence (opt3) from hemagglutinin__InfluenzaA__ACZ96219
augaaggccauccuggugguccuccuuuacaccuucgcuacagcaaacgccgacacucugugcauuggcuaucacgcgaauaacagcacggauaccguugacacaguguuggagaaaaauguaacugugacccauuccgucaacuuacuggaagauaagcacaaugggaaacuauguaagcucagaggaguggcuccccugcaucuugguaaaugcaacauagccggcuggauccuggggaauccugagugugaaucuuugucaacagcaaguagcugguccuacauuguugagaccucuucgucagacaacggaacuugcuauccaggcgauuuuaucgacuacgaggagcucagggagcagcugagcaguguguccucuuucgaacgguuugagauuuucccgaagacaagcuccuggcccaaucacgauucaaacaagggugucaccgccgcuuguccucaugcaggggccaaaaguuuuuauaagaaucugaucuggcucgugaaaaagggaaacagcuacccaaaauuaucuaaguccuauauaaaugacaagggcaaagaaguacugguucuuuggggcauccaccaccccucaacgagcgcugaucaacagaguuuguaccagaacgccgacgcguacguguucgucgggacuucucgcuauuccaagaaauuuaagccugagauugcaauccgaccaaaagugcgugaucaggagggaagaaugaauuacuauuggacccugguggaacccggugacaagauuaaauucgaggccacaggcaaccuagucguuccuagguacgcuuuugccauggaacggaacgcagggagcggaaucauaauuucggauacuccagugcaugacugcaauaccacaugucaaaccucuaagggcgcuaucaacacgucccucccguuccagaauauucaccccaucacuaucgguaagugcccuaaauauguaaagucaacaaaacugcgccuugccaccgggcugagaaacgugccaaguauucagagcaggggauuguuuggcgcgauagccggcuucaucgaagggggauggacugguauggucgacggcugguacggguaucaucaccagaaugaacaaggauccggcuacgcagcugaucucaagucuacacagaacgccauugacgagaucaccaauaaagugaacagcguuauagagaagaugaauacgcaguuuaccgcuguggguaaggaguucaaccaccuggaaaaacggauugaaaauuuaaacaagaaagucgaugacggguuccuggauaucuggacauacaaugccgagcuccuugugcuguuggaaaacgagcgcacucuagacuaucaugauucaaauguaaagaaccuguacgagaaaguucgaagucagcucaagaacaaugcaaaggaaaucggcaacggauguuuugaguucuaucacaaaugcgacaauaccuguauggaauccgugaagaacggcacauacgauuaucccaaauacagcgaggaagccaagcugaauagagaggagauugcuggggucaaacuugaaucuacuaggaucuaucaaauucuggcgauauacucaaccguggcaaguagcuugguccucgugguuucccugggagccaucucuuuuuggaugugcucgaacgguagcuuacagugccggauuuguaucuga

SEQ ID NO: 131886 - RNA, 1701 nt, Artificial Sequence; identical to SEQ ID NO: 130717
  derived and/or modified CDS sequence (opt3) from hemagglutinin__InfluenzaA__ACZ96229

SEQ ID NO: 131887 - RNA, 1701 nt, Artificial Sequence; identical to SEQ ID NO: 131881
  derived and/or modified CDS sequence (opt3) from hemagglutinin__InfluenzaA__ACZ96239

SEQ ID NO: 131888 - RNA, 1701 nt, Artificial Sequence; identical to SEQ ID NO: 130717
  derived and/or modified CDS sequence (opt3) from hemagglutinin__InfluenzaA__ACZ96249

SEQ ID NO: 131889 - RNA, 1701 nt, Artificial Sequence
  derived and/or modified CDS sequence (opt3) from hemagglutinin__InfluenzaA__ACZ96269
augaaggccauccuggugguccuccuuuacaccuucgcuacagcaaacgccgacacucugugcauuggcuaucacgcgaauaacagcacggauaccguugacacaguguuggagagaaauguaacugugacccauuccgucaacuuacuggaagauaaacacaaugggaagcuauguaaacucaggggaguggcuccccugcaucuugguaagugcaacauagccggcuggauccuggggaauccugagugugaaucuuugucaacagcaaguagcugguccuacauuguugagaccucuucgucagacaacggaacuugcuauccaggcgauuuuaucgacuacgaggagcuccgggagcagcugagcaguguguccucuuucgaacgcuuugagauuuucccgaaaacaagcuccuggcccaaucacgauucaaacaagggugucaccgccgcuuguccucaugcaggggccaagaguuuuuauaaaaaucugaucuggcucgugaagaaaggaaacagcuacccaaaguuaucuaaauccuauauaaaugacaagggcaaggaaguacugguucuuuggggcauccaccaccccucaacgagcgcugaucaacagaguuuguaccagaacgccgacgcguacguguucgucgggacuucucgauauuccaaaaaguuuaaaccugagauugcaauccguccaaaggugagagaucaggagggaaggaugaauuacuauuggacccugguggaacccggugacaaaauuacauucgaggccacuggcaaccuagucguuccucgguacgcuuuugccauggaacgcaacgcagggagcggaaucauaauuucggauaccccagugcaugacugcaauacaaccugucaaacgccgaagggcgcuaucaacacuucucuccccuuccagaauauucacccuaucacaaucgguaaaugcccaaaguauguaaaguccaccaaacugagacuugccacugggcugaggaacgugcccucaauucagagucggggauuguuuggcgcgauagccggcuucaucgaagggggauggacagguauggucgacggcugguacggguaucaucaccagaaugaacaaggaagcggcuacgcagcugaucucaaguccacccagaacgccauugacgagaucacgaauaaagugaacucuguuauagagaagaugaauacccaguuuacagcuguggguaaagaguucaaccaccuggaaaagcgcauugaaaauuuaaacaagaaagucgaugacggguuccuggauaucuggacuuacaaugccgagcuccuugugcuguuggaaaacgagcgaacccuagacuaucaugauagcaauguaaagaaccuguacgagaaaguuagaucacagcucaagaacaaugcaaaagaaaucggcaacggauguuuugaguucuaucacaagugcgacaauacauguauggaaagugugaagaacggcacuuacgauuauccuaaauacuccgaggaagccaagcugaauagggaggagauugacggggucaaacuugaaagcacccggaucuaucaaauucuggcuauauacucuacaguggcgucaaguuugguccucgugguuagccugggagcaaucuccuuuuggaugugcucuaacgguucguuacagugccguauuuguaucuga

SEQ ID NO: 131890 - RNA, 1701 nt, Artificial Sequence; identical to SEQ ID NO: 130717
  derived and/or modified CDS sequence (opt3) from hemagglutinin__InfluenzaA__ACZ96299

SEQ ID NO: 131891 - RNA, 1701 nt, Artificial Sequence; identical to SEQ ID NO: 130717
  derived and/or modified CDS sequence (opt3) from hemagglutinin__InfluenzaA__ACZ96309

SEQ ID NO: 131892 - RNA, 1701 nt, Artificial Sequence
  derived and/or modified CDS sequence (opt3) from hemagglutinin__InfluenzaA__ACZ96319
augaaggccauccuggugguccuccuuuacaccuucgcuacagcaaacgccgacacucugugcauuggcuaucacgcgaauaacagcacggauaccguugacacaguguuggagaaaaauguaacugugacccauuccgucaacuuacuggaagauaagcacaaugggaaacuauguaagcucagaggaguggcuccccugcaucuugguauaugcaacaucgccggcuggauucuggggaauccugagugugaaucuuugucaacagcaaguagcugguccuacaucguugagaccucuucgucagacaacggaacuugcuauccaggcgauuuuauugacuacgaggagcucagggagcagcugagcaguguguccucuuucgaacgguuugagaucuucccgaaaacaagcuccuggcccaaucacgauucaaacaagggugucaccgccgcuuguccucaugcaggggccaagaguuuuuauaaaaaucugauauggcucgugaagaaaggaaacagcuacccaaaguuaucuaaauccuauaucaaugacaagggcaaggaaguacugguucuuuggggcauucaccaccccucaacgagcgcugaucaacagaguuuguaccagaacgccgacgcguacguguucgucgggacuucucgcuauuccaaaaaguuuaaaccugagaucgcaauucgaccaaaggugcgugaucaggagggaagaaugaauuacuauuggacccugguggaacccggugacaaaaucacauucgaggccacuggcaaccuagucguuccuagguacgcuuuugccauggaacggaacgcagggagcggaauaauuaucucggauaccccagugcaugacugcaauacaaccugucaaacgccgaagggcgcuauuaacacuucucuccccuuccagaauauccacccuaucacaauugguaaaugcccaaaguauguaaaguccaccaaacugcgccuugccacugggcugagaaacgugcccucaauacagaguaggggauuguuuggcgcgaucgccggcuucauugaagggggauggacagguauggucgacggcugguacggguaucaucaccagaaugaacaaggaagcggcuacgcagcugaucucaaguccacccagaacgccaucgacgagauaacgaauaaagugaacucuguuauugagaagaugaauacccaguuuacagcuguggguaaagaguucaaccaccuggaaaagcggaucgaaaauuuaaacaagaaagucgaugacggguuccuggauaucuggacuuacaaugccgagcuccuugugcuguuggaaaacgagcgcacccuagacuaucaugauagcaauguaaagaaccuguacgagaaaguucgaucacagcucaagaacaaugcaaaagaaauuggcaacggauguuuugaguucuaucacaagugcgacaauacauguauggaaagugugaagaacggcacuuacgauuauccuaaauacuccgaggaagccaagcugaauagagaggagaucgacggggucaaacuugaaagcaccaggauuuaucaaauacuggcuaucuacucuacaguggcgucaaguuugguccucgugguuagccugggagcaauuuccuuuuggaugugcucuaacgguucguuacagugccggaucuguaucuga

SEQ ID NO: 131893 - RNA, 1701 nt, Artificial Sequence; identical to SEQ ID NO: 131892
  derived and/or modified CDS sequence (opt3) from hemagglutinin__InfluenzaA__ACZ96329

SEQ ID NO: 131894 - RNA, 1701 nt, Artificial Sequence
  derived and/or modified CDS sequence (opt3) from hemagglutinin__InfluenzaA__ACZ96339
augaaggccauccuggugguccuccuuuacaccuucgcuacagcaaacgccgacacucugugcauuggcuaucacgcgaauaacagcacggauaccguugacacaguguuggagaaaaauguaacugugacccauuccgucaacuuacuggaagauaagcacaaugggaaacuauguaagcucagaggaguggcuccccugcaucuugguaaaugcaacauagccggcuggauccuggggaauccugagugugaaucuuugucaacagcaaguagcugguccuacauuguugagaccucuucgucagacaacggaacuugcuauccaggcgauuuuaucgacuacgaagaacucagggagcagcugagcaguguguccucuuucgaacgguuugagauuuucccgaagacaagcuccuggcccaaucacgauucaaacaagggugucaccgccgcuuguccucaugcaggggccaaaaguuuuuauaagaaucugaucuggcucgugaaaaagggaaacagcuacccaaaauuaucuaaguccuauauaaaugacaagggcaaagaaguacugguucuuuggggcauccaccaccccucaacgagcgcugaucaacagaguuuguaccagaacgccgacucuuacguguucgucgggacuucccgcuauagcaagaaauuuaagccugagauugcgauccgaccaaaagugcgugaucaggagggaagaaugaauuacuauuggacccugguggaacccggugacaagauuacauucgaggcaacuggcaaccuagucguuccuagguacgccuuugcuauggaacggaacgccgggucgggaaucauaauuucugauaccccagugcaugacugcaauacaaccugucaaacgccggagggcgcaaucaacacuucccuccccuuccagaauauucacccuaucacaaucgguaaaugcccaaaguauguaaagucaaccaaacugcgccuugcuacugggcugagaaacgugcccaguauucagagcaggggauuguuuggcgccauagcgggcuucaucgaagggggauggacagguauggucgacggcugguacggguaucaucaccagaaugagcaaggauccggcuacgccgcagaucucaagucuacccagaacgcuauugacgagaucacgaauaaagugaacagcguuauaaagaaaaugaauacccaguuuacagccguggguaaggaguucaaccaccuggagaagcggauugaaaauuuaaacaaaaaggucgaugacggguuccuggauaucuggacuuacaaugcugagcuccuugugcuguuggaaaacgagcgcacccuagacuaucaugauucaaauguaaagaaccuguacgagaagguucgaagucagcucaaaaacaaugccaaggaaaucggcaacggauguuuugaguucuaucacaagugcgacaauacauguauggaauccgugaaaaacggcacuuacgauuauccuaaguacagcgaggaagcaaaacugaauagagaggagauugacggggucaaacuugaaucuaccaggaucuaucaaauucuggccauauacucaacaguggcuaguagcuugguccucgugguuucccugggagcgaucucuuuuuggaugugcucgaacgguagcuuacagugccggauuuguaucuga

SEQ ID NO: 131895 - RNA, 1701 nt, Artificial Sequence; identical to SEQ ID NO: 130717
  derived and/or modified CDS sequence (opt3) from hemagglutinin__InfluenzaA__ACZ96349

SEQ ID NO: 131896 - RNA, 1701 nt, Artificial Sequence; identical to SEQ ID NO: 131892
  derived and/or modified CDS sequence (opt3) from hemagglutinin__InfluenzaA__ACZ96359

SEQ ID NO: 131897 - RNA, 1701 nt, Artificial Sequence; identical to SEQ ID NO: 130717
  derived and/or modified CDS sequence (opt3) from hemagglutinin__InfluenzaA__ACZ96372

SEQ ID NO: 131898 - RNA, 1701 nt, Artificial Sequence; identical to SEQ ID NO: 131892
  derived and/or modified CDS sequence (opt3) from hemagglutinin__InfluenzaA__ACZ96382

SEQ ID NO: 131899 - RNA, 1701 nt, Artificial Sequence; identical to SEQ ID NO: 130704
  derived and/or modified CDS sequence (opt3) from hemagglutinin__InfluenzaA__ACZ96392

SEQ ID NO: 131900 - RNA, 1701 nt, Artificial Sequence; identical to SEQ ID NO: 130959
  derived and/or modified CDS sequence (opt3) from hemagglutinin__InfluenzaA__ACZ96405

SEQ ID NO: 131901 - RNA, 1701 nt, Artificial Sequence; identical to SEQ ID NO: 130717
  derived and/or modified CDS sequence (opt3) from hemagglutinin__InfluenzaA__ACZ96415

SEQ ID NO: 131902 - RNA, 1701 nt, Artificial Sequence; identical to SEQ ID NO: 130717
  derived and/or modified CDS sequence (opt3) from hemagglutinin__InfluenzaA__ACZ96425

SEQ ID NO: 131903 - RNA, 1701 nt, Artificial Sequence
  derived and/or modified CDS sequence (opt3) from hemagglutinin__InfluenzaA__ACZ96435
augaaggccauccuggugguccuccuuuacaccuucgcuacagcaaacgccgacacucugugcauuggcuaucacgcgaauaacagcacggauaccguugacacaguguuggagaagaauguaacugugacccauuccgucaacuuacuggaagauaagcacaaugggaaacuauguaagcucagaggaguggcucagcugcaucuugguaaaugcaacauagccggcuggauccuggggaaucccgagugugaaucuuugucaacagcaaguagcugguccuacauuguugagaccucuucgucagacaacggaacuugcuauccuggcgauuuuaucgacuacgaggagcucagggagcaacugagcaguguguccucuuucgaacgguuugagauuuucccaaagacaagcuccuggccgaaucacgauucaaacaagggugucaccgccgcuuguccccaugcaggggccaaaaguuuuuauaagaaucugaucuggcucgugaaaaagggaaacagcuacccuaaauuaucuaaguccuauauaaaugacaagggcaaagaaguacugguucuuuggggcauccaccacccaucaacgagcgcugaucagcagaguuuguaccagaacgccgacgcguacguguucgucgggacuucucgcuauuccaagaaauuuaagcccgagauugcaauccgaccuaaagugcgugaucaagagggaagaaugaauuacuauuggacccugguggaaccaggugacaagauuacauucgaggccacuggcaaccuaaugguccccagguacgcuuuugccauggaacggaacgcagggagcggaaucauaauuucggauaccccuguucaugacugcaauacaaccugucagacgccaaaaggcgcuaucaacacuucucucccguuccagaauauucaccccaucacaaucgguaagugcccuaaguaugugaaauccaccaagcugcgccuugccacugggcugagaaacguaccaucaauucagaguaggggauuguuuggcgcgauagccggcuucaucgaagggggauggacagguaugguggacggcugguacggguaucaucaccaaaaugaacagggaagcggcuacgcagcugaucucaaauccacccagaacgccauugacgagaucacgaauaaggucaacucugugauagagaaaaugaauacccaguuuacagcuguugguaaggaguucaaccaccuggaaaagcggauugaaaauuuaaacaaaaagguggaugacggguuccuggauaucuggacuuacaaugccgagcuccuuguccuguuggaaaacgagcgcacccuagacuaucaugauagcaaugugaaaaaccuguacgagaagguacgaucacaacucaaaaacaaugcaaaggaaaucggcaacggauguuuugaguucuaucacaagugcgacaauacauguauggaaaguguuaaaaacggcacuuacgauuaucccaaguacuccgaggaagccaaacugaauagagaggagauugacggggugaaacuugaaagcaccaggaucuaucagauucuggcuauauacucuacagucgcgucaaguuuggugcucgucgugagccugggagcaaucuccuuuuggaugugcucuaacgguucguuacagugccggauuuguaucuga

SEQ ID NO: 131904 - RNA, 1701 nt, Artificial Sequence; identical to SEQ ID NO: 130717
  derived and/or modified CDS sequence (opt3) from hemagglutinin__InfluenzaA__ACZ96445

SEQ ID NO: 131905 - RNA, 1701 nt, Artificial Sequence
  derived and/or modified CDS sequence (opt3) from hemagglutinin__InfluenzaA__ACZ96476
augaaggccauccuggugguccuccuuuacaccuucgcuacagcauaugccgacacucugugcauuggcuaccacgcgaacaauagcacggauaccguugacacaguguuggagaagaacguaacugugacccauuccgucaauuuacuggaagauaagcacaacgggaaacuauguaagcucagaggaguggcuccccugcaucuugguaaaugcaauauagccggcuggauccuggggaacccugagugugaaucuuugucaacagcaaguagcugguccuauauuguugagaccucuucgucagacaauggaacuugcuacccaggcgauuuuaucgacuaugaggagcucagggagcagcugagcaguguguccucuuucgaacgguuugagauuuucccgaagacaagcuccuggcccaaccacgauucaaauaagggugucaccgccgcuuguccucaugcaggggccaaaaguuuuuacaagaaccugaucuggcucgugaaaaagggaaauagcuauccaaaauuaucuaaguccuacauaaacgacaagggcaaagaaguacugguucuuuggggcauccaccaccccucaacgagcgcugaucaacagaguuuguaccagaaugccgacgcguauguguucgucgggacuucucgcuacuccaagaaauuuaagccugagauugcaauccgaccaaaagugcgugaucaggagggaagaaugaacuauuacuggacccugguggaacccggugacaagauuacauucgaggccacuggcaaucuagucguuccuagguaugcuuuugccauggaacggaacgcagggagcggaaucauaauuucggauaccccagugcaugacugcaacacaaccugucaaacgccgaaaggcgcuaucaauacuucucuccccuuccagaacauucacccuaucacaaucgguaagugcccaaaguacguaaaauccaccaagcugcgccuugccacugggcugagaaaugugcccucaauucagaguaggggauuguuuggcgcgauagccggcuucaucgaagggggauggacagguauggucgacggcugguauggguaccaucaccagaacgaacaaggaagcggcuacgcagcugaucucaaauccacccagaaugccauugacgagaucacgaacaagguaaauucuguuauagagaaaaugaacacccaguuuacagcuguggguaaggaguucaaucaccuggaaaagcggauugaaaacuuaaauaaaaaggucgaugacggguuccuggauaucuggacuuauaacgccgagcuccuugugcuguuggaaaaugagcgcacccuagacuaccaugauagcaacgugaaaaaucuguaugagaagguucgaucacagcucaaaaacaacgcaaaggaaaucggcaauggauguuuugaguucuaccacaagugcgacaacacauguauggaaagugugaaaaauggcacuuaugauuacccuaaguauuccgaggaagccaaacugaacagagaggagauugacggggucaaacuugaaagcaccaggaucuaccaaauucuggcuauauacucuacaguggcgucaaguuugguccucgugguuagccugggagcaaucuccuuuuggaugugcucuaaugguucguuacagugccggauuuguaucuga

SEQ ID NO: 131906 - RNA, 1701 nt, Artificial Sequence; identical to SEQ ID NO: 130717
  derived and/or modified CDS sequence (opt3) from hemagglutinin__InfluenzaA__ACZ96496

SEQ ID NO: 131907 - RNA, 1701 nt, Artificial Sequence; identical to SEQ ID NO: 130717
  derived and/or modified CDS sequence (opt3) from hemagglutinin__InfluenzaA__ACZ96506

SEQ ID NO: 131908 - RNA, 1701 nt, Artificial Sequence; identical to SEQ ID NO: 130717
  derived and/or modified CDS sequence (opt3) from hemagglutinin__InfluenzaA__ACZ96526

SEQ ID NO: 131909 - RNA, 1701 nt, Artificial Sequence
  derived and/or modified CDS sequence (opt3) from hemagglutinin__InfluenzaA__ACZ96536
augaaggccauccuggugguccuccuuuacaccuucgcuacagcaaacgccgacacucugugcauuggcuaucacgcgaauaacagcacggauaccguugacacaguguuggagaaaaauguaacugugacccauuccgucaacauauuagaagauaagcacaaugggaaacuguguaagcuaaaaggaguggcuccccuccaucuggguaagugcaacaucgccggcuggauucuugggaauccugagugugaaucucugucaacagcaaguagcugguccuacaucguugagaccucuucgucagacaacggaacuugcuauccaggcgauuuuauugacuacgaagaguugagagagcagcucagcaguguguccucuuucgaaagguuugagaucuucccgaagacaagcuccuggcccaaucacgauucaaacaaaggugucaccgccgcuuguccucaugcaggggccaagaguuuuuauaaaaaucugauauggcuggugaagaaaggaaacagcuacccaaagcucucuaaguccuauaucaaugacaaaggcaaggaaguauuaguucuguggggcauucaccaccccucaacgagcgcugaucaacagagucuuuaccagaacgccgacacuuacguguucgucgggucuuccaaauauagcaagaaauuuaagccugagaucgcgauucggccaaaagugcgcgaucaggagggacgaaugaauuacuauuggaccuugguggaacccggugacaagaucacauucgaggcaacuggcaaccuggucguuccucguuacgccuuugcuauggaaagaaacgccgggucgggaauaauuaucucugauaccccagugcaugacugcaauacaaccugucaaacgccgaagggcgcaauuaacacuucccuacccuuccagaauauccacccuaucacaauugguaaaugcccaaagcauguaaaaucaaccaagcucaggcuggcuacugggcuucggaacgugcccaguauacagagccgcggacuguuuggcgccaucgcgggcuucauugaagggggauggacagguauggucgacggcugguauggguaccaccaccagaaugaacaaggauccggcuaugccgcagauuugaaaucuacccagaacgcuaucgacgagauaacgaauaaggugaacagcguuauugagaagaugaauacccaguuuacagccguggguaaagaguucaaccaucucgagaagagaaucgaaaaucugaacaaaaaggucgaugacggguucuuagauaucuggacuuacaaugcugagcugcucgugcuucuggaaaacgagaggaccuuggacuaccacgauucaaauguuaaaaaccuauaugagaagguacggagucagcugaagaacaaugccaaagaaauuggcaacggauguuuugaguucuaccauaagugcgacaauacauguauggaauccgugaaaaacggcacuuaugauuacccuaaguauagcgaggaagcaaaacucaaucgcgaggagaucgacggggucaagcuggaaucuacccgaauuuaccaaauacuugccaucuauucaacaguggcuaguagccuggucuuggugguuucccucggagcgauuucuuuuuggaugugcucgaacgguagccugcagugcagaaucuguaucuga

SEQ ID NO: 131910 - RNA, 1701 nt, Artificial Sequence; identical to SEQ ID NO: 130717
  derived and/or modified CDS sequence (opt3) from hemagglutinin__InfluenzaA__ACZ96549

SEQ ID NO: 131911 - RNA, 1701 nt, Artificial Sequence
  derived and/or modified CDS sequence (opt3) from hemagglutinin__InfluenzaA__ACZ96559
augaaggccauccuggugguccuccuuuacaccuucgcuacagcaaacgccgacacucugugcauuggcuaucacgcgaauaacagcacggauaccguugacacaguguuggagaagaauguaacugugacccauuccgucaacuuacuggaagauaagcacaaugggaaacuauguaagcucagaggaguggcuccccugcaucuugguaaaugcaacauagccggcuggauccuggggaauccugagugugaaucuuugucaacagcaaguagcugguccuacauuguugagaccucuucgucagacaacggaacuugcuauccaggcgauuuuaucaauuacgaggagcucagggagcagcugagcaguguguccucuuucgaacgguuugagauuuucccgaagacaagcuccuggcccaaccacgacucaaauaagggugucaccgccgcuuguccucaugcaggggccaaaaguuuuuauaagaaccugaucuggcucgugaaaaagggaaauagcuacccaaaauuaucuaaguccuauauaaacgauaagggcaaagaaguacugguucuuuggggcauccaccaccccucaacgagcgcugaccaacagaguuuguaccagaaugccgaugcguacguguucgucgggacuucucgcuauuccaagaaauuuaagccugagauugcaauccgaccaaaagugcgugaccaggagggaagaaugaacuacuauuggacccugguggaacccggugauaagauuacauucgaggccacuggcaaccuagucguuccuagguacgcuuuugccauggaacggaaugcagggagcggaaucauaauuucggacaccccagugcaugauugcaacacaaccugucaaacgccgaaaggcgcuaucaauacuucucuccccuuccagaacauucacccuaucacaaucgguaagugcccaaaguauguaaaauccaccaagcugcgccuugccacugggcugagaaaugugcccucaauucagaguaggggauuguuuggcgcgauagccggcuucaucgaagggggauggacagguauggucgacggcugguacggguaucaucaccagaacgaacaaggaagcggcuacgcagcugaccucaaauccacccagaaugccauugaugagaucacgaacaagguaaauucuguuauagagaaaaugaacacccaguuuacagcuguggguaaggaguucaaucaccuggaaaagcggauugaaaacuuaaauaaaaaggucgacgauggguuccuggacaucuggacuuacaacgccgagcuccuugugcuguuggaaaaugagcgcacccuagauuaucaugacagcaacgugaaaaaccuguacgagaagguucgaucacagcucaaaaauaacgcaaaggaaaucggcaauggauguuuugaguucuaucacaagugcgauaacacauguauggaaagugugaaaaauggcacuuacgacuauccuaaguacuccgaggaagccaaacugaacagagaggagauugauggggucaaacuugaaagcaccaggaucuaucaaauucuggcuauauacucuacaguggcgucaaguuugguccucgugguuagccugggagcaaucuccuuuuggaugugcucuaaugguucguuacagugccggauuuguaucuga

SEQ ID NO: 131912 - RNA, 1701 nt, Artificial Sequence
  derived and/or modified CDS sequence (opt3) from hemagglutinin__InfluenzaA__ACZ96569
auggaggccauccuggugguccuccuuuacaccuucgcuacagcaaacgccgacacucugugcauuggcuaucacgcgaauaacagcacggauaccguugacacaguguuggaaaagaauguaacugugacccauuccgucaacuuacuggaggauaaacacaaugggaagcuauguaaacucagaggaguggcuccccugcaucuugguaagugcaacauagccggcuggauccuggggaauccugaaugugagucuuugucaacagcaaguagcugguccuacauuguugaaaccucuucgucagacaacggaacuugcuauccaggcgauuuuaucaauuacgaggagcucagggaacagcugagcaguguguccucuuucgagcgguuugaaauuuucccgaaaacaagcuccuggcccaaccacgacucaaauaagggugucaccgccgcuuguccucaugcaggggccaagaguuuuuauaaaaaccugaucuggcucgugaagaaaggaaauagcuacccaaaguuaucuaaauccuauauaaacgauaagggcaaggagguacugguucuuuggggcauccaccaccccucaacgagcgcugaccaacagaguuuguaccagaaugccgaugcguacguguucgucgggucuucccgcuauagcaaaaaguuuaaaccugagauugcaauccgaccaaaggugcgugaccaggaaggaagaaugaacuacuauuggacucugguggagcccggugauaaaauuaccuucgaagccacaggcaaccuagucguuccuagguacgcuuuugccauggagcggaaugcagggucgggaaucauaauuucugacacuccagugcaugauugcaacaccacaugucaaaccccgaagggcgcuaucaauacgucccuccccuuccacaacauucauccuaucacuaucgguaaaugcccaaaguauguaaagucaacaaaacugcgccuugccaccgggcugagaaaugugcccaguauucagagcaggggauuguuuggcgcgauagccggcuucaucgaagggggauggacugguauggucgacggcugguacggguaucaccaccagaacgagcagggauccggcuacgcagcugaccucaagucuacacaaaaugccauugaugagaucaccaacaaagugaauagcguuauagaaaagaugaacacgcaguuuaccgcuguggguaaagaguucaaucaucuggaaaagcggauugagaacuuaaauaagaaagucgacgauggguuccuggacaucuggacauacaacgccgaacuccuugugcuguuggagaaugagcgcacucuagauuaucacgacucaaacguaaagaaccuguacgaaaaaguucgaagucagcucaagaauaacgcaaaagagaucggcaauggauguuuugaguucuaucauaagugcgauaacaccuguauggaauccgugaagaauggcacauacgacuauccuaaauacagcgaagaggccaagcugaacagagaggaaauugauggggucaaacuugagucuacuaggaucuaucagauucuggcuauauacucaaccguggcgaguagcuugguccucgugguuucccugggagcaaucucuuuuuggaugugcucgaaugguagcuuacaaugccggauuuguaucuga

SEQ ID NO: 131913 - RNA, 1701 nt, Artificial Sequence
  derived and/or modified CDS sequence (opt3) from hemagglutinin__InfluenzaA__ACZ96579
auggaggccauccuggugguccuccuuuacaccuucgcuacagcaaacgccgacacucugugcauuggcuaucacgcgaauaacagcacggauaccguugacacaguguuggaaaagaauguaacugugacccauuccgucaacuuacuggaggauaaacacaaugggaagcuauguaaacucagaggaguggcuccccugcaucuugguaagugcaacauagccggcuggauccuggggaauccugaaugugagucuuugucaacagcaaguagcugguccuacauuguugaaaccucuucgucagacaacggaacuugcuauccaggcgauuuuaucgacuacgaggagcucagggaacagcugagcaguguguccucuuucgagcgguuugaaauuuucccgaaaacaagcuccuggcccaaucacgauucaaacaagggugucaccgccgcuuguccucaugcaggggccaagaguuuuuauaaaaaucugaucuggcucgugaagaaaggaaacagcuacccaaaguuaucuaaauccuauauaaaugacaagggcaaggagguacugguucuuuggggcauccaccaccccucaagcagugcugaucaacagucuuuguaccagaacgccgacgcguacguguucgucggguccagccgcuauucgaaaaaguuuaaaccugagauugcaauccgaccaaaggugcgugaucaggaaggaagaaugaauuacuauuggacgcugguggagcccggugacaaaauuacuuucgaagccaccggcaaccuagucguuccuagguacgcuuuugccauggagcggaacgcagggucuggaaucauaauuuccgauacaccagugcaugacugcaauacuaccugucaaacaccgaagggcgcuaucaacaccucacuccccuuccacaauauucauccuaucacgaucgguaaaugcccaaaguauguaaagaguacuaaacugcgccuugccacagggcugagaaacgugcccagcauucaguccaggggauuguuuggcgcgauagccggcuucaucgaagggggauggaccgguauggucgacggcugguacggguaucaccaccagaaugagcagggaucuggcuacgcagcugaucucaagagcacucaaaacgccauugacgagaucacaaauaaagugaacucaguuauagaaaagaugaauacccaguuuacggcuguggguaaagaguucaaccaucuggaaaagcggauugagaauuuaaacaagaaagucgaugacggguuccuggauaucuggaccuacaaugccgaacuccuugugcuguuggagaacgagcgcacacuagacuaucacgauaguaauguaaagaaccuguacgaaaaaguucgaucccagcucaagaacaaugcaaaagagaucggcaacggauguuuugaguucuaucauaagugcgacaauacuuguauggaaagcgugaagaacggcaccuacgauuauccuaaauacucugaagaggccaagcugaauagagaggaaauugacggggucaaacuugagucaacaaggaucuaucagauucuggcuauauacaguacuguggcgagcuccuugguccucgugguuucucugggagcaaucucguuuuggaugugcagcaacgguuccuuacaaugccggauuuguaucuga

SEQ ID NO: 131914 - RNA, 1701 nt, Artificial Sequence; identical to SEQ ID NO: 130717
  derived and/or modified CDS sequence (opt3) from hemagglutinin__InfluenzaA__ACZ96589

SEQ ID NO: 131915 - RNA, 1701 nt, Artificial Sequence
  derived and/or modified CDS sequence (opt3) from hemagglutinin__InfluenzaA__ACZ96599
augaaggccauccuggugguccuccuuuacaccuucgcuacagcaaacgccgacacucugugcauuggcuaucacgcgaauaacagcacggauaccguugacacaguguuggagaaaaauguaacugugacccauuccgucaacuuacuggaagauaagcacaaugggaaacuauguaagcucagaggaguggcuccccugcaucuugguaaaugcaacauagccggcuggauccuggggaauccugagugugaaucuuugucaacagcaaguagcugguccuacauuguugagaccucuucgucagacaacggaacuugcuauccaggcgauuuuaucgacuacgaagaacucagggagcagcugagcaguguguccucuuucgaacgguuugagauuuucccgaagacaagcuccuggcccaaucacgauucaaacaagggugucaccgccgcuuguccucaugcaggggccaaaaguuuuuauaagaaucugaucuggcucgugaaaaagggaaacagcuacccaaaauuaucuaaguccuauauaaaugacaagggcaaagaaguacugguucuuuggggcauccaccaccccucaacgagcgcugaucaacagaguuuguaccagaacgccgacgcguacguguucgucgggacuucucgcuauuccaagaaauuuaagccugagauugcaauccgaccaaaagugcgugagcaggaaggaagaaugaauuacuauuggacccugguggagcccggugauaagauuacauucgaagccacuggcaaccuagucguuccuagguacgcuuuugccauggagcggaacaccgggagcggaaucauaauuucggacacaccagugcaugauugcaauaccacgugucaaacuccgaaaggcgcaaucaacacaucucuccccuuccagaauauucacuccaucaccaucgguaagugcccuaaguauguaaaaucaacuaagcugcgccuugcuacagggcugagaaacgugccaaguauucagagcaggggauuguuuggcgccauagcgggcuucaucgaagggggauggaccgguauggucgacggcugguacggguaucaucaccagaaugagcaaggauccggcuacgccgcagaccucaaaucuacgcagaacgcuauugaugagaucaccaauaaggugaacagcguuauagaaaagaugaauacacaguuuacugccguggguaaggaguucaaccaccuggaaaagcggauugagaauuuaaacaaaaaggucgacgauggguuccuggacaucuggaccuacaaugcugaacuccuugugcuguuggagaacgagcgcacacuagauuaucaugacucaaauguuaaaaaccuguacgaaaagguacgaagucagcucaaaaacaaugccaaggagaucggcaacggauguuuugaguucuaucacaagugcgauaauacuuguauggaguccgugaaaaacggcaccuacgacuaucccaaguacagcgaagaggcaaaacugaauagagaggaaauugauggggucaaacuugagucuacaaggaucuaucaaauucuggccauauacucaaccguggcuaguagcuugguccucgugguuucccugggagcgaucucuuuuuggaugugcucgaacgguagcuuacagugccggauuuguaucuga

SEQ ID NO: 131916 - RNA, 1701 nt, Artificial Sequence
  derived and/or modified CDS sequence (opt3) from hemagglutinin__InfluenzaA__ACZ96609
augaaggccauccuggugguccuccuuuacaccuucgcuacagcaaacgccgacacucugugcauuggcuaucacgcgaauaacagcacggauaccguugacacaguguuggagaaaaauguaacugugacccauuccgucaacuuacuggaagauaagcacaaugggaaacuauguaagcucagaggaguggcuccccugcaucuugguaaaugcaacauagccggcuggauccuggggaauccugagugugaaucuuugucaacagcaaguagcugguccuacauuguugagaccucuucgucagacaacggaacuugcuauccaggcgauuuuaucaauuacgaggagcucagggagcagcugagcaguguguccucuuucgaacgguuugagauuuucccgaagacaagcuccuggcccaaccacgacucaaauaagggugucaccgccgcuuguccucaugcaggggccaaaaguuuuuauaagaaccugaucuggcucgugaaaaagggaaauagcuacccaaaauuaucuaaguccuauauaaacgauaagggcaaagaaguacugguucuuuggggcauccaccaccccucaacgagcgcugaccaacagaguuuguaccagaaugccgaugcguacguguucgucgggucuucccgcuauagcaagaaauuuaagccugagauugcaauccgaccaaaagugcgugaccaggagggaagaaugaacuacuauuggacucugguggaacccggugauaagauuaccuucgaggccacaggcaaccuagucguuccuagguacgcuuuugccauggaacggaaugcagggucgggaaucauaauuucugacacuccagugcaugauugcaacaccacaugucaaaccccgaaaggcgcuaucaauacgucccuccccuuccagaacauucacccuaucacuaucgguacaugcccaaaguauguaaagucaaccaaacugcgccuugccacugggcugagaaaugugcccaguauucagagcaggggauuguuuggcgcgauagccggcuucaucgaagggggauggacagguauggucgacggcugguacggguaucaucaccagaacgaacaaggauccggcuacgcagcugaccucaagucuacccagaaugccauugaugagaucacgaacaaagugaauagcguuauagagaagaugaacacccaguuuacagcuguggguaaagaguucaaucaccuggaaaagcggauugaaaacuuaaauaagaaagucgacgauggguuccuggacaucuggacuuacaacgccgagcuccuugugcuguuggaaaaugagcgcacccuagauuaucaugacucaaacguaaagaaccuguacgagaaaguucgaagucagcucaagaauaacgcaaaagaaaucggcaauggauguuuugaguucuaucacaagugcgauaacacauguauggaauccgugaagaauggcacuuacgacuauccuaaauacagcgaggaagccaagcugaacagagaggagauugauggggucaaacuugaaucuaccaggaucuaucaaauucuggcuauauacucaacaguggcgaguagcuugguccucgugguuucccugggagcaaucucuuuuuggaugugcucgaaugguagcuuacagugccggauuuguaucuga

SEQ ID NO: 131917 - RNA, 1701 nt, Artificial Sequence; identical to SEQ ID NO: 130897
  derived and/or modified CDS sequence (opt3) from hemagglutinin__InfluenzaA__ACZ96619

SEQ ID NO: 131918 - RNA, 1701 nt, Artificial Sequence; identical to SEQ ID NO: 130897
  derived and/or modified CDS sequence (opt3) from hemagglutinin__InfluenzaA__ACZ96629

SEQ ID NO: 131919 - RNA, 1701 nt, Artificial Sequence; identical to SEQ ID NO: 130897
  derived and/or modified CDS sequence (opt3) from hemagglutinin__InfluenzaA__ACZ96639

SEQ ID NO: 131920 - RNA, 1701 nt, Artificial Sequence; identical to SEQ ID NO: 130897
  derived and/or modified CDS sequence (opt3) from hemagglutinin__InfluenzaA__ACZ96649

SEQ ID NO: 131921 - RNA, 1701 nt, Artificial Sequence; identical to SEQ ID NO: 130897
  derived and/or modified CDS sequence (opt3) from hemagglutinin__InfluenzaA__ACZ96659

SEQ ID NO: 131922 - RNA, 1701 nt, Artificial Sequence; identical to SEQ ID NO: 130897
  derived and/or modified CDS sequence (opt3) from hemagglutinin__InfluenzaA__ACZ96669

SEQ ID NO: 131923 - RNA, 1701 nt, Artificial Sequence; identical to SEQ ID NO: 130897
  derived and/or modified CDS sequence (opt3) from hemagglutinin__InfluenzaA__ACZ96679

SEQ ID NO: 131924 - RNA, 1701 nt, Artificial Sequence; identical to SEQ ID NO: 130897
  derived and/or modified CDS sequence (opt3) from hemagglutinin__InfluenzaA__ACZ96689

SEQ ID NO: 131925 - RNA, 1701 nt, Artificial Sequence; identical to SEQ ID NO: 130897
  derived and/or modified CDS sequence (opt3) from hemagglutinin__InfluenzaA__ACZ96699

SEQ ID NO: 131926 - RNA, 1701 nt, Artificial Sequence; identical to SEQ ID NO: 130897
  derived and/or modified CDS sequence (opt3) from hemagglutinin__InfluenzaA__ACZ96719

SEQ ID NO: 131927 - RNA, 1701 nt, Artificial Sequence; identical to SEQ ID NO: 130897
  derived and/or modified CDS sequence (opt3) from hemagglutinin__InfluenzaA__ACZ96729

SEQ ID NO: 131928 - RNA, 1701 nt, Artificial Sequence; identical to SEQ ID NO: 130897
  derived and/or modified CDS sequence (opt3) from hemagglutinin__InfluenzaA__ACZ96739

SEQ ID NO: 131929 - RNA, 1701 nt, Artificial Sequence
  derived and/or modified CDS sequence (opt3) from hemagglutinin__InfluenzaA__ACZ96749
augaagaccauccuggugguccuccuuuacacauucgccacugcuaacgcagacacgcugugcauuggcuaucacgccaauaacagcaccgauacaguugacacuguguuggagaaaaauguaaccgugacacauuccgucaacuuacuggaagauaagcacaaugggaaacuauguaagcucagaggaguggcgccccugcaucuugguaaaugcaacauagcuggcuggauccuggggaauccugagugugaaucuuugucaaccgccaguagcugguccuacauuguugagacuucuucgucagacaacggaacaugcuauccaggcgauuuuaucgacuacgaggagcucagggagcagcugagcaguguguccucuuucgaacgguuugagauuuucccgaagaccagcuccuggcccaaucacgauucaaacaagggugucacggcagccuguccucaugcuggggcaaaaaguuuuuauaagaaucugaucuggcucgugaaaaagggaaacagcuacccaaaauuaucuaaguccuauauaaaugacaagggcaaagaaguacugguucuuuggggcauccaccaccccucaacuagcgccgaucaacagaguuuguaccagaacgcugacgccuacguguucgucgggucuucccgcuauagcaagaaauuuaagccugagauugcgauccgaccaaaagugcgugaucaggagggaagaaugaauuacuauuggacccugguggaacccggugacaagauuacauucgaggcaacuggcaaccuagucguuccuagguacgccuuugcuauggaacggaacgccgggucgggaaucauaauuucugauaccccagugcaugacugcaauacaaccugucaaacgccgaaaggcgcaaucaacacuucccuccccuuccagaauauucacccuaucacaaucgguaagugcccaaaguauguaaaaucaaccaagcugcgccuugcuacugggcugagaaacgugcccaguauucagagcaggggauuguuuggcgccauagcgggcuucaucgaagggggauggacagguauggucgacggcugguacggguaucaucaccagaaugaacaaggauccggcuacgccgcagaucucaaaucuacccagaacgcuauugacgagaucacgaauaaggugaacagcguuauagagaaaaugaauacccaguuuacagccguggguaaggaguucaaccaccuggaaaagcggauugaaaauuuaaacaaaaaggucgaugacggguuccuggauaucuggacuuacaaugcugagcuccuugugcuguuggaaaacgagcgcacccuagacuaucaugauucaaauguaaagaaccuguacgagaagguucgaagucagcucaaaaacaaugccaaggaaaucggcaacggauguuuugaguucuaucacaagugcgacaauacauguauggaauccgugaaaaacggcacuuacgauuauccuaaguacagcgaggaagcaaaacugaauagagaggagauugacggggucaaacuugaaucuaccaggaucuaucaaauucuggccauauacucaacaguggcuaguagcuugguccucgugguuucccugggagcgaucucuuuuuggaugugcucgaacgguagcuuacagugccggauuuguaucuga

SEQ ID NO: 131930 - RNA, 1701 nt, Artificial Sequence; identical to SEQ ID NO: 130704
  derived and/or modified CDS sequence (opt3) from hemagglutinin__InfluenzaA__ACZ96759

SEQ ID NO: 131931 - RNA, 1701 nt, Artificial Sequence; identical to SEQ ID NO: 130704
  derived and/or modified CDS sequence (opt3) from hemagglutinin__InfluenzaA__ACZ96769

SEQ ID NO: 131932 - RNA, 1701 nt, Artificial Sequence; identical to SEQ ID NO: 130704
  derived and/or modified CDS sequence (opt3) from hemagglutinin__InfluenzaA__ACZ96779

SEQ ID NO: 131933 - RNA, 1701 nt, Artificial Sequence; identical to SEQ ID NO: 130704
  derived and/or modified CDS sequence (opt3) from hemagglutinin__InfluenzaA__ACZ96789

SEQ ID NO: 131934 - RNA, 1701 nt, Artificial Sequence
  derived and/or modified CDS sequence (opt3) from hemagglutinin__InfluenzaA__ACZ96809
augaaggccauccuggugguccuccuuuacaccuucgcuacagcaaacgccgacacucugugcauuggcuaucacgcgaauaacagcacggauaccguugacacaguguuggagaaaaauguaacugugacccauuccgucaacuuacuggaagauaagcacaaugggaaacuauguaagcucagaggaguggcuccccugcaucuugguaaaugcaacauagccggcuggauccuggggaauccugagugugaaucuuugucaacagcaaguagcugguccuacauuguugagaccucuucgucagacaacggaacuugcuauccaggcgauuuuaucgacuacgaggagcucagggagcagcugagcaguguguccucuuucgaacgguuugagauuuucccgaagacaagcuccuggcccaaucacgauucaaacaagggugucaccgccgcuuguccucaugcaggggccaaaaguuuuuauaagaaucugaucuggcucgugaaaaagggaaacagcuacccaaaauuaucuaaguccuauauaaaugacaagggcaaagaaguacugguucuuuggggcauccaccaccccucaacgaacgcugaucaacagagcuuguaccagaaugccgacgcguacguguucgucgggacuucccgcuauucuaagaaauuuaagccugagauugcaauccgaccaaaagugcgugaucaggagggaagaaugaacuacuauuggacccugguggaacccggugacaagauuacauucgaggccacuggcaaccuagucguuccuagguacgcuuuugccauggaacggaaugcaggguccggaaucauaauuagcgauaccccagugcaugacugcaacacaaccugucaaacgccgaaaggcgcuaucaauacuucgcuccccuuccagaacauucacccuaucacaaucgguaagugcccaaaguauguaaaaucuaccaagcugcgccuugccacugggcugagaaaugugcccuccauucagucaaggggauuguuuggcgcgauagccggcuucaucgaagggggauggacagguauggucgacggcugguacggguaucaucaccagaacgaacaaggaaguggcuacgcagcugaucucaaaagcacccagaaugccauugacgagaucacgaacaaggugaauaguguuauagagaaaaugaacacccaguuugcugccguggguaaggaguucaaucaccuggaaaagcggauugaaaacuuaaauaaaaaggucgaugacggguuccuggauaucuggacauacaacgcagagcuccuugugcuguuggaaaaugagcgcacucuagacuaucaugauucuaacguaaagaaccuguacgagaagguucgaagccagcucaaaaauaacgccaaggaaaucggcaauggauguuuugaguucuaucacaagugcgacaacaccuguauggaaucagugaaaaauggcacauacgauuauccuaaguacagugaggaagcuaaacugaacagagaggagauugacggggucaaacuugaauccacuaggaucuaucaaauucuggcgauauacagcaccguggcaucuucauugguccucgugguuagucugggagccaucagcuuuuggaugugcuccaaugguucuuuacagugccggauuuguaucuga

SEQ ID NO: 131935 - RNA, 1701 nt, Artificial Sequence; identical to SEQ ID NO: 130704
  derived and/or modified CDS sequence (opt3) from hemagglutinin__InfluenzaA__ACZ96819

SEQ ID NO: 131936 - RNA, 1701 nt, Artificial Sequence; identical to SEQ ID NO: 130704
  derived and/or modified CDS sequence (opt3) from hemagglutinin__InfluenzaA__ACZ96829

SEQ ID NO: 131937 - RNA, 1701 nt, Artificial Sequence; identical to SEQ ID NO: 130704
  derived and/or modified CDS sequence (opt3) from hemagglutinin__InfluenzaA__ACZ96839

SEQ ID NO: 131938 - RNA, 1701 nt, Artificial Sequence; identical to SEQ ID NO: 131857
  derived and/or modified CDS sequence (opt3) from hemagglutinin__InfluenzaA__ACZ96849

SEQ ID NO: 131939 - RNA, 1701 nt, Artificial Sequence; identical to SEQ ID NO: 130717
  derived and/or modified CDS sequence (opt3) from hemagglutinin__InfluenzaA__ACZ96859

SEQ ID NO: 131940 - RNA, 1701 nt, Artificial Sequence; identical to SEQ ID NO: 130704
  derived and/or modified CDS sequence (opt3) from hemagglutinin__InfluenzaA__ACZ96869

SEQ ID NO: 131941 - RNA, 1701 nt, Artificial Sequence; identical to SEQ ID NO: 130704
  derived and/or modified CDS sequence (opt3) from hemagglutinin__InfluenzaA__ACZ96879

SEQ ID NO: 131942 - RNA, 1701 nt, Artificial Sequence
  derived and/or modified CDS sequence (opt3) from hemagglutinin__InfluenzaA__ACZ96899
augaaggccauccuggugguccuccuuuacaccuucgcuacagcaaacgccgacacucugugcauuggcuaucacgcgaauaacagcacggauaccguugacacaguguuggagaaaaauguaacugugacccauuccgucaacuuacuggaagauaagcacaaugggaaacuauguaagcucagaggaguggcuccccugcaucuugguaaaugcaacauagccggcuggauccuggggaauccugagugugaaucuuugucaacagcaaguagcugguccuacauuguugagaccucuucgucagacaacggaacuugcuauccaggcgauuuuaucgacuacgaggagcucagggagcagcugagcaguguguccucuuucgaacgguuugagauuuucccgaagacaagcuccuggcccaaucacgauucaaacaagggugucaccgccgcuuguccucaugcaggggccaaaaguuuuuauaagaaucugaucuggcucgugaaaaagggaaacagcuacccaaaauuaucuaaguccuauauaaaugacaagggcaaagaaguacugguucuuuggggcauccaccacucaagcacgagugcugaucaacagucuuuguaccagaacgccgacgcguacguguucgucggguccagccgcuauucgaagaaauuuaagcccgagauugcaauccgaccuaaagugcgugaucaggagggaagaaugaauuacuauuggacucugguggaaccaggugacaagauuaccuucgaggccacaggcaaccuagucguucccagguacgcuuuugccauggaacggaacgcagggucuggaaucauaauuuccgauacuccugugcaugacugcaauaccacaugucaaaccccaaaaggcgcuaucaacacgucacucccguuccagaauauucaccccaucacuaucgguaagugcccuaaguauguaaaaaguacaaagcugcgccuugccaccgggcugagaaacgugccaagcauucaguccaggggauuguuuggcgcgauagccggcuucaucgaagggggauggacugguauggucgacggcugguacggguaucaucaccagaaugaacaaggaucuggcuacgcagcugaucucaaaagcacacagaacgccauugacgagaucaccaauaaggugaacucaguuauagagaaaaugaauacgcaguuuaccgcuguggguaaggaguucaaccaccuggaaaagcggauugaaaauuuaaacaaaaaggucgaugacggguuccuggauaucuggacauacaaugccgagcuccuugugcuguuggaaaacgagcgcacucuagacuaucaugauaguaauguaaagaaccuguacgagaagguucgaucccagcucaaaaacaaugcaaaggaaaucggcaacggauguuuugaguucuaucacaagugcgacaauaccuguauggaaagcgugaaaaacggcacauacgauuaucccaaguacucugaggaagccaaacugaauagagaggagauugacggggucaaacuugaaucaacuaggaucuaucaaauucuggcuauauacaguaccguggcgagcuccuugguccucgugguuucucugggagcaaucucguuuuggaugugcagcaacgguuccuuacagugccggauuuguaucuga

SEQ ID NO: 131943 - RNA, 1701 nt, Artificial Sequence; identical to SEQ ID NO: 130704
  derived and/or modified CDS sequence (opt3) from hemagglutinin__InfluenzaA__ACZ96909

SEQ ID NO: 131944 - RNA, 1701 nt, Artificial Sequence; identical to SEQ ID NO: 130704
  derived and/or modified CDS sequence (opt3) from hemagglutinin__InfluenzaA__ACZ96919

SEQ ID NO: 131945 - RNA, 1701 nt, Artificial Sequence; identical to SEQ ID NO: 130704
  derived and/or modified CDS sequence (opt3) from hemagglutinin__InfluenzaA__ACZ96929

SEQ ID NO: 131946 - RNA, 1701 nt, Artificial Sequence; identical to SEQ ID NO: 130704
  derived and/or modified CDS sequence (opt3) from hemagglutinin__InfluenzaA__ACZ96939

SEQ ID NO: 131947 - RNA, 1701 nt, Artificial Sequence
  derived and/or modified CDS sequence (opt3) from hemagglutinin__InfluenzaA__ACZ96949
augaaggccauccuggugguccuccuuuacaccuucgcuacagcaaacgccgacacucugugcauuggcuaucacgcgaauaacagcacggauaccguugacacaguguuggagaaaaauguaacugugacccauuccgucaacuuacuggaagauaagcacaaugggaaacuauguaagcucagaggaguggcuccccugcaucuugguaaaugcaacauagccggcuggauccuggggaauccugagugugaaucuuugucaacagcaaguagcugguccuacauuguugagaccucuucgucagacaacggaacuugcuauccaggcgauuuuaucgacuacgaggagcucagggagcagcugagcaguguguccucuuucgaacgguuugagauuuucccgaagacaagcuccuggcccaaucacgauucaaacaagggugucaccgccgcuuguccucaugcaggggccaaaaguuuuuauaagaaucugaucuggcucgugaaaaagggaaacagcuacccaaaauuaucuaaguccuauauaaaugacaagggcaaagaaguacugguucuuuggggcauccaccaccccucaacgagcgcugaucaacagaguuuguaccagaacgccgacgcguacguguucgucgggucuucccgcuauagcaagaaauuuaagccugagauugcaauccgaccaaaagugcgugaucaggagggaagaaugaauuacuauuggacucugguggaacccggugacaagauuaccuucgaggccacaggcaaccuagucguuccuagguacgcuuuugccauggaacggaacgcagggucgggaaucauaauuucugauacuccagugcaugacugcaauaccacaugucaaaccccgaaaggcgcuaucaacacgucccuccccuuccagaauauucacccuaucacuaucgguaagugcccaaaguauguaaaaucaacaaagcugcgccuugccaccgggcugagaaacgugcccaguauucagagcaggggauuguuuggcgcgauagccggcuucaucgaagggggauggacugguauggucgacggcugguacggguaucaucaccagaaugaacaaggauccggcuacgcagcugaucucaaaucuacacagaacgccauugacgagaucaccaauaaggugaacagcguuauagagaaaaugaauacgcaguuuaccgcuguggguaaggaguucaaccaccuggaaaagcggauugaaaauuuaaacaaaaaggucgaugacggguuccuggauaucuggacauacaaugccgagaugcucgugcuucuggaaaacgagcgcacuuuggacuaucaugauucaaauguuaaaaaccuauacgagaagguacgaagucagcugaaaaacaaugcaaaggaaaucggcaacggauguuuugaguucuaucacaagugcgacaauaccuguauggaauccgugaaaaacggcacauacgauuauccuaaguacagcgaggaagccaaacucaauagagaggagauugacggggucaagcuggaaucuacuaggaucuaucaaauucuugcuauauacucaaccguggcgaguagccuggucuuggugguuucccucggagcaaucucuuuuuggaugugcucgaacgguagccugcagugccggauuuguaucuga

SEQ ID NO: 131948 - RNA, 1701 nt, Artificial Sequence; identical to SEQ ID NO: 130704
  derived and/or modified CDS sequence (opt3) from hemagglutinin__InfluenzaA__ACZ97021

SEQ ID NO: 131949 - RNA, 1701 nt, Artificial Sequence; identical to SEQ ID NO: 131071
  derived and/or modified CDS sequence (opt3) from hemagglutinin__InfluenzaA__ACZ97343

SEQ ID NO: 131950 - RNA, 1701 nt, Artificial Sequence; identical to SEQ ID NO: 131071
  derived and/or modified CDS sequence (opt3) from hemagglutinin__InfluenzaA__ACZ97353

SEQ ID NO: 131951 - RNA, 1701 nt, Artificial Sequence; identical to SEQ ID NO: 130704
  derived and/or modified CDS sequence (opt3) from hemagglutinin__InfluenzaA__ACZ97363

SEQ ID NO: 131952 - RNA, 1701 nt, Artificial Sequence
  derived and/or modified CDS sequence (opt3) from hemagglutinin__InfluenzaA__ACZ97383
augaaggccauccuggugguccuccuuuacaccuucgcuacagcaaacgccgacacucugugcauuggcuaucacgcgaauaacagcacggauaccguugacacaguguuggagaaaaauguaacugugacccauuccgucaacuuacuggaagauaagcacaaugggaaacuauguaagcucagaggaguggcuccccugcaucuugguaaaugcaacauagccggcuggauccuggggaauccugagugugaaucuuugucaacagcaaguagcugguccuacauuguugagaccucuacuucggacaacggaacaugcuauccaggcgauuuuaucgacuacgaggagcucagggagcagcugucaagcgugaguuccuucgaacgguuugagauuuucccgaagaccucuagcuggcccaaucacgauuccaacaagggugucacggccgcuuguccucaugcaggggccaaaucauuuuauaagaaucugaucuggcucgugaaaaagggaaacaguuacccaaaauuaagcaagucuuauauaaaugacaagggcaaagaaguacugguucuuuggggcauccaccaccccuccacuucagcugaucaacagagcuuguaccagaacgccgacgcguacguguucgucgggaguucucgcuauuccaagaaauuuaagccugagauugcaauccgaccaaaagugcgugaucaggagggaagaaugaauuacuauuggacccugguggaacccggugacaagauuacauucgaggccacuggcaaccuagucguuccuagguacgcuuuugccauggaacggaacgcagggagcggaaucauaauuucggauaccccagugcaugacugcaauacaaccugucaaacgccgaaaggcgcuaucaacacuucucuccccuuccagaauauucacccuaucacaaucgguaagugcccaaaguauguaaaauccaccaagcugcgccuugccacugggcugagaaacgugcccucaauucagaguaggggauuguuuggcgcgauagccggcuucaucgaagggggauggacagguauggucgacggcugguacggguaucaucaccagaaugaacaaggaagcggcuacgcagcugaucucaaauccacccagaacgccauugacgagaucacgaauaaggugaacucuguuauagagaaaaugaauacccaguuuacagcuguggguaaggaguucaaccaccuggaaaagcggauugaaaauuuaaacaaaaaggucgaugacggguuccuggauaucuggacuuacaaugccgagcuccuugugcuguuggaaaacgagcgcacccuagacuaucaugauagcaauguaaagaaccuguacgagaagguucgaucacagcucaaaaacaaugcaaaggaaaucggcaacggauguuuugaguucuaucacaagugcgacaauacauguauggaaagugugaaaaacggcacuuacgauuauccuaaguacuccgaggaagccaaacugaauagagaggagauugacggggucaaacuugaaagcaccaggaucuaucaaauucuggcuauauacucuacaguggcgucaaguuugguccucgugguuagccugggagcaaucuccuuuuggaugugcucuaacgguucguuacagugccggauuuguaucuga

SEQ ID NO: 131953 - RNA, 1701 nt, Artificial Sequence; identical to SEQ ID NO: 130704
  derived and/or modified CDS sequence (opt3) from hemagglutinin__InfluenzaA__ACZ97393

SEQ ID NO: 131954 - RNA, 1701 nt, Artificial Sequence
  derived and/or modified CDS sequence (opt3) from hemagglutinin__InfluenzaA__ACZ98178
augaaggccauccuggugguccuccuuuacaccuucgcuacagcaaacgccgacacucugugcauuggcuaucacgcgaauaacagcacggauaccguugacacaguguuggagaagaauguaacugugacccauuccgucaacuuacuggaagauaagcacuacgggaaacuauguaagcucagaggaguggcuccccugcaucuugguaaaugcaauauagccggcuggauccuggggaacccugagugugaaucuuugucaacagcaaguagcugguccuauauuguugagaccucuucgucagacaauggaacuugcuacccaggcgauuuuaucgacuaugaggagcucagggagcagcugagcaguguguccucuuucgaacgguuugagauuuucccgaagacaagcuccuggcccaaccacgauucaaauaagggugucaccacggccuguccucaugcuggggcaaaaaguuuuuacaagaaccugaucuggcucgugaaaaagggaaauagcuauccaaaauuaucuaaguccuacauaaacgacaagggcaaagaaguacugguucuuuggggcauccaccaccccucaacuagcgccgaucaacagaguuuguaccagaaugcugacgccuauguguucgucgggaccucucgcuacuccaagaaauuuaagccugagauugcgauccgaccaaaagugcgugaucaggagggaagaaugaacuauuacuggacacugguggaacccggugacaagauuacuuucgaggcaaccggcaaucuagucguuccuagguaugccuuugcuauggaacggaacgccgggagcggaaucauaauuucggauacaccagugcaugacugcaacaccacgugucaaacuccgaaaggcgcaaucaauacaucucuccccuuccagaacauucacccuaucaccaucgguaagugcccaaaguacguaaaauccacuaagcugcgccuugcuacagggcugagaaaugugcccucaauucagaguaggggauuguuuggcgccauagcgggcuucaucgaagggggauggaccgguauggucgacggcugguauggguaccaucaccagaacgaacaaggaagcggcuacgccgcagaucucaaauccacgcagaaugcuauugacgagaucaccaacaagguaaauucuguuauagagaaaaugaacacacaguuuacugccguggguaaggaguucaaucaccuggaaaagcggauugaaaacuuaaauaaaaaggucgaugacggguuccuggauaucuggaccuauaacgcugagcuccuugugcuguuggaaaaugagcgcacacuagacuaccaugauagcaacgugaaaaaucuguaugagaagguucgaucacagcucaaaaacaacgccaaggaaaucggcaauggauguuuugaguucuaccacaagugcgacaacacuuguauggaaagugugaaaaauggcaccuaugauuacccuaaguauuccgaggaagcaaaacugaacagagaggagauugacggggucaaacuugaaagcacaaggaucuaccaaauucuggccauauacucuaccguggcuucaaguuugguccucgugguuagccugggagcgaucuccuuuuggaugugcucuaaugguucguuacagugccggauuuguaucuga

SEQ ID NO: 131955 - RNA, 1701 nt, Artificial Sequence; identical to SEQ ID NO: 130704
  derived and/or modified CDS sequence (opt3) from hemagglutinin__InfluenzaA__ACZ98188

SEQ ID NO: 131956 - RNA, 1701 nt, Artificial Sequence; identical to SEQ ID NO: 130897
  derived and/or modified CDS sequence (opt3) from hemagglutinin__InfluenzaA__ACZ98198

SEQ ID NO: 131957 - RNA, 1701 nt, Artificial Sequence; identical to SEQ ID NO: 130717
  derived and/or modified CDS sequence (opt3) from hemagglutinin__InfluenzaA__ACZ98208

SEQ ID NO: 131958 - RNA, 1701 nt, Artificial Sequence; identical to SEQ ID NO: 130717
  derived and/or modified CDS sequence (opt3) from hemagglutinin__InfluenzaA__ACZ98218

SEQ ID NO: 131959 - RNA, 1701 nt, Artificial Sequence; identical to SEQ ID NO: 130717
  derived and/or modified CDS sequence (opt3) from hemagglutinin__InfluenzaA__ACZ98228

SEQ ID NO: 131960 - RNA, 1701 nt, Artificial Sequence; identical to SEQ ID NO: 130717
  derived and/or modified CDS sequence (opt3) from hemagglutinin__InfluenzaA__ACZ98238

SEQ ID NO: 131961 - RNA, 1701 nt, Artificial Sequence; identical to SEQ ID NO: 131346
  derived and/or modified CDS sequence (opt3) from hemagglutinin__InfluenzaA__ACZ98248

SEQ ID NO: 131962 - RNA, 1701 nt, Artificial Sequence; identical to SEQ ID NO: 130717
  derived and/or modified CDS sequence (opt3) from hemagglutinin__InfluenzaA__ACZ98258

SEQ ID NO: 131963 - RNA, 1701 nt, Artificial Sequence; identical to SEQ ID NO: 130717
  derived and/or modified CDS sequence (opt3) from hemagglutinin__InfluenzaA__ACZ98268

SEQ ID NO: 131964 - RNA, 1701 nt, Artificial Sequence; identical to SEQ ID NO: 131857
  derived and/or modified CDS sequence (opt3) from hemagglutinin__InfluenzaA__ACZ98278

SEQ ID NO: 131965 - RNA, 1701 nt, Artificial Sequence; identical to SEQ ID NO: 131857
  derived and/or modified CDS sequence (opt3) from hemagglutinin__InfluenzaA__ACZ98288

SEQ ID NO: 131966 - RNA, 1701 nt, Artificial Sequence
  derived and/or modified CDS sequence (opt3) from hemagglutinin__InfluenzaA__ACZ98298
augaaggccauccuggugguccuccuuuacaccuucgcuacagcaaacgccgacacucugugcauuggcuaucacgcgaauaacagcacggauaccguugacacaguguuggagaaaaauguaacugugacccauuccgucaacuuacuggaagauaagcacaaugggaaacuauguaagcucagaggaguggcuccccugcaucuugguaaaugcaacauagccggcuggauccuggggaauccugagugugaaucuuugucaacagcaaguagcugguccuacauuguugagaccucuucgucagacaacggaacuugcuauccaggcgauuuuaucgacuacgaagaacucagggagcagcugagcaguguguccucuuucgaaaaguuugagauuuucccgaagacaagcuccuggcccaaucacgauucaaacaaaggugucaccgccgcuuguccucaugcaggggccaagaguuuuuauaaaaaucugaucuggcucgugaagaaaggaaacagcuacccaaaguuaucuaaguccuauauaaaugacaaaggcaaggaaguacugguucuuuggggcauccaccaccccucaacgagcgcugaucaacagaguuuguaccagaacgccgacgcguacguguucgucgggucuucccgguauagcaaaaaguuuaaaccugagauugcaauccgcccaaaggugcgagaucaggagggacguaugaauuacuauuggacucugguggaacccggugacaaaauuaccuucgaggccacaggcaaccuagucguuccuagauacgcuuuugccauggaaaggaacgcagggucgggaaucauaauuucugauacuccagugcaugacugcaauaccacaugucaaaccccgaagggcgcuaucaacacgucccuccccuuccagaauauucacccuaucacuaucgguaagugcccaaaauauguaaagucaacaaaacugcggcuugccaccgggcugcgcaacgugcccaguauucagagcagaggauuguuuggcgcgauagccggcuucaucgaagggggauggacugguauggucgacggcugguacggguaucaucaccagaaugaacaaggauccggcuacgcagcugaucucaagucuacacagaacgccauugacgguaucaccaauaaagugaacagcguuauagagaagaugaauacgcaguuuaccgcuguggggaaggaguucaaccaccuggagaaaaggauugagaauuuaaacaagaaagucgaugacggcuuccuggauaucuggacauacaaugccgaacuccuugugcuguuggagaacgaacggacucuagacuaucaugauucaaauguaaagaaccuguacgagaaaguucgcagucagcucaagaacaaugcaaaggagaucggaaacggcuguuuugaguucuaucacaaaugcgacaauaccuguauggaguccgugaagaacgggacauacgauuauccuaaauacagcgaagaggccaagcugaaucgagaagagauugacggagucaaacuugagucuacuagaaucuaucaaauucuggcuauauacucaaccguggcgaguagcuugguccucgugguuucccugggugcaaucucuuuuuggaugugcucgaacggcagcuuacagugcaggauuuguaucuga

SEQ ID NO: 131967 - RNA, 1701 nt, Artificial Sequence
  derived and/or modified CDS sequence (opt3) from hemagglutinin__InfluenzaA__ACZ98318
augaaggccauccuggugguccuccuuuacaccuucgcuacagcaaacgccgacacucugugcauuggcuaucacgcgaauaacagcacggauaccguugacacaguguuggagaaaaauguaacugugacccauuccgucaacuuacuggaagauaagcacaaugggaaacuauguaagcucagaggaguggcuccccugcaucuugguaaaugcaacauagccggcuggauccuggggaauccugagugugaaucuuugucaacagcaaguagcugguccuacauuguugagaccucuucgucagacaacggaacuugcuauccaggcgauuuuaucgacuacgaggagcucagggagcagcugagcaguguguccucuuucgaacgguuugagauuuucccgaagacaagcuccuggcccaaucacgauucaaacaagggugucaccgccgcuuguccucaugcaggggccaaaaguuuuuauaagaaucugaucuggcucgugaaaaagggaaacagcuacccaaaauuaucuaaguccuauauaaaugacaagggcaaagaaguacugguucuuuggggcauccaccaccccucaacgagcgcugaucaacagaguuuguaccagaacgccgacgcguacguguucgucgggacuucucgcuauuccaagaaauuuaagccugagauugcaauccgaccaaaagugcgugaucaggagggaagaaugaauuacuauuggacccugguggaacccggugacaagauuacauucgaggccacuggcaaccuagucguuccuagguacgcuuuugccauggaacggaacgcagggagcggaaucauaauuucggauaccccagugcaugacugcaauacaaccugucaaacgccgaaaggcgcuaucaacacuucucuccccuuccagaauauucacccuaucacaaucgguaagugcccaaaguauguaaaauccaccaagcugcgccuugccacugggcugagaaacgugcccucaauucagaguaggggauuguuuggcgcgauagccggcuucaucgaagggggauggacagguauggucgacggcugguacggguaucaucaccagaaugaacaaggaagcggcuacgcagcugaucucaaauccacccagaacgccauugacgagaucacgaauaaggugaacucuguuauagagaaaaugaauacccaguuuacagcuguggguaaggaguucaaccaccuggaaaagcggauugaaaauuuaaacaaaaaggucgaugacggguuccuggauaucuggacuuacaaugccgagcuccuugugcuguuggaaaacgagcgcacccuagacuaucaugauagcaauguaaagaaccuguacgagaagguucgaucacagcucaaaaacaaugcaaaggaaaucggcaacggauguuuugaguucuaucacaagugcgacaauacauguauggaaagugugaaaaacggcacuuacgauuauccuaaguacuccgaggaagccaaacugaauagagaggagauugacggggucaaacuugaaagcaccaggaucuaucauauucuggcuauauacucuacaguggcgucaaguuugguccucgugguuagccugggagcaaucuccuuuuggaugugcucuaacgguucguuacaaugccggauuuguaucuga

SEQ ID NO: 131968 - RNA, 1701 nt, Artificial Sequence; identical to SEQ ID NO: 130959
  derived and/or modified CDS sequence (opt3) from hemagglutinin__InfluenzaA__ACZ98328

SEQ ID NO: 131969 - RNA, 1701 nt, Artificial Sequence; identical to SEQ ID NO: 130717
  derived and/or modified CDS sequence (opt3) from hemagglutinin__InfluenzaA__ACZ98338

SEQ ID NO: 131970 - RNA, 1701 nt, Artificial Sequence; identical to SEQ ID NO: 131857
  derived and/or modified CDS sequence (opt3) from hemagglutinin__InfluenzaA__ACZ98348

SEQ ID NO: 131971 - RNA, 1701 nt, Artificial Sequence; identical to SEQ ID NO: 130717
  derived and/or modified CDS sequence (opt3) from hemagglutinin__InfluenzaA__ACZ98358

SEQ ID NO: 131972 - RNA, 1701 nt, Artificial Sequence; identical to SEQ ID NO: 130717
  derived and/or modified CDS sequence (opt3) from hemagglutinin__InfluenzaA__ACZ98368

SEQ ID NO: 131973 - RNA, 1701 nt, Artificial Sequence; identical to SEQ ID NO: 130959
  derived and/or modified CDS sequence (opt3) from hemagglutinin__InfluenzaA__ACZ98388

SEQ ID NO: 131974 - RNA, 1701 nt, Artificial Sequence; identical to SEQ ID NO: 130717
  derived and/or modified CDS sequence (opt3) from hemagglutinin__InfluenzaA__ACZ98398

SEQ ID NO: 131975 - RNA, 1701 nt, Artificial Sequence; identical to SEQ ID NO: 130717
  derived and/or modified CDS sequence (opt3) from hemagglutinin__InfluenzaA__ACZ98408

SEQ ID NO: 131976 - RNA, 1701 nt, Artificial Sequence; identical to SEQ ID NO: 130897
  derived and/or modified CDS sequence (opt3) from hemagglutinin__InfluenzaA__ACZ98418

SEQ ID NO: 131977 - RNA, 1701 nt, Artificial Sequence; identical to SEQ ID NO: 130717
  derived and/or modified CDS sequence (opt3) from hemagglutinin__InfluenzaA__ACZ98428

SEQ ID NO: 131978 - RNA, 1701 nt, Artificial Sequence; identical to SEQ ID NO: 130717
  derived and/or modified CDS sequence (opt3) from hemagglutinin__InfluenzaA__ACZ98438

SEQ ID NO: 131979 - RNA, 1701 nt, Artificial Sequence; identical to SEQ ID NO: 130717
  derived and/or modified CDS sequence (opt3) from hemagglutinin__InfluenzaA__ACZ98448

SEQ ID NO: 131980 - RNA, 1701 nt, Artificial Sequence; identical to SEQ ID NO: 131857
  derived and/or modified CDS sequence (opt3) from hemagglutinin__InfluenzaA__ACZ98458

SEQ ID NO: 131981 - RNA, 1701 nt, Artificial Sequence
  derived and/or modified CDS sequence (opt3) from hemagglutinin__InfluenzaA__ACZ98546
augaaggccauccuggugguccuccuuuacaccuucgcuacagcaaacgccgacacucugugcauuggcuaucacgcgaauaacagcacggauaccguugacacaguguuggagaaaaauguaacugugacccauuccgucaacuuacuggaagauaagcacaaugggaaacuauguaagcucagaggaguggcuccccugcaucuugguaaaugcaacauagccggcuggauccuggggaauccugagugugaaucuuugucaacagcaaguagcugguccuacauuguugagaccucuucgucagacaacggaacuugcuauccaggcgauuuuaucgacuacgaggagcucagggagcagcugagcaguguguccucuuucgaacgguuugagauuuucccgaagacaagcuccuggcccaaucacgauccuaacaagggugucaccgccgcuuguccacaugcaggggccaaaucauuuuauaagaaucugaucuggcucgugaaaaagggaaacaguuaccccaaauuaagcaagucuuauauaaaugacaagggcaaagaaguacugguucuuuggggcauccaccacccuuccacgucagcugaucaacagagcuuguaccagaacgccgacgcguacguguucgucgggaccagucgcuauucuaagaaauuuaagccagagauugcaauccgacccaaagugcgugaucaggagggaagaaugaauuacuauuggacucugguggaaccuggugacaagauuacauucgaggccacuggcaaccuagucguuccaagguacgcuuuugccauggaacggaacgcaggguccggaaucauaauuagcgauaccccggugcaugacugcaauacaaccugucaaacgcccaaaggcgcuaucaacacuucgcucccuuuccagaauauucacccaaucacaaucgguaagugccccaaguauguaaaaucuaccaagcugcgccuuacuacagggcugagaaacgugccuuccauucaguacaggggauuguuuggcgccauaaccggcuucaucgaagggggauggacggguauggucgacggcugguauggguaccaucaccagaaugaacaaggaucaggcuacgcggccgaucucaaaaguacccagaacgcaauugacgagaucacaaauaaggugaacagcguuauagagaaaaugaauacucaguuuaccgcuguggguaaggaguucaaccaccuggaaaagcggauugaaaauuuaaacaaaaaggucgaugacggguuccuggauaucuggacauauaaugccgagcuccuugugcuguuggaaaacgagcgcacucuagacuaccaugauuccaauguaaagaaccuguaugagaagguucgaucucagcucaaaaacaaugcuaaggaaaucggcaacggauguuuugaguucuaccacaagugcgacaauaccuguauggaaagcgugaaaaacggcacauaugauuacccaaaguauucagaggaagccaaacugaauagagaggagauugacggggucaaacuugaaaguaccaggaucuaccaaauucuggcaauauacuccacuguggccagcucuuugguccucgugguuucacugggagcuaucaguuuuuggaugugcagcaacgguuccuuacagugccggauuuguaucuga

SEQ ID NO: 131982 - RNA, 1701 nt, Artificial Sequence
  derived and/or modified CDS sequence (opt3) from hemagglutinin__InfluenzaA__ACZ98560
augaaggccaucagagugguccugcucuacaccuucgcuacagcaaacgccgacacucuuugcauuggcuaucacgcgaauaacagcacggauaccguugacacagugcuggagaaaaauguaacugugacccauuccgucaacuuguuagaagauaagcacaaugggaaacuguguaagcuaaggggaguggcuccccuccaucuggguaaaugcaacauagccggcuggauccuugggaauccugagugugaaucucugucaacagcaaguagcugguccuacauuguugagaccucuucgucagacaacggaacuugcuauccaggcgauuuuaucgacuacgaagaguugcgggagcagcucagcaguguguccucuuucgaacgcuuugagauuuucccgaagacaagcuccuggcccaaucacgauccuaacaagggugucaccgccgcuuguccacaugcaggggccaaaucauuuuauaagaaucugaucuggcuggugaaaaagggaaacaguuaccccaaacucagcaagucuuauauaaaugacaagggcaaagaaguauuaguucuguggggcauccaccacccuuccacgucagcugaucaacagagccuuuaccagaacgccgacgcguacguguucgucgggaccagucgauauucuaagaaauuuaagccagagauugcaauccgucccaaagugagagaucaggagggaaggaugaauuacuauuggacuuugguggaaccuggugacaagauuacauucgaggccacuggcaaccuggucguuccacgguacgcuuuugccauggaacgcaacgcaggguccggaaucauaauuagcgauaccccggugcaugacugcaauacaaccugucaaacgcccaaaggcgcuaucaacacuucgcuaccuuuccagaauauucacccaaucacaaucgguaagugccccaaguauguaaaaucuccuaagcucagacuggccaccgggaugaggaacgugccauuuauucaguaccggggacuuuucggcgcgauaacuggcuuuaucgaagggggauggacagguauggucgacggcugguauggguaccaucaccagaaugaacaaggauccggcuacgccgcagaucugaaaucaacccagaacgcuauugacgagaucacgaauaaggugaacaguguuauagagaaaaugaauacccaguucacagccguggguaaggaguucaaccacuuggagaagcgcauugaaaaucucaacaaaaaggucgaugacggguuucuggauaucuggacuuauaaugcugaguuacuggugcuccuugaaaacgagcgaacccuggacuaccaugauagcaauguuaaaaacuuguaugagaagguaagaucccagcugaaaaacaaugccaaggaaaucggcaacggauguuucgaguuuuaccacaagugcgacaauacauguauggaaucugugaaaaacggcacuuaugauuaccccaaguauagcgaggaagcaaaacuaaauagggaggagauugacggggucaagcucgaaucaacccggaucuaccaaauucuggccauauacaguacaguggcuuccagccuuguccuggugguuucuuugggagcgaucucauucuggaugugcaguaacgguagccuccagugccguauuuguaucuga

SEQ ID NO: 131983 - RNA, 1701 nt, Artificial Sequence
  derived and/or modified CDS sequence (opt3) from hemagglutinin__InfluenzaA__ACZ98567
augaaggccauccuggugguccuccuuuacaccuucgcuacagcaaacgccgacacucugugcauuggcuaucacgcgaauaacagcacggauaccguugacacaguguuggagaaaaauguaacugugacccauuccgucaacuuacuggaagauaagcacaaugggaaacuauguaagcucagaggaguggcuccccugcaucuugguaaaugcaacauagccggcuggauccuggggaauccugagugugaaucuuugucaacagcaaguagcugguccuacauuguugagaccucuucgucagacaacggaacuugcuauccaggcgauuuuaucgacuacgaagaacucagggagcagcugagcaguguguccucuuucgaacgguuugagauuuucccgaagacaagcuccuggcccaaucacgauccuaacaagggugucaccgccgcuuguccacaugcaggggccaaaucauuuuauaagaaucugaucuggcucgugaaaaagggaaacaguuaccccaaauuaagcaagucuuauauaaaugacaagggcaaagaaguacugguucuuuggggcauccaccacccuuccacgucagcugaucaacagagcuuguaccagaacgccgacgcguacguguucgucgggaccagucgcuauucuaagaaauuuaagccagagauugcaauccgacccaaagugcgugaucaggagggaagaaugaauuacuauuggacucugguggaaccuggugacaagauuacauucgaggccacuggcaaccuagucguuccaagguacgcuuuugccauggaacggaacgcaggguccggaaucauaauuagcgauaccccggugcaugacugcaauacaaccugucaaacgcccaaaggcgcuaucaacacuucgcucccuuuccagaauauucacccaaucacaaucgguaagugccccaaguauguaaaaucuccuaagcugcgccuugccuccgggaugagaaacgugccauuuauucagucaaggggacuguucggcgcgauaaccggcuuuaucgaggaaggguggacuggaauggucgacgguugguacggcuuccaucaccagaaugagcaagggaguggauaugccgcagauuugaaaagcacacagaacgcuauugacgagaucaccaauaaggugaacuccguuauagagaaaaugaauacgcaguucaccgccgugggcaaggaguuuaaccaccucgaaaagcggauugagaaucugaacaaaaaggucgaugacgguuucuuagauaucuggacauacaaugcugaacugcucgugcuucuggagaacgagcgcacuuuggacuaccaugauucuaauguuaaaaaccuauaugaaaagguacgaagccagcugaaaaacaaugccaaggagaucgggaacggcuguuuugaguucuaccacaagugcgacaauaccuguauggaaucagugaaaaacggaacauaugauuaccccaaguauagugaagaggcaaaacucaauagagaggaaauugacggcgucaagcuggaguccacuaggaucuaccaaauucuugccauauauagcaccguggcuucuucacuggucuuggugguuagucucggggcgaucagcuuuuggaugugcuccaacggaucucugcagugccggauuuguaucuga

SEQ ID NO: 131984 - RNA, 1701 nt, Artificial Sequence; identical to SEQ ID NO: 130704
  derived and/or modified CDS sequence (opt3) from hemagglutinin__InfluenzaA__ACZ98671

SEQ ID NO: 131985 - RNA, 1701 nt, Artificial Sequence; identical to SEQ ID NO: 130704
  derived and/or modified CDS sequence (opt3) from hemagglutinin__InfluenzaA__ACZ98681

SEQ ID NO: 131986 - RNA, 1701 nt, Artificial Sequence; identical to SEQ ID NO: 130717
  derived and/or modified CDS sequence (opt3) from hemagglutinin__InfluenzaA__ACZ98691

SEQ ID NO: 131987 - RNA, 1701 nt, Artificial Sequence
  derived and/or modified CDS sequence (opt3) from hemagglutinin__InfluenzaA__ADA60799
augaaggccauccuggugguccuccuuuacaccuucgcuacagcaaacgccgacacucugugcauuggcuaucacgcgaauaacagcacggauaccguugacacaguguuggagagaaauguaacugugacccauuccgucaacuuacuggaagauaaacacaaugggaagcuauguaaacucaggggaguggcuccccugcaucuugguaagugcaacauagccggcuggauccuggggaauccugagugugaaucuuugucaacagcaaguagcugguccuacauuguugagaccucuucgucagacaacggaacuugcuauccaggcgauuuuaucgacuacgaggagcuccgggagcagcugagcaguguguccucuuucgaacgcuuugagauuuucccgaaaacaagcuccuggcccaaucacgauucaaacaagggugucaccgccgcuuguccucaugcaggggccaagaguuuuuauaaaaaucugaucuggcucgugaagaaaggaaacagcuacccaaaguuaucuaaauccuauauaaaugacaagggcaaggaaguacugguucuuuggggcauccaccaccccucaacgagcgcugaucaacagaguuuguaccagaacgccgacgcguacguguucgucgggacuucucgauauuccaaaaaguuuaaaccugagauugcaauccguccaaaggugagagaucaggagggaaggaugaauuacuauuggacccugguggaacccggugacaaaauuacauucgaggccacuggcaaccuagucguuccucgguacgcuuuugccauggaacgcaacgcagggagcggaaucauaauuucggauaccccagugcaugacugcaauacaaccugucaaacgccgaagggcgcuaucaacacuucucuccccuuccagaauauucacccuaucacaaucgguaaaugcccaaaguauguaaaguccaccaaacugagacuugccacugggcugaggaacauucccucaauacagagucggggauuguuuggcgcgaucgccggcuucauugaagggggauggacagguaugguggacggcugguacggguaucaucaccagaaugaacaaggaagcggcuacgcagcugaucucaaguccacccagaacgccaucgacgagauaacgaauaaagucaacucugugauugagaagaugaauacccaguuuacagcuguugguaaagaguucaaccaccuggaaaagcgcaucgaaaauuuaaacaagaaaguggaugacggguuccuggauaucuggacuuacaaugccgagcuccuuguccuguuggaaaacgagcgaacccuagacuaucaugauagcaaugugaagaaccuguacgagaaaguaagaucacagcucaagaacaaugcaaaagaaauuggcaacggauguuuugaguucuaucacaagugcgacaauacauguauggaaaguguuaagaacggcacuuacgauuauccuaaauacuccgaggaagccaagcugaauagggaggagaucgacggggugaaacuugaaagcacccggauuuaucaaauacuggcuaucuacucuacagucgcgucaaguuuggugcucgucgugagccugggagcaauuuccuuuuggaugugcucuaacgguucguuacagugccguaucuguaucuga

SEQ ID NO: 131988 - RNA, 1701 nt, Artificial Sequence; identical to SEQ ID NO: 131881
  derived and/or modified CDS sequence (opt3) from hemagglutinin__InfluenzaA__ADA69302

SEQ ID NO: 131989 - RNA, 1701 nt, Artificial Sequence; identical to SEQ ID NO: 131881
  derived and/or modified CDS sequence (opt3) from hemagglutinin__InfluenzaA__ADA69312

SEQ ID NO: 131990 - RNA, 1701 nt, Artificial Sequence; identical to SEQ ID NO: 131881
  derived and/or modified CDS sequence (opt3) from hemagglutinin__InfluenzaA__ADA69322

SEQ ID NO: 131991 - RNA, 1701 nt, Artificial Sequence; identical to SEQ ID NO: 131881
  derived and/or modified CDS sequence (opt3) from hemagglutinin__InfluenzaA__ADA69332

SEQ ID NO: 131992 - RNA, 1701 nt, Artificial Sequence; identical to SEQ ID NO: 131818
  derived and/or modified CDS sequence (opt3) from hemagglutinin__InfluenzaA__ADA70329

SEQ ID NO: 131993 - RNA, 1698 nt, Artificial Sequence
  derived and/or modified CDS sequence (opt3) from hemagglutinin__InfluenzaA__ADA71150
augaaggugaaacugcucguccuucugugcaccuucacagccacuuacgcugacacgaucuguauuggcuaucacgcaaacaauagcaccgauacaguugacacuguguuggagaagaacguaaccgugacacauuccgucaauuuaguggaaaacucucacaaugggaaacugugccuacucaagggaauagcgccccugcagcuugguaacuguucaguugccggcuggauccuggggaauccugagugcgaauugcucauuaguaaagagagcugguccuacaucguggaaaagccaaacccggagaauggaaccuguuaucccggccauuuugcugauuacgaggaacugagagagcaacugucuucggucagcucauucgaaagguuugagauuuucccuaaggagaguuccuggccaaaccacacugugacagguguaucugccagcugcucccauaauggggaaucaaguuuuuaucggaaccucuuauggcugaccggaaagaauggccuuuaccccaacuugagcaagucuuaugcaaauaacaaagagaaggaaguucuggugcuauggggcguccaccacccuccauccaucucaaaccagaaaacgcucuaccauacugagaaugccuacgugagcguggucaguucucacuauucccgcaaguucacccccgaaauagcuaagcgaccuaaaguucgugaccaggaggggagaaucaacuacuauuggacacugcuugagccaggagauacuauuaucuuugaagcaaaugguaaccugauugccccgagguacgcuuucgccuugagccggggcuuugggucgggaaucauaaauucuaacgcgcccauggacaagugugaugcaaaaugccagaccccucaaggcgccauuaauuccucacucccauuccagaacgugcaucccguaacaaucggugaguguccuaaguaugugcgcagugcuaaacugagaauggucaccggguuaaggaauauuccaagcauccagucccggggacuguuuggcgccaucgcaggcuucauugaagggggauggacggguaugguggacggcugguacggguaucaccaccagaacgagcaaggaucuggcuacgcugccgaucagaaaagcacucagaaugcgauaaacgguaucaccaaaaagguuaauucagugauugaaaagaugaacacacaguuuacugccgucgggaaagaguucaauaagcucgagcgccgaauggaaaaccuuaacaaaaagguggacgauggcuucaucgacauauggacauacaaugcagagcuguugguacuacuggaaaacgagagaacccucgauuuucaugacaguaauguuaaaaaccuguaugaaaaggugaagucccaacuuaaaaauaacgcuaaggagauuggaaauggcugcuucgaguuuuaccacaaauguaacgacgaaugcauggagagcgucaagaaugggacguaugauuaccccaaauauucugaagagucaaagcugaacagggagaagaucgacggagugaaauuggaaaguaugggugucuaccagauccucgccauuuauagcaccguggcuuccucucugguuuuacuggugucgcuaggcgccaucagcuucuggaugugcuccaaugggucacuccagugucggauuugcauauga

SEQ ID NO: 131994 - RNA, 1701 nt, Artificial Sequence
  derived and/or modified CDS sequence (opt3) from hemagglutinin__InfluenzaA__ADA71152
augaagaccaucauugcccugagcuacauacucugccuuguguucgcucagaaacugcccggcaacgacaauuccacagcaacuuuguguuuagggcaccaugccgucccuaacggaacgaucguuaagaccauuacaaaugaucaaaucgaggugacuaacgcgaccgaacugguacagucuucaaguacaggugagauuugcgacagcccacaccagauccuagauggcgggaauuguacccucauagacgcucugcuuggagauccgcagugcgacggcuuucaaaacaaaaagugggaucuguucguggaaagauccaaagccuauucuaauuguuaccccuaugacgucccugauuacgcaucguugaggucacucguggccagcagugguacucuggaguuuaacaaugaauccuucaacuggacagggguuacccagaauggaacgucuagcgcuugcauccggcgcuccaacaauucauuuuucagucgacugaacuggcucacucauuuaaaguuuaaguauccagcacugaaugugaccaugcccaacaacgagcaguucgacaaacuuuacauuuggggcguccaccauccuggcacagauaaugaccagaucuuuuuguaugcccaagcuagcgggcguauuacugugucuaccaagagaucccagcagacaguaaucccaaacauaggaucaaggccccggguucgcaauauuccuagcagaaucaguauuuacuggaccaucgugaaaccaggugauauccugcuaauuaacucuacgggcaaucucauagccccgaggggguacuucaagauccgguccggaaaaagcucgauuaugcgcucugacgcgcccaucggcaaguguaacuccgagugcauaacuccuaaugguucaauuccaaacgacaagcccuuucagaaugucaaccgaaucacauauggggcauguccuagauacgugaaacaaaauacccugaagcuggccacuggaaugaggaacgugccagaaaaacagacacggggcaucuucggcgcuauugccggguuuaucgagaauggaugggaagguauggucgauggcugguauggguuccgucaccagaacagugagggacgcggccaagcagcugaccuuaagagcacccaggccgcgauugaucagauaaaugguaaauugaacagacucaucgggaagacgaacgagaaauuccaccagauugaaaaggaguuuuccgaaguugagggcaggauccaagaccuggaaaaguacguggaggauaccaaaaucgacuuauggucuuauaaugccgagcugcucguagcacuugaaaaccagcauacaauugaucugacugacagcgagaugaauaaguuguucgagaaaaccaagaaacagcuacgggaaaacgcugaagauaugggaaauggcugcuuuaagauauaccacaagugugacaacgccugcaucgggucaauucgaaauggaacauaugaucaugacguguaccgcgacgaggcucugaacaauagauuccagaucaaaggugucgagcucaagaguggcuacaaagauuggauucuguggaucuccuuugccauaagcugcuuccuucuguguguggcauugcucggguuuaucaugugggccugccaaaagggaaacauuagguguaauaucugcauuuga

SEQ ID NO: 131995 - RNA, 1698 nt, Artificial Sequence
  derived and/or modified CDS sequence (opt3) from hemagglutinin__InfluenzaA__ADA71154
augaaggugaaacugcucguccuucugugcaccuucacagccacuuacgcugacacgaucuguauuggcuaucacgcaaacaauagcaccgauacaguugacacuguguuggagaagaacguaaccgugacacauuccgucaauuuacuggaaaacucucacaaugggaaacuaugccuccugaagggaauagcgccccuucagcuggguaacuguucaguggccggcuggaucuuggggaauagugagugcgaacuccugauuagcaaagaguccuggucuuacaucguugaaaagccuaacccagagaauggaaccuguuauuuuggccauuucgcugauuacgaggaacugagagagcaauuugguucggugagcucauucgaaagguuugagauuuucccgaaggagaguuccuggcccaaccacacugucacaggggugucugccagcugcucccauaauggagaaucaaguuuuuaucggaaccucuuauggcugaccggcaaaaauggccuuuacccuaacuugagcaagucuuaugcaaauaacaaagagaaggaaguacugguucuauggggagugcaccacccacccuccaucaacgaccagaaaacgcucuaccauacugagaaugccuacgucucaguggugagcagucacuauucucgcaaguucaccccugaaauagcuaagcgaccaaaaguccgugaucaggaggggagaaucaacuacuauuggacacugcuugagcccagggacacuauuaucuuugaagcaaaugguaaccugauugccccucgguacgcuuucgccuugucccgcggcuuugggagcggaaucauaaauucgaacgcgccaauggauaagugugacgcaaaaugccagaccccgcaaggcgccauuaauucuucccuccccuuccagaacguucauccugugacaaucggugaguguccaaaguauguaagaucagcuaaacugaggauggugaccggguuacggaauauucccaguauccagagccgcggacuguuuggcgccaucgcaggcuucauugaagggggauggacggguauggucgauggcugguacggguaucaccaccagaacgagcaaggauccggcuacgcugccgaccagaagucuacucagaaugcgauaaacgguaucacaaauaaagugaacagcguuauugaaaagaugaauacccaguucacugccguggggaaggaguuuaacaaacucgagcgaagaauggaaaaccuuaauaagaaagucgaugacggcuucaucgauauauggacauacaacgcagagcuguuggugcuacuggaaaaugagaggacccucgacuuucaugacucaaacguaaagaaucuguaugaaaaaguuaagagucaacuuaagaacaaugcuaaagagauuggaaacggcugcuucgaguuuuaccacaaguguaaugaugaaugcauggaguccgugaaaaacgggacguaugacuacccuaaguauagcgaagagucuaaacugaaucgggagaagaucgauggagucaaguuggaaucaauggguguguaccagauccucgccauuuauaguaccgucgcuagcucccugguguuacugguuucucuaggcgccaucucguucuggaugugcagcaacgggucccuccagugucguauuugcauauga

SEQ ID NO: 131996 - RNA, 1698 nt, Artificial Sequence
  derived and/or modified CDS sequence (opt3) from hemagglutinin__InfluenzaA__ADA71158
augaaggugaaacugcucguccuucugugcaccuucacagccacuuacgcugacacgaucuguauuggcuaucacgcaaacaauagcaccgauacaguugacacuguguuggagaagaacguaaccgugacacauuccgucaauuuacuggaaaacucucacaaugggaaacuaugccuccugaagggaauagcgccccuucagcuggguaacuguucaguggccggcuggaucuuggggaauccugagugcgaacuccugauuaguaaagagaccuggagcuacaucguugaaaagccaaacccggagaauggaacuuguuaucccggccauuuugcugauuacgaggaacugagagagcaacucuccucugugucgucauucgaaagguuugagauuuucccuaaggagagcaguuggccaaaccacacagucaccgguguguccgccucuugcagccauaauggggaauccucauuuuaucggaacuuacuguggcuuacgggcaaaaauggauuguaccccaaccugaguaagagcuaugcaaauaacaaagagaaggaaguucuaguacucuggggcgugcaccacccuccaucuaucaacgaccagcgcacucuguaccauaccgagaaugccuacgucuccguggugucaagccacuauagucgaaaauucacacccgaaauagcuaagcguccuaaggucagagaucaggaggggaggaucaacuacuauuggacucuucuggagccacgggacaccauuaucuuugaagcaaauggaaacuugauugccccgcgcuacgcuuucgcccucucuagagguuuuggcuccgggaucauaaauagcaacgcgcccauggauaaaugugacgcaaagugccagacaccucaaggagccauuaauucgucucugccauuccagaacguucaucccgugaccaucggcgaguguccuaaauauguaagguccgcuaaguuacggauggugacgggucugcgcaauacuccaucaauucagagucgagggcucuuuggagccaucgcaggcuucaucgaaggcggguggacaggaauggucgaugguugguacggcuaucaccaccagaacgagcaagggagcggauacgcugccgaccagaaauccacccagaaugcgauuaacggcauaacuaauaaggugaacucuguuaucgaaaagaugaauacacaguuuaccgccguggguaaggaguucaacaaacuugagagccugauggauauuuugaacaaaaaggucgacgauggguucaucgacauauggacguacaaugcagaacuacuggugcuccuggagaacgaaagaacccuugacuuucaugauucaaauguuaaaaaccuguaugagaagguaaaaagucaauugaagaauaacgcuaaggaaauuggcaauggaugcuucgaguuuuaccacaaauguaacgacgagugcauggaauccgugaagaauggcacauaugauuaccccaaauauagcgaggaaucuaagcucaacagggagaaaaucgacggggucaagcuggagucaaugggaguguaccagaucuuagccauuuauaguacugucgcuagcucccuggugcuacucguuucucugggugccaucucguucuggaugugcagcaauggcucccuucagugucggauuugcauauga

SEQ ID NO: 131997 - RNA, 1701 nt, Artificial Sequence; identical to SEQ ID NO: 130482
  derived and/or modified CDS sequence (opt3) from hemagglutinin__InfluenzaA__ADA71162

SEQ ID NO: 131998 - RNA, 1698 nt, Artificial Sequence
  derived and/or modified CDS sequence (opt3) from hemagglutinin__InfluenzaA__ADA71164
augaaggugaaacugcucguccuucugugcaccuucacagccacuuacgcugacacgaucuguauuggcuaucacgcaaacaauagcaccgauacaguugacacuguguuggagaagaacguaaccgugacacauuccgucaauuuacuggaaaacucucacaaugggaaacuaugccuccugaagggaauagcgccccuucagcuggguaacuguucaguggccggcuggaucuuggggaauccugagugcgaacuccugguuaguaaagagagcugguccuacauuguggaaaagccaaacccggagaauggaaccuguuaucccggccauuuugcugauuacgaggaacugagagagcaacucucuucggucagcucauucgaaagguuugagaucuucccuaaggagaguuccuggccaaaccacacugugacaggugccucugcaagcugcucccauaauggggaaaacucauuuuaucggaauuuacuguggcuuaccggcaaaaacggauuguaccccaaucugaguaagagcuaugccaacaacaaagagaaggaagugcuaguucucuggggcgugcaccacccuccaucuauugcugaccagaaaacgcuguaccauacugagaaugcauacgucuccguggugucaagccacuauagucgcaaguucacccccgaaaucgccaagcgaccuaaaguccgugaucaggaggggagaauacauuacuauuggacacuucuggagccaggagacacuaucauuuuugaagcuaacgguaauuugaucgccccgagguacgcguucgcacucucucggggcuuuggguccggaauuaucaacagcaaugcccccauggauaagugugacgcuaccugccagacaccucaaggcgccauaaacucgucucugccauuccagaauguucaccccgugaccauuggugaguguccuaaauauguacgcuccgcaaaguuaagaauggugacggggcugaggaacaucccaucaauucagagucggggacucuuuggcgcuaucgccggcuucaucgaagggggauggacugguauggucgauggcugguacggguaucaccaucagaaugagcaaggaagcggcuacgcggccgaccagaaauccacacagaacgcaauuaaugguauaaccaacaagguaaauucuguuaucgaaaagaugaacacucaguuuacagcuguggggaaggaguucaauaaacuugagcgccgaauggaaaaccugaacaaaaaggucgaugacggcuucauugauaucuggaccuacaaugccgaguugcuagugcugcucgaaaacgagagaacgcuggacuuucacgacagcaauguuaaaaaccuuuaugaaaagguaauaucacaacugaaaauuaaugcuaaggauuugggauacggcugcuucgaguuuuaucauaaguguaacgacgagugcauggaaagugugaaaaaugggaccuacgauuaucccaaguacuccgaggaaagcaaacucaacagggagaagaucgacggagucaaacuggagucuauggguguguaucagaucuuagccauuuacucaacagucgcaaguagccuggugcuacucguuucccugggcgccaucucuuucuggaugugcucgaaugggagccuucagugucggauuugcauauga

SEQ ID NO: 131999 - RNA, 1698 nt, Artificial Sequence
  derived and/or modified CDS sequence (opt3) from hemagglutinin__InfluenzaA__ADA71168
augaaggugaaacugcucguccuucugugcaccuucacagccacuuacgcugacacgaucuguauuggcuaucacgcaaacaauagcaccgauacaguugacacuguguuggagaagaacguaaccgugacacauuccgucaauuuacuggaagauaaccacaaugggaaacuaugccuccugaagggaaaagcgccccuucagcuggguaacuguucuguggccggcuggauauuggggaauccugagugcggacuccugaucucaaaggaaaguuggagcuacauuguugagagaccaaacccggaaaauggcaccuguuaucccggucauuuugcugacuacgaggagcugagggaacaacucuccucugugucgucauucgagcgguuugaaaucuucccuaaggagagcaguuggccaaaccacacugucacagggguguccgccucuugcagccauaauggagaguccucauuuuauaaaaacuuacuguggcuuaccggcaagaauggcuuguaccccaaccugaguaaaagcuaugcaaauaacaaggaaaaagagguucuaguacucuggggagugcaccacccuccaaacauugggguccagaugacgcuguaccauaaggaaaaugccuacgugucuguggucuccucacacuauagccgcaaguucacucccgagaucguuaaacgaccuaaggugcgugaucaggaagguagaauaaacuacuauuggacccuucuggagccaggcgacacaaucauuuuugaggcuaaugggaacuugaucgcaccgagguacgccuucgcucucagucggggauuuggcucugguauuaucaauuccaacgcccccauggaugaaugugacgcgaaaugccagacuccucaaggggcaauaaauagcucgcugccauuccagaacguacaucccgugaccauuggagaguguccuaaguauguccgcucugccaaauuaagaauggugacaggccugaggaauaucccauccauucagucacggggccucuuuggggcuaucgccggauucaucgaagguggcuggaccgggaugguugauggaugguacggcuaucaccaccagaacgagcaagguaguggguacgcagcugaccaaaagagcacgcagaaugccauuaacggcauaacuaauaaagugaacuccgucaucgaaaagaugaauacacaguuuaccgcggugggaaaggaguucaacaaacuugagcgccgaauggaaaaccugaauaagaaaguagaugacggcuucauugauaucuggacuuacaacgccgaguugcuaguucugcucgaaaaugagagaacacuggacuuucaugacucuaacgugaagaaucuuuaugaaaaagucaagagccagcugaagaacaaugcaaaagagauagggaacggaugcuucgaguuuuaccacaaguguaaugaugaaugcauggagucagugaaaaacgguaccuaugacuaccccaaguauagugaagaguccaaauugaauagggagaagauugauggcgucaagcucgaaagcauggggguguaccagauccuggcuaucuauucuacgguugccucaaguuuagugcugcuaguaagccucggagcuauuuccuucuggaugugcucuaacggcucgcugcagugucggaucugcauuuga

SEQ ID NO: 132000 - RNA, 1698 nt, Artificial Sequence
  derived and/or modified CDS sequence (opt3) from hemagglutinin__InfluenzaA__ADA71170
augaaggugaaacugcucguccuucugugcaccuucacagccacuuacgcugacacgaucuguauuggcuaucacgcaaacaauagcaccgauacaguugacacuguguuggagaagaacgggaccguaacacccuccggaaauuuaguggaaaacucuccuaaugguaaacugugccuacucaagggcauaaccccacugcagcuugggaaauguucagucgccggauggauccugggcaacccgaagugggaguugcucgugaguaaggaaagcugguccuacauugguaaaaagcccaauccugagaacgggacuugcuauccaggacauuuucccuacuaugaggagcugagagagcaacugucuucgguuagcagcuucgaaagguuugagaucuucccuaaagaaaguuccuggccaaaucacacagugaccggcgcgucugcuagcuguucccauaacggcgaaaauucauuuuaccggaaccucuuauggcugacggggaagaauggacuuuaucccaacuugaguaaaagcuacgccaauaacaaggagaaggaaguccuggugcuaugggguguacaccauccuccaaacauugcagaucagaaaacucucuaccacaccgagaaugccuauguuucuguggucuccucacacuacagccgcaaguucacaccggaaaucgcuaaacgacccaaggugcgugaccaggagggcagaauaaacuauuacuggacucugcuugaaccuggggauaccaucauuuuugaggcaaauggaaaccugaucgccccaagguaugcuuucgccuugagucggggcuuugguucugggauuaucaauuccaacgcgcccauggacaaaugcgaugcaaagugucagacaccucaaggagccauaaauagcucgcucccauuccagaacgugcaucccgucaccauuggcgagugcccgaaauacguucgcucugcuaagcugagaauggugacgggcuuaaggaauaucccuuccauucagucacgggggcuguuuggagccaucgcagguuucaucgaaggcggguggacuggaaugguagacggcugguaugguuaccaccaucagaacgagcaagggaguggcuacgcugccgaucagaagucaacacagaaugcgauuaacggaauaaccaauaaagugaacuccgucaucgaaaagaugaauacucaguuuacagccgugggcaaagaguucaacaagcucgaacgccgaauggagaaccuuaauaaaaagguugacgauggguucauugacaucuggaccuauaacgcagagcuguuggugcuacuggaaaaugagagaacgcucgauuuucacgacucuaacgucaagaaucuguacgaaaaaguaaagagccaacuuaaaaacaaugcuaaggagauaggaaacgguuguuucgaauuuuaucacaaaugcaaugacgaguguauggagucagugaagaacggcaccuacgauuaucccaaguacagugaagaguccaaacugaauagggaaaagauugacgggguuaaauuggagagcaugggaguguaucagauccucgccaucuacucuacagucgcuucaagucugguguuacuggucagccuaggcgccauuuccuucuggaugugcucuaacgguucgcuccagugccggaucuguauuuga

SEQ ID NO: 132001 - RNA, 1701 nt, Artificial Sequence
  derived and/or modified CDS sequence (opt3) from hemagglutinin__InfluenzaA__ADA71172
augaagaccaucauugcccugagcuacauacucugccuuguguucacacagaaacugcccggcaacgacaauuccacugcuacguuguguuuagggcaccaugcagucccuaacggaaccaucguuaagacaauuacuaaugaucaaaucgaggugaccaacgccacagaacugguacagucuucaaguaccggugagauuugcgacagcccacaccagauccuagauggcgaaaauuguacucucauagacgcgcugcuuggggauccgcagugcgacggauuucaaaacaaaaagugggaucuguucguggagagauccaaggcuuauucuaauuguuaccccuaugacgucccugauuacgccucguugaggucacucguggcaagcaguggcacacuggaauuuaacaaugaguccuucaacuggaccgguguuacgcagaaugggacuucuagcgccugcauccggcgcuccaacaauucauuuuucagucgacugaacuggcucacccauuuaaaauuuaaguauccagcucugaaugugacaaugcccaacaacgagcaguucgacaaacuuuacauuuggggaguccaccauccuggcacugauaaugaccagaucuuuuuguaugcacaagccagcggccguauuaccgugucuacaaagagaucccagcagaccguaaucccaaacauagggucaaggccccggguucgcaauauuccuagcagaaucaguauuuacuggacgaucgugaaaccaggagauauccugcuaauuaacucuacugguaaucucauagcuccgaggggcuacuucaagauccgguccgggaaaagcucgauuaugcgcucugacgcccccaucggaaaguguaacuccgaaugcauaacaccuaauggcucaauuccaaacgacaagcccuuucagaaugucaaccgaaucaccuauggugcguguccuagauacgugaaacaaaauacucugaagcuggcaacagggaugaggaacgugccagagaaacagacccggggaaucuucggcgccauugcuggcuuuaucgaaaaugggugggagggaauggucgaugguugguauggcuuccgucaccagaacagugaggggcgcggacaagccgcagaccuuaagagcacgcaggcugccauugaucagauaaauggcaaauugaacagacucaucgguaagaccaacgaaaaauuccaccagauugagaaggaauuuuccgagguugaagggaggauccaagaccuggagaaguacguggaggauacaaaaaucgacuuauggucuuauaaugcggaacugcucguagcccuugagaaccagcauacuauugaucugaccgacagcgaaaugaauaaguuguucgagaaaacaaagaaacagcuacgggaaaacgcagaggauaugggcaauggaugcuuuaagauauaccacaagugugacaacgcuugcaucggcucaauucgaaaugggacuuaugaucaugacguguaccgcgacgaggcccugaacaauagauuccagaucaaaggagucgaacucaagagugguuacaaagauuggauucuguggaucuccuuugcuauaagcugcuuccuucuguguguggccuugcucggcuuuaucaugugggcaugccaaaaggggaacauuagguguaauaucugcauuuga

SEQ ID NO: 132002 - RNA, 1698 nt, Artificial Sequence
  derived and/or modified CDS sequence (opt3) from hemagglutinin__InfluenzaA__ADA71176
augaaggugaaacugcucguccuucugugcaccuucacagccacuuacgcugacacgaucuguauuggcuaucacgcaaacaauagcaccgauacaguugacacuguguuggagaagaacguaaccgugacacauuccgucaauuuacuggaaaacucucacaaugggaaacuaugccuccugaagggaauagcgccccuucagcuggguaacuguucaguggccggcuggaucuuggggaauccugagugcgaacuccugauuaguaaagagagcugguccuacaucguugaaaagccaaacccggagaauggaaccuguuaucccggccauuuugcugauuacgaggaacugagagagcaacucucuucggugagcucauucgaaagguuugagauuuucccuaaggagaguuccuggccaaaccacacugucacaggugccucugcaagcugcucccauaauggggaaaacucauuuuaucggaauuuacuguggcuuaccggcaaaaacggauuguaccccaaucugaguaagagcuaugccaacaacaaagagaaggaagugcuaguacucuggggcguucaccacccuccaaauaucgcuaaccagaaaacgcuguaccauacugagaaugcauacgugucugucguguccucacacuauagccgcaaguucacccccgaaauagccaagcgaccuaaagugcgugaccaggaggggagaaucaacuacuauuggacacuucuggagccaggagauacuauuaucuuugaagcuaaugguaacuugauugccccgagguacgcguucgcacucagucggggcuuugggucuggaaucauaaauuccaacgcccccauggacaagugugaugcuaccugccagacaccucaaggcgccauuaauagcucgcugccauuccagaacguccaucccguuaccaucggugaguguccuaaauaugugcgcucugcaaaguuaagaaugguaacggggcugaggaauauuccauccauccagucacggggacucuuuggcgcuaucgccggcuucauugaagggggauggacugguaugguggacggcugguacggguaucaccaccagaacgagcaaggaaguggcuacgcggccgaucagaaaagcacacagaaugcaauaaacgguaucaccaauaaggucaacuccgugauugaaaagaugaacacucaguuuacagcuguugggaaggaguucaauaaacuugagcgccgaauggaaaaccugaauaaaaagguggacgauggcuucaucgacauauggaccuacaacgccgaguugcuaguccugcucgaaaaugagagaacgcuggauuuucaugacucuaacgugaaaaaucuuuaugaaaagguaaaaagccaacugaagaacaaugcuaaggagauuggaaacggcugcuucgaguuuuaccacaaauguaaugacgaaugcauggagucaguuaagaacgggaccuaugauuaccccaaauauagugaagaguccaaguugaauagggagaaaaucgacggagugaagcucgaaagcaugggugucuaccagauccuggccauuuauucuacaguggcaucaaguuuaguccugcuagugagccucggcgccaucuccuucuggaugugcucuaacgggucgcugcagugucggauuugcauauga

SEQ ID NO: 132003 - RNA, 1701 nt, Artificial Sequence; identical to SEQ ID NO: 131818
  derived and/or modified CDS sequence (opt3) from hemagglutinin__InfluenzaA__ADA71181

SEQ ID NO: 132004 - RNA, 1701 nt, Artificial Sequence; identical to SEQ ID NO: 131818
  derived and/or modified CDS sequence (opt3) from hemagglutinin__InfluenzaA__ADA71191

SEQ ID NO: 132005 - RNA, 1701 nt, Artificial Sequence
  derived and/or modified CDS sequence (opt3) from hemagglutinin__InfluenzaA__ADA79587
augaaggccauccuggugguccuccuuuacaccuucgcuacagcaaacgccgacacucugugcauuggcuaucacgcgaauaacagcacggauaccguugacacaguguuggagaagaauguaacugugacccauuccgucaacuuacuggaagauaagcacaaugggaaacuauguaagcucagaggaguggcuccccugcaucuugguaaaugcaacauagccggcuggauccuggggaauccugagugugaaucuuugucaacagcaaacaguuggagcuacauuguugagaccuccucuucggacaauggaacuugcuauccaggcgauuuuaucgacuacgaggagcucagggagcagcugucaagcgugaguuccuucgaacgguuugagauuuucccgaagacaucuagcuggcccaaccacgauuccaauaagggugucaccgccgcuuguccucaugcaggggccaaaucauuuuauaagaaccugaucuggcucgugaaaaagggaaauaguuacccaaaauuaagcaagucuuauauaaacgacaagggcaaagaaguacugguucuuuggggcauccaccaccccuccacgucagcugaucaacagagcuuguaccagaaugccgacgcguacguguucgucgggaccagucgcuauucuaagaaauuuaagccugagauugcaauccgaccaaaagugcgugaucaggagggaagaaugaacuacuauuggacucugguggaacccggugacaagauuacauucgaggccacuggcaaccuagucguuccuagguacgcuuuugccauggaacggaaugcaggguccggaaucauaauuagcgauaccccagugcaugacugcaacacaaccugucaaacgccgaaaggcgcuaucaauacuucgcuccccuuccagaacauucacccuaucacaaucgguaagugcccaaaguauguaaaaucuaccaagcugcgccuugccacugggcugagaaauauucccuccauacagucaaggggauuguuuggcgcgaucgccggcuucauugaagggggauggacagguaugguggacggcugguacggguaucaucaccagaacgaacaaggaaguggcuacgcagcugaucucaaaagcacccagaaugccaucgacgagauaacgaacaaggucaauuccgugauugagaaaaugaacacccaguuuacagcuguugguaaggaguucaaucaccuggaaaagcggaucgaaaacuuaaauaaaaagguggaugacggguuccuggauaucuggacuuacaacgccgagcuccuuguccuguuggaaaaugagcgcacccuagacuaucaugauucuaacgugaaaaaccuguacgagaagguacgaagccagcucaaaaauaacgcaaaggaaauuggcaauggauguuuugaguucuaucacaagugcgacaacacauguauggaaucaguuaaaaauggcacuuacgauuauccuaaguacagugaggaagccaaacugaacagagaggagaucgacggggugaaacuugaauccaccaggauuuaucaaauacuggcuaucuacagcacagucgcgucuucauuggugcucgucgugagucugggagcaauuagcuuuuggaugugcuccaaugguucuuuacagugccggaucuguaucuga

SEQ ID NO: 132006 - RNA, 1701 nt, Artificial Sequence
  derived and/or modified CDS sequence (opt3) from hemagglutinin__InfluenzaA__ADA79607
augaaggccauccuggugguccuccuuuacaccuucgcuacagcaaacgccgacacucugugcauuggcuaucacgcgaauaacagcacggauaccguugacacaguguuggagaaaaauguaacugugacccauuccgucaacuuacuggaagauaagcacaaugggaaacuauguaagcucagaggaguggcuccccugcaucuugguaaaugcaacauagccggcuggauccuggggaauccugagugugaaucuuugucaacagcaaguagcugguccuacauuguugagaccucuucgucagacaacggaacuugcuauccaggcgauuuuaucgacuacgaagaacucagggagcagcugagcaguguguccucuuucgaacgguuugagauuuucccgaagacaagcuccuggcccaaucacgauucaaacaagggugucaccgccgcuuguccucaugcaggggccaaaggauuuuauaagaaucugaucuggcucgugaaaaagggcaacaguuacccaaaauuaagcaagucuuauauaaaugacaagggcaaagaaguacugguucuuugggggauccaccaccccuccacgucagcugaucaacagagcuuguaccagaacgccgacgcguacguguucgucggaaccagucgcuauucuaagaaauuuaagccugagauugcaauccgaccaaaagugcgugaucaggaggguagaaugaauuacuauuggacucugguggaacccggcgacaagauuacauucgaggccacugggaaccuagucguuccuagguacgcuuuugccauggaacggaacgcaggauccggcaucauaauuagcgauaccccagugcaugacugcaauacaaccugucaaacgccgaaaggugcuaucaacacuucgcuccccuuccagaauauucacccuaucacaaucgggaagugcccaaaguauguaaaaucuaccaagcugcgccuugccacuggacugagaaacgugcccuccauucagucaaggggcuuguuuggcgcgauagccggguucaucgagggagguuggacaggcauggucgacgggugguacggauaucaucaccagaaugaacaaggcagugguuacgcagcugaucucaaaagcacccagaacgccauugacgagaucacgaauaaggugaacuccguuauagagaaaaugaauacccaguuuacagcuguggggaaggaguucaaccaccuggagaagcggauugaaaauuuaaacaaaaaggucgaugacggcuuccuggauaucuggacuuacaaugccgagcuccuugugcuguuggaaaacgagcgcacccuagacuaucaugauucuaauguaaagaaccuguacgagaagguucgaagccagcucaaaaacaaugcaaaggaaaucggaaacggcuguuuugaguucuaucacaagugcgacaauacauguauggaaucagugaaaaacgggacuuacgauuauccuaaguacagugaggaagccaaacugaauagagaggagauugacggagucaaacuugaauccaccaggaucuaucaaauucuggcuauauacagcacaguggcgucuucauugguccucgugguuagucugggugcaaucagcuuuuggaugugcuccaacggcucuuuacagugccggauuuguaucuga

SEQ ID NO: 132007 - RNA, 1701 nt, Artificial Sequence
  derived and/or modified CDS sequence (opt3) from hemagglutinin__InfluenzaA__ADA83043
augaaggccauccuggugguccuccuuuacaccuucgcuacagcaaacgccgacacucugugcauuggcuaucacgcgaauaacagcacggauaccguugacacaguguuggagaaaaauguaacugugacccauuccgucaacuuacuggaagauaagcacaaugggaaacuauguaagcucagaggaguggcuccccugcaucuugguaaaugcaacauagccggcuggauccuggggaauccugagugugaaucuuugucaacagcaaguagcugguccuacauuguugagaccucuucgucagacaacggaacuugcuauccaggcgauuuuaucgacuacgaagaacucagggagcagcugagcaguguguccucuuucgaacgguuugagauuuucccgaagacaagcuccuggcccaaucacgauucaaacaagggugucaccgccgcuuguccucaugcaggggccaaaaguuuuuauaagaaucugaucuggcucgugaaaaagggaaacagcuacccaaaauuaucuaaguccuauauaaaugacaagggcaaagaaguacugguucuuuggggcauccaccaccccucaacgagcgcugaucaacagaguuuguaccagaacgccgacgcguacguguucgucgggacuucucgcuauuccaagaaauuuaagccugagauugcaauccgaccaaaagugcgugagagagaaggaaggaugaauuacuauuggacccugguggagcccggugauaagauuacauucgaagccacuggcaaccuagucguuccucgguacgcuuuugccauggagcgcaacgcagggagcggaaucauaauuucggacaccccagugcaugauugcaauacaaccugucagacgccgaaaggcgcuaucaacacuucucuccccuuccaaaauauucacccuaucacaaucgguaagugcccaaaguauguaaaauccaccaagcugagacuugccacugggcugaggaacgugcccucaauucagagucggggauuguuuggcgcgauagccggcuucaucgaagggggauggacagguauggucgacggcugguacggguaucaucaccagaaugagcagggaagcggcuacgcagcugaccucaaauccacccaaaacgccauugaugagaucacgaauaaggugaacucuguuauagaaaagaugaauacccaguuuacagcuguggguaaggaguucaaccaccuggaaaagcgcauugagaauuuaaacaaaaaggucgacgauggguuccuggacaucuggacuuacaaugccgaacuccuugugcuguuggagaacgagcgaacccuagauuaucaugacagcaauguuaaaaaccuguacgaaaagguaagaucacagcucaaaaacaaugcaaaggagaucggcaacggauguuuugaguucuaucacaagugcgauaauacauguauggagagugugaaaaacggcacuuacgacuauccuaaguacuccgaagaggccaaacugaauagggaggaaauugauggggucaaacuugagagcacccggaucuaucagauucuggcuauauacucuacaguggcgucaaguuugguccucgugguuagccugggagcaaucuccuuuuggaugugcucuaacgguucguuacaaugccguauuuguaucuga

SEQ ID NO: 132008 - RNA, 1701 nt, Artificial Sequence
  derived and/or modified CDS sequence (opt3) from hemagglutinin__InfluenzaA__ADA83044
augaaggccauccuggugguccuccuuuacaccuucgcuacagcaaacgccgacacucugugcauuggcuaucacgcgaauaacagcacggauaccguugacacaguguuggagaaaaauguaacugugacccauuccgucaacuuacuggaagauaagcacaaugggaaacuauguaagcucagaggaguggcuccccugcaucuugguaaaugcaacauagccggcuggauccuggggaauccugagugugaaucuuugucaacagcaaguagcugguccuacauuguugagaccucuucgucaaacaauggaacuugcuauccaggcgacuuuaucgauuacgaagaacucagggagcagcugagcaguguguccucuuucgaacgguuugagauuuucccgaagacaagcuccuggcccaaccacgacucaaauaagggugucaccgccgcuuguccucaugcaggggccaaaaguuuuuauaagaaccugaucuggcucgugaaaaaggaaaauagcuacccaaaauuaaacaagucuuauauaaaugauaagggaaaagagguacugguucuuuggggcauccaccaccccuccacgucagcugaccaacagagcuuguaccagaacgccgaugcguacguguucgucggcaccagucgcuauucuaagaaauuuaagccugagauugcaauccgaccaaaagugcgugggcaggaaggaagaaugaacuacuauuggacucugguggagcccggugacaagauuacauucgaagccacuggcaaucuagucguuccuagguacgcuuuugccauggagcggaacgcaggguccggaaucauaauuagcgauaccccagugcaugacugcaauacaaccugucaaacgccgaaaggcgcuaucaacacuucgcuccccuuccagaauauucacccuaucacaaucgguaagugcccaaaguauguaaaaucuaccaagcugcgccuugccacugggcugagaaacgugcccuccauucagucaaggggauuguuuggcgcgauagccggcuucaucgaagggggauggacagguauggucgauggcugguacggguaucaucaccagaaugagcaaggaaguggcuacgcagcugaccucaaaagcacccagaacgccauugacgagaucacgaauaaggugaacuccguuauagaaaagaugaauacccaguuuacagcuguggguaaggaguucaaccaccuggaaaagcggauugagaauuuaaacaaaaaggucgaugacggguuccuggauaucuggacuuacaaugccgaacuccuugugcuguuggagaacgagcgcacccuagacuaucaugauucugacguuaaaaaccuguacgaaaagguacgaagccagcucaaaaauaacgcaaaggagaucggcaauggauguuuugaguucuaucacaagugcgauaacacauguauggagucagugaaaaauggcacuuacgacuauccuaaguacagugaagaggccaaacugaacagagaggaaauugauggggucaaacuugaguccaccaggaucuaucaaauucuggcuauauacagcacaguggcgucuucauugguccucgugguuagucugggagcaaucagcuuuuggaugugcuccaaugguucuuuacagugccggauuuguaucuga

SEQ ID NO: 132009 - RNA, 1701 nt, Artificial Sequence; identical to SEQ ID NO: 130717
  derived and/or modified CDS sequence (opt3) from hemagglutinin__InfluenzaA__ADA83580

SEQ ID NO: 132010 - RNA, 1701 nt, Artificial Sequence; identical to SEQ ID NO: 130717
  derived and/or modified CDS sequence (opt3) from hemagglutinin__InfluenzaA__ADA83587

SEQ ID NO: 132011 - RNA, 1701 nt, Artificial Sequence
  derived and/or modified CDS sequence (opt3) from hemagglutinin__InfluenzaA__ADA83591
augaaggccauccuggugguccuccuuuacaccuucgcuacagcaaacgccgacacucugugcauuggcuaucacgcgaauaacagcacggauaccguugacacaguguuggagaaaaauguaacugugacccauuccgucaacuuacuggaagauaagcacaaugggaaacuauguaagcucagaggaguggcuccccugcaucuugguaaaugcaacauagccggcuggauccuggggaauccugagugugaaucuuugucaacagcaaguagcugguccuacauuguugagaccucuucgucagacaacggaacuugcuauccaggcgauuuuaucgacuacgaggagcucagggagcagcugagcaguguguccucuuucgaacgguuugagauuuucccgaagacaagcuccuggcccaaucacgauucaaacaagggugucaccgccgcuuguccucaugcaggggccaaaaguuuuuauaagaaucugaucuggcucgugaaaaagggaaacagcuacccaaaauuaucuaaguccuauauaaaugacaagggcaaagaaguacugguucuuuggggcauccaccaccccucaacgagcgcugaucaacagaguuuguaccagaacgccgacgcguacguguucgucgggacuucucgcuauuccaagaaauuuaagccugagauuagcauccgaccaaaagugcgugaucaggagggaagaaugaauuacuauuggacccugguggaacccggugacaagauuacauucgaggcaacuggcaaccuagucguuccuagguacgccuuugcuauggaacggaacgccgggucgggaaucauaauuucugauaccccagugcaugacugcaauacaaccugucaaacgccgaaaggcgcaaucaacacuucccuccccuuccagaauauucacccuaucacaaucgguaagugcccaaaguauguaaaaucaaccaagcugcgccuugcuacugggcugagaaacgugcccaguauucagagcaggggauuguuuggcgccauagcgggcuucaucgaagggggauggacagguauggucgacggcugguacggguaucaucaccagaaugaacaaggauccggcuacgccgcagaucucaaaucuacccagaacgcuauugacgagaucacgaauaaggugaacagcguuauagagaaaaugaauacccaguuuacagccguggguaaggaguucaaccaccuggaaaagcggauugaaaauuuaaacaaaaaggucgaugacggguuccuggauaucuggacuuacaaugcugagcuccuugugcuguuggaaaacgagcgcacccuagacuaucaugauucaaauguaaagaaccuguacgagaagguucgaagucagcucaaaaacaaugccaaggaaaucggcaacggauguuuugaguucuaucacaagugcgacaauacauguauggaauccgugaaaaacggcacuuacgauuauccuaaguacagcgaggaagcaaaacugaauagagaggagauugacggggucaaacuugaaucuaccaggaucuaucaaauucuggccauauacucaacaguggcuaguagcuugguccucgugguuucccugggagcgaucucuuuuuggaugugcucgaacgguagcuuacagugccggauuuguaucuga

SEQ ID NO: 132012 - RNA, 1701 nt, Artificial Sequence; identical to SEQ ID NO: 131462
  derived and/or modified CDS sequence (opt3) from hemagglutinin__InfluenzaA__ADA83595

SEQ ID NO: 132013 - RNA, 1701 nt, Artificial Sequence; identical to SEQ ID NO: 130717
  derived and/or modified CDS sequence (opt3) from hemagglutinin__InfluenzaA__ADA83599

SEQ ID NO: 132014 - RNA, 1701 nt, Artificial Sequence; identical to SEQ ID NO: 130717
  derived and/or modified CDS sequence (opt3) from hemagglutinin__InfluenzaA__ADA83603

SEQ ID NO: 132015 - RNA, 1701 nt, Artificial Sequence; identical to SEQ ID NO: 130717
  derived and/or modified CDS sequence (opt3) from hemagglutinin__InfluenzaA__ADA83611

SEQ ID NO: 132016 - RNA, 1701 nt, Artificial Sequence
  derived and/or modified CDS sequence (opt3) from hemagglutinin__InfluenzaA__ADA83615
augaaggccauccuggugguccuccuuuacaccuucgcuacagcaaacgccgacacucugugcauuggcuaucacgcgaauaacagcacggauaccguugacacaguguuggagaaaaauguaacugugacccauuccgucaacuuacuggaagauaagcacaaugggaaacuauguaagcucagaggaguggcuccccugcaucuugguaaaugcaacauagccggcuggauccuggggaauccugagugugaaucuuugucaacagcaaguagcugguccuacauuguugagaccucuucgucagacaacggaacuugcuauccaggcgauuuuaucgacuacgaggagcucagggagcagcugagcaguguguccucuuucgaacgguuugagauuuucccgaagacaagcuccuggcccaaucacgauucaaacaagggugucaccgccgcuuguccucaugcaggggccaaaaguuuuuauaagaaucugaucuggcucgugaaaaagggaaacagcuacccaaaauuaucuaaguccuauauaaaugacaagggcaaagaaguacugguucuuuggggcauccaccaccccucaacgagcgcugaucaacagaguuuguaccagaacgccgacgcguacguguucgucgggacuucucgcuauuccaagaaauuuaagccugagauugcaauccgaccaaaagugcgugaucaggagggaagaaugaauuacuauuggacccugguggaacccggugacaagauuacauucgaggccacuggcaaccuagucguuccuagguacgcuuuugccauggaacggaacgcagggagcggaaucauaauuucggauaccccagugcaugacugcaauacaaccugucaaacgccgaaaggcgcuaucaacacuucucuccccuuccagaauauucacccuaucacaaucgguaagugcccaaaguauguaaaauccaccaagcugcgccuugccacugggcugagaaacgugcccucaauucagaguaggggauuguuuggcgcgauagccggcuucaucgaagggggauggacagguauggucgacggcugguacggguaucaucaccagaaugaacaaggaagcggcuacgcagcugaucucaaauccacccagaacgccauugacgagaucacgaauaaggugaacucuguuauagagaaaaugaauacccaguuuacagcuguggguaaggaguucaaccaccuggaaaagcggauugaaaauuuaaacaaaaaggucgaugacggguuccuggauaucuggacuuacaaugccgagcuccuugugcuguuggaaaacgagcgcacccuagacuaucaugaucugaauguuaaaaaccucuacgagaagguacgaagccagcugaaaaacaaugcaaaggaaaucggcaacggauguuuugaguucuaucacaagugcgacaauacauguauggaaucagugaaaaacggcacuuacgauuauccuaaguacagugaggaagccaaacuuaauagagaggagauugacggggucaagcuggaauccaccaggaucuaucaaauuuuggcuauauacagcacaguggcgucuucacucguccuggugguuaguuuaggagcaaucagcuuuuggaugugcuccaacgguucucugcagugccggauuuguaucuga

SEQ ID NO: 132017 - RNA, 1701 nt, Artificial Sequence
  derived and/or modified CDS sequence (opt3) from hemagglutinin__InfluenzaA__ADA83622
augaaggccauccuggugguccuccuuuacaccuucgcuacagcaaacgccgacacucugugcauuggcuaucacgcgaauaacagcacggauaccguugacacaguguuggagaaaaauguaacugugacccauuccgucaacuuacuggaagauaagcacaaugggaaacuauguaagcucagaggaguggcuccccugcaucuugguaaaugcaacauagccggcuggauccuggggaauccugagugugaaucuuugucaacagcaaguagcugguccuacauuguugagaccucuucgucagacaacggaacuugcuauccaggcgauuuuaucgacuacgaggagcucagggagcagcugagcaguguguccucuuucgaacgguuugagauuuucccgaagacaagcuccuggcccaaucacgauucaaacaagggugucaccgccgcuuguccucaugcaggggccaaaaguuuuuauaagaaucugaucuggcucgugaaaaagggaaacagcuacccaaaauuaucuaaguccuauauaaaugacaagggcaaagaaguacugguucuuuggggcauccaccaccccucaacgagcgcugaucaacagcgcuuguaccagaacgccgacgcguacguguucgucgggaccagucgauauucuaagaaacugaagccugagauugcaauccguccaaaagugagagaucaggagggaaggaugaauuacuauuggacucuaguggaacccggugacaagauuacauuugaggccacuggcaaccucgucguuccucgguacgcuuucgccauggaacgcaacgcaggguccggaaucauaauuagcgauaccccagugcaugacugcaauacaaccugucaaacgccgaaaggcgcuaucaacacuucgcugcccuuucagaauauucacccuaucacaaucgguaagugcccaaaguauguaaaaucuaccaaacuuagacuggccacuggguugaggaacgugcccuccauucagucacggggacucuucggcgcgauagccggcuuuaucgaagggggauggacagguauggucgacggcugguacggguaucaucaccagaaugaacaaggaaguggcuacgcagcugaucugaaaagcacccagaacgccauugacgagaucacgaauaaggugaacuccguuauagagaaaaugaauacccaguucacagcuguggguaaggaauuuaaccacuuagagaagcgcauugaaaaucugaacaaaaaggucgaugacggguuccucgauaucuggacuuacaaugccgagcuucugguguugcuagaaaacgagcgaacccuggacuaucaugauucuaauguaaagaaccucuacgagaagguuagaagccagcugaaaaacaaugcaaaggaaaucggcaacggauguuucgaguuuuaucacaagugcgacaauacauguauggaaucagugaaaaacggcacuuacgauuauccuaaguacagugaggaagccaaacuuaauagggaggagauugacggggucaagcuggaauccacccggaucuaucaaauuuuggcuauauacagcacaguggcgucuucacucguccuggugguuaguuuaggagcaaucagcuucuggaugugcuccaacgguucucugcagugccguauuuguaucuga

SEQ ID NO: 132018 - RNA, 1701 nt, Artificial Sequence; identical to SEQ ID NO: 130717
  derived and/or modified CDS sequence (opt3) from hemagglutinin__InfluenzaA__ADA83633

SEQ ID NO: 132019 - RNA, 1701 nt, Artificial Sequence; identical to SEQ ID NO: 130717
  derived and/or modified CDS sequence (opt3) from hemagglutinin__InfluenzaA__ADA83637

SEQ ID NO: 132020 - RNA, 1701 nt, Artificial Sequence; identical to SEQ ID NO: 130717
  derived and/or modified CDS sequence (opt3) from hemagglutinin__InfluenzaA__ADA83641

SEQ ID NO: 132021 - RNA, 1701 nt, Artificial Sequence; identical to SEQ ID NO: 130717
  derived and/or modified CDS sequence (opt3) from hemagglutinin__InfluenzaA__ADA83645

SEQ ID NO: 132022 - RNA, 1701 nt, Artificial Sequence; identical to SEQ ID NO: 130717
  derived and/or modified CDS sequence (opt3) from hemagglutinin__InfluenzaA__ADA83648

SEQ ID NO: 132023 - RNA, 1701 nt, Artificial Sequence; identical to SEQ ID NO: 130717
  derived and/or modified CDS sequence (opt3) from hemagglutinin__InfluenzaA__ADA83656

SEQ ID NO: 132024 - RNA, 1701 nt, Artificial Sequence; identical to SEQ ID NO: 130717
  derived and/or modified CDS sequence (opt3) from hemagglutinin__InfluenzaA__ADA83660

SEQ ID NO: 132025 - RNA, 1701 nt, Artificial Sequence
  derived and/or modified CDS sequence (opt3) from hemagglutinin__InfluenzaA__ADA83664
augaaggccauccuggugguccuccuuuacaccuucgcuacagcaaacgccgacacucugugcauuggcuaucacgcgaauaacagcacggauaccguugacacaguguuggagaaaaauguaacugugacccauuccgucaacuuacuggaagauaagcacaaugggaaacuauguaagcucagaggaguggcuccccugcaucuugguaaaugcaacauagccggcuggauccuggggaauccugagugugaaucuuugucaacagcaaguagcugguccuacauuguugagaccucuucgucagacaacggaacuugcuauccaggcgauuuuaucgacuacgaggagcucagggagcagcugagcaguguguccucuuucgaacgguuugagauuuucccgaagacaagcuccuggcccaaucacgauucaaacaagggugucaccgccgcuuguccucaugcaggggccaaaaguuuuuauaagaaucugaucuggcucgugaaaaagggaaacagcuacccaaaauuaucuaaguccuauauaaaugacaagggcaaagaaguacugguucuuuggggcauccaccaccccucaacgagcgcugaucaacagaguuuguaccagaacgccgacgcguacguguucgucgggacuucucgcuauuccaagaaauuuaagccugagaccgcaauucgaccaaaagugcgugaucaggagggaagaaugaauuacuauuggacacugguggaacccggugacaagaucacuuucgaggccaccggcaaccuagucguuccuagguacgcuuuugccauggaacggaacgcagggagcggaauuaucauaucggauacaccagugcaugacugcaauaccacgugucaaacuccgaaaggcgcuauuaacacaucucuccccuuccagaauauccacccuauuaccaucgguaagugcccaaaguauguaaaauccacuaagcugcgccuugccacagggcugagaaacgugcccucaauccagaguaggggauuguuuggcgcgauugccggcuucauagaagggggauggaccgguauggucgacggcugguacggguaucaucaccagaaugaacaaggaagcggcuacgcagcugaucucaaauccacgcagaacgccaucgacgagauuaccaauaaggugaacucuguuaucgagaaaaugaauacacaguuuacugcuguggguaaggaguucaaccaccuggaaaagcggauagaaaauuuaaacaaaaaggucgaugacggguuccuggauauuuggaccuacaaugccgagcuccuugugcuguuggaaaacgagcgcacacuagacuaucaugauagcaauguaaagaaccuguacgagaagguucgaucacagcucaaaaacaaugcaaaggaaaucggcaacggauguuuugaguucuaucacaagugcgacaauacuuguauggaaagugugaaaaacggcaccuacgauuauccuaaguacuccgaggaagccaaacugaauagagaggagaucgacggggucaaacuugaaagcacaaggauuuaucaaauccuggcuauuuacucuaccguggcgucaaguuugguccucgugguuagccugggagcaauauccuuuuggaugugcucuaacgguucguuacagugccggaucuguauuuga

SEQ ID NO: 132026 - RNA, 1701 nt, Artificial Sequence
  derived and/or modified CDS sequence (opt3) from hemagglutinin__InfluenzaA__ADA83668
augaaggccauccuggugguccuccuuuacaccuucgcuacagcaaacgccgacacucugugcauuggcuaucacgcgaauaacagcacggauaccguugacacaguguuggagaaaaauguaacugugacccauuccgucaacuuacuggaagauaagcacaaugggaaacuauguaagcucagaggaguggcuccccugcaucuugguaaaugcaacauagccggcuggauccuggggaauccugaguguggaucuuugucaacagcaaguagcugguccuacauuguugaaaccucuucgucagacaacggcacuugcuauccaggugauuuuaucgacuacgaggaacucagggagcagcugagcaguguguccucuuucgagcgguuugaaauuuucccgaagacaagcuccuggcccaaucacgauucaaacaagggggucaccgccgcuuguccucaugcaggagccaaaaguuuuuauaagaaucugaucuggcucgugaaaaagggcaacagcuacccaaaauuaucuaaguccuauauaaaugacaagggcaaagagguacugguucuuugggggauccaccaccccucaacgagcgcugaucaacagaguuuguaccagaacgccgacgcguacguguucgucggaacuucucgcuauuccaagaaauuuaagccugaaauugcaauccgaccaaaagugcgugaucaggaggguagaaugaauuacuauuggacccugguggagcccggcgacaagauuacauucgaagccacugggaaccuagucguuccuagguacgcuuuugccauggagcggaacgcaggaagcggcaucauaauuucggauaccccagugcaugacugcaauacaaccugucaaacgccgaaaggugcuaucaacacuucucuccccuuccagaauauucacccuaucacaaucgggaagugcccaaaguauguaaaauccaccaagcugcgccuugccacuggacugagaaacgugcccucaauucagaguaggggcuuguuuggcgcgauagccggguucaucgaaggagguuggacaggcauggucgacgggugguacggauaucaucaccagaaugagcaaggcagcgguuacgcagcugaucucaaauccacccagaacgccauugacgaaaucacgaauaaggugaacucuguuauagagaaaaugaauacccaguuuacagcuguggggaaggaguucaaccaccuggaaaagcggauugagaauuuaaacaaaaaggucgaugacggcuuccuggauaucuggacuuacaaugccgaacuccuugugcuguuggagaacgaacgcacccuagacuaucaugauagcaauguaaagaaccuguacgagaagguucgaucacagcucaaaaacaaugcaaaggagaucggaaacggcuguuuugaguucuaucacaagugcgacaauacauguauggaaagugugaaaaacgggacuuacgauuauccuaaguacuccgaagaggccaaacugaauagagaagagauugacggagucaaacuugagagcaccaggaucuaucaaauucuggcuauauacucuacaguggcgucaaguuugguccucgugguuagccugggugcaaucuccuuuuggaugugcucuaacggcucguuacagugccggauuuguaucuga

SEQ ID NO: 132027 - RNA, 1701 nt, Artificial Sequence; identical to SEQ ID NO: 130717
  derived and/or modified CDS sequence (opt3) from hemagglutinin__InfluenzaA__ADA83672

SEQ ID NO: 132028 - RNA, 1701 nt, Artificial Sequence; identical to SEQ ID NO: 130717
  derived and/or modified CDS sequence (opt3) from hemagglutinin__InfluenzaA__ADA83676

SEQ ID NO: 132029 - RNA, 1701 nt, Artificial Sequence; identical to SEQ ID NO: 130717
  derived and/or modified CDS sequence (opt3) from hemagglutinin__InfluenzaA__ADA83680

SEQ ID NO: 132030 - RNA, 1701 nt, Artificial Sequence
  derived and/or modified CDS sequence (opt3) from hemagglutinin__InfluenzaA__ADA86068
augaaggccauccuggugguccuccuuuacaccuucgcuacagcaaacgccgacacucugugcauuggcuaucacgcgaauaacagcacggauaccguugacacaguguuggagaaaaauguaacugugacccauuccgucgauuuacuggaagacaagcacaacgggaaacuauguaagcucagaggaguggcuccccugcaucuugguaaaugcaauauagccggcuggauccuggggaacccugagugugaaucuuugucaacagcaaguagcugguccuacauuguugagaccucuucgucagauaauggaacuugcuauccaggcgacuuuaucgauuacgaggagcucagggagcagcugagcaguguguccucuuucgaacgguuugagauuuucccgaagacaagcuccuggcccaaccacgacucaaauaagggugucaccgccgcuuguccucaugcaggggccaaaaguuuuuauaagaaccugaucuggcucgugaaaaagggaaauagcuacccaaaauuaucuaaguccuauauaaacgauaagggcaaagaaguacugguucuuuggggcauccaccaccccucaacgagcgcugaccaacagaguuuguaccagaaugccgaugcguacguguucgucgggacuucucgcuauuccaagaaauuuaagccugagauugcaauccgaccaaaagugcguaaccaggagggaagaaugaauuacuauuggacccugguggaacccggugacaagauuacauucgaggccacuggcaaccuagucguuccuagguacgcuuuugccauggaacggaacgcagggagcggaaucauaauuucggauaccccagugcaugacugcaauacaaccugucaaacgccgaaaggcgcuaucaacacuucucuccccuuccagaauauucacccuaucacaaucgguaagugcccaaaguauguaaaauccauuaagcugcgccuugccaccgggcugagaaacgugcccucaauacagaguaggggauuguuuggcgcgaucgccggcuucauugaagggggauggacugguauggucgacggcugguacggguaucaucaccagaaugaacaaggaagcggcuacgcagcugaucucaaauccacacagaacgccaucgacgagauaaccaauaaggugaacucuguuauugagaaaaugaauacgcaguuuaccgcuguggguaaggaguucaaccaccuggaaaagcggaucgaaaauuuaaacaaaaaggucgaugacggguuccuggauaucuggacauacaaugccgagcuccuugugcuguuggaaaacgagcgcacucuagacuaucaugauagcaauguaaagaaccuguacgagaagguucgaucacagcucaaaaacaaugcaaaggaaauuggcaacggauguuuugaguucuaucacaagugcgacaauaccuguauggaaagugugaaaaacggcacauacgauuauccuaaguacuccgaggaagccaaacugaauagagaggagaucgacggggucaaacuugaaagcacuaggauuuaucaaauacuggcuaucuacucuaccguggcgucaaguuugguccucgugguuagccugggagcaauuuccuuuuggaugugcucuaacgguucguuacagugccggaucuguaucuga

SEQ ID NO: 132031 - RNA, 1701 nt, Artificial Sequence
  derived and/or modified CDS sequence (opt3) from hemagglutinin__InfluenzaA__ADA86086
augaaggccauccuggugguccuccuuuacaccuucgcuacagcaaacgccgacacucugugcauuggcuaucacgcgaauaacagcacggauaccguugacacaguguuggagaaaaauguaacugugacccauuccgucaacuuacuggaagauaagcacaaugggaaacuauguaagcucagaggaguggcuccccugcaucuugguaaaugcaacauagccggcuggauccuggggaauccugagugugaaucuuugucaacagcaaguagcugguccuacauuguugagaccucuucgucagacaacggaacuugcuauccaggcgauuuuaucgacuacgaggagcucagggagcagcugagcaguguguccucuuucgaacgguuugagauuuucccgaagacaagcuccuggcccaaucacgauucaaacaagggugucaccgccgcuuguccucaugcaggggccaaaaguuuuuauaagaaucugaucuggcucgugaaaaagggaaacagcuacccaaaauuaucuaaguccuauauaaaugacaagggcaaagaaguacugguucuuuggggcauccaccaccccucaacgaacgcugaucaacagagcuuguaccagaaugccgacgcguacguguucgucgggacuucccgcuauucuaagaaauuuaagccugagauugcaauccgaccaaaagugcgugaucaggagggaagaaugaacuacuauuggacccugguggaacccggugacaagauuacauucgaggccacuggcaaccuagucguuccuagguacgcuuuugccauggaacggaaugcaggguccggaaucauaauuagcgauaccccagugcaugacugcaacacaaccugucaaacgccgaaaggcgcuaucaauacuucgcuccccuuccagaacauucacccuaucacaaucgguaagugcccaaaguauguaaaaucuaccaagcugcgccuugccacugggcugagaaaugugcccuccauucagucaaggggauuguuuggcgcgauagccggcuucaucgaagggggauggacagguauggucgacggcugguacggguaucaucaccagaacgaacaaggaaguggcuacgcagcugaucucaaaagcacccagaaugccauugacgagaucacgaacaaggugaauaguguuauagagaaaaugaacacccaguuuacagcuguggguaaggaguucaaucaccuggaaaagcggauugaaaacuuaaauaaaaaggucgaugacggguuccuggauaucuggacuuacaacgccgagcuccuugugcuguuggaaaaugagcgcacccuagacuaucaugauucuaacguaaagaaccuguacgagaagguucgaagccagcucaaaaauaacgcaaaggaaaucggcaauggauguuuugaguucuaucacaagugcgacaacacauguauggaaucagugaaaaauggcacuuacgauuauccuaaguacagugaggaagccaaacugaacagagaggagauugacggggucaaacuugaauccaccaggaucuaucaaauucuggcuauauacagcacaguggcgucuucauugguccucgugguuagucugggagcaaucagcuuuuggaugugcuccaaugguucuuuacagugccggauuuguaucuga

SEQ ID NO: 132032 - RNA, 1701 nt, Artificial Sequence
  derived and/or modified CDS sequence (opt3) from hemagglutinin__InfluenzaA__ADA86087
augaaggccauccuggugguccuccuuuacaccuucgcuacagcaaacgccgacacucugugcauuggcuaucacgcgaauaacagcacggauaccguugacacaguguuggagaaaaauguaacugugacccauuccgucaacuuacuggaagauaagcacaaugggaaacuauguaagcucagaggaguggcuccccugcaucuugguaaaugcaacauagccggcuggauccuggggaauccugagugugaaucuuugucaacagcaaguagcugguccuacauuguugagaccuuuucuucggacaacggaacuugcuauccaggcgauuucaucgacuacgaggagcucagggagcagcugucaagcgugaguuccuuugaacgguucgagauuuuuccgaagacaucuagcuggcccaaucacgauuccaacaagggugucaccgccgcuuguccucaugcaggggccaaaucauucuauaagaaucugaucuggcucgugaaaaagggaaacaguuacccaaaauuaagcaagucuuauauaaaugacaagggcaaagaaguacugguucuuuggggcauccaccaccccuccacgucagcugaucaacagagcuuguaccagaacgccgacgcguacguguuugucgggaccagucgcuauucuaagaaauucaagccugagauugcaauccgaccaaaagugcgugaucaggagggaagaaugaauuacuauuggacucugguggaacccggugacaagauuacauuugaggccacuggcaaccuagucguuccuagguacgcuuucgccauggaacggaacgcaggguccggaaucauaauuagcgauaccccagugcaugacugcaauacaaccugucaaacgccgaaaggcgcucucaacacuucgcugcccuuucagaauauccacccuauuacaaucgguaagugcccaaaguauguaaaaucuaccaaacuucgccuggccacuggguugagaaacgugcccuccauccagucaaggggacucuucggcgcgauugccggcuuuauagaagggggauggacagguauggucgacggcugguacggguaucaucaccagaaugaacaaggaaguggcuacgcagcugaucugaaaagcacccagaacgccaucgacgagauuacgaauaaggugaacuccguuaucgagaaaaugaauacccaguucacagcuguggguaaggaguucaaccacuuagaaaagcggauagaaaaucugaacaaaaaggucgaugacggguuucucgauauuuggacuuacaaugccgagcuucugguguugcuagaaaacgagcgcacccuggacuaucaugauucuaauguaaagaaccucuacgagaagguucgaaaccagcugaaaaauaacgcaaaggaaaucggcaauggauguuucgaguuuuaucacaagugcgacaacacauguauggaaagcgugaaaaauggcacuuacgauuauccuaaguacucagaggaagccaaacuuaacagagaggagaucgacggggucaagcuggaaaguaccaggauuuaucaaaucuuggcuauuuacuccacaguggcgagcucucucguccuggugguuucauuaggagcaauaaguuucuggaugugcagcaaugguucccugcagugccggaucuguauuuga

SEQ ID NO: 132033 - RNA, 1701 nt, Artificial Sequence; identical to SEQ ID NO: 131515
  derived and/or modified CDS sequence (opt3) from hemagglutinin__InfluenzaA__ADA86088

SEQ ID NO: 132034 - RNA, 1701 nt, Artificial Sequence
  derived and/or modified CDS sequence (opt3) from hemagglutinin__InfluenzaA__ADB03603
augaaggccauccugauugugcuccuuuacaccuucgcuacagcacacgccgacacucugugcauaggcuaucaugcgaacaauagcacggauaccgucgacacaguuuuggagaagaacgugacuguaacccacuccgugaauuuacuggaagauaagcauaacgggaaacuauguaagcucagaggagucgcuccccugcaccuugguaaaugcaauaucgccggcuggauucuggggaacccugagugugaaucuuugucaacagcaaguagcugguccuacaucguggagaccucuucgucagacaauggaacuugcuauccaggcgauuuuauugacuacgaggagcucagggagcagcugagcaguguuuccucuuucgaacgguuugagaucuucccgaagacaagcuccuggcccaaccaugauucaaauaagggugugaccgccgcuuguccucacgcaggggccaaaaguuuuuauaagaaccugauauggcucgucaaaaagggaaauagcuacccaaaauuaucuaaguccuauaucaacgacaagggcaaagaagugcugguacuuuggggcauucaccaucccucaacgagcgcugaucaacagaguuuguaccagaaugccgacgcguacguuuucguggggacuucucgcuauuccaagaaauuuaagccugagaucgcaauucgaccaaaaguccgugaucaggagggaagaauggacuacuauuggacccugguggaacccggugauaagaucacauucgaggccacuggcaaccuaguggucccuagguacgcuuuugccauggaacggaaugcagggagcggaauaauuaucucggacaccccaguucacgacugcaacacaaccugucaaacgccgaaaggcgcuauuaacacuucucuccccuuccagaauauccauccuaucacaauugguaagugcccaaaguaugugaaauccaccaagcugcgccuugccacugggcugagaaacguacccucaauacagaguaggggauuguuuggcgcgaucgccggcuucauugaagggggauggacagguaugguggauggcugguacggguaucaccaccagaaugaacaaggaagcggcuacgcagcugaccucaaauccacccagaacgccaucgaugagauaacgaauaaggucaacucugugauugagaaaaugaauacccaguuuacagcuguugguaaggaguucaaccaucuggaaaagcggaucgaaaauuuaaacaaaaagguggacgauggguuccuggacaucuggacuuacaaugccgagcuccuuguccuguuggaaaacgagcgcacccuagauuaucacgacagcaaugugaaaaaccuguacgagaagguacgaucacagcucaaaaauaacgcaaaggaaauuggcaacggauguuuugaguucuaucauaagugcgauaauacauguauggaaaguguuaaaaacggcacuuacgacuauccuaaguacuccgaggaagccaaacugaauagagaggagaucgauggggugaaacuugaaagcaccaggauuuaucaaauacuggcuaucuacucuacagucgcgucaaguuuggugcucgucgugagccugggagcaauuuccuuuuggaugugcucuaacgguucguuacagugccggaucuguaucuga

SEQ ID NO: 132035 - RNA, 1701 nt, Artificial Sequence; identical to SEQ ID NO: 130704
  derived and/or modified CDS sequence (opt3) from hemagglutinin__InfluenzaA__ADB03604

SEQ ID NO: 132036 - RNA, 1701 nt, Artificial Sequence
  derived and/or modified CDS sequence (opt3) from hemagglutinin__InfluenzaA__ADB03605
augaaggccauccuggugguccuccuuuacaccuucgcuacagcaaacgccgacacucugugcauuggcuaucacgcgaauaacagcacggauaccguugacacaguguuggagaaaaauguaacugugacccauuccgucaacuuacuggaagauaagcacaaugggaaacuauguaagcucagaggaguggcuccccugcaucuugguaaaugcaacauagccggcuggauccuggggaauccugagugugaaucuuugucaacagcaaguagcugguccuacauuguugagaccucuucgucagacaacggaacuugcuauccaggcgauuuuaucgacuacgaagaacucagggagcagcugagcaguguguccucuuucgaacgguuugagauuuucccgaagacaagcuccuggcccaaucacgauucaaacaagggugucaccgccgcuuguccucaugcaggggccaaaaguuuuuauaagaaucugaucuggcucgugaaaaagggaaacagcuacccaaaauuaucuaaguccuauauaaaugacaagggcaaagaaguacugguucuuuggggcauccaccaccccucaacgagcgcugaucaacagaguuuguaccagaacgccgacgcguacguguucgucgggacuucucgcuauuccaagaaauuuaagccugagauugcaauccgaccaaaagugcgugagcaggaaggaagaauggauuacuauuggacccugguggagcccggugacaagauuacauucgaagccacuggcaaucuagucguuccuagguacgcuuuugccauggagcggaacgcagggagcggaaucauaauuucggauaccccagugcaugacugcaacacaaccugucaaacgccgaaaggcgcuaucaauacuucucuccccuuccagaacauucacccuaucacaaucgguaagugcccaaaguauguaaaauccaccaagcugcgccuugccacugggcugagaaaugugcccucaauucagaguaggggauuguuuggcgcgauagccggcuucaucgaagggggauggacagguauggucgacggcugguacggguaucaucaccagaacgagcaaggaagcggcuacgcagcugaucucaaauccacccagaaugccauugacgagaucacgaacaagguaaauucuguuauagaaaagaugaacacccaguuuacagcuguggguaaggaguucaaucaccuggaaaagcggauugagaacuuaaauaaaaaggucgaugacggguuccuggauaucuggacuuacaacgccgaacuccuugugcuguuggagaaugagcgcacccuagacuaucaugauagcaacgugaaaaaucuguacgaaaagguucgaucacagcucaaaaacaacgcaaaggagaucggcaauggauguuuugaguucuaucacaagugcgacaacacauguauggagagugugaaaaauggcacuuacgauuauccuaaguacuccgaagaggccaaacugaacagagaggaaauugacggggucaaacuugagagcaccaggaucuaucaaauucuggcuauauacucuacaguggcgucaaguuugguccucgugguuagccugggagcaaucuccuuuuggaugugcucuaaugguucguuacagugccggauuuguaucuga

SEQ ID NO: 132037 - RNA, 1701 nt, Artificial Sequence; identical to SEQ ID NO: 130717
  derived and/or modified CDS sequence (opt3) from hemagglutinin__InfluenzaA__ADB03607

SEQ ID NO: 132038 - RNA, 1701 nt, Artificial Sequence; identical to SEQ ID NO: 131070
  derived and/or modified CDS sequence (opt3) from hemagglutinin__InfluenzaA__ADB03609

SEQ ID NO: 132039 - RNA, 1701 nt, Artificial Sequence; identical to SEQ ID NO: 130717
  derived and/or modified CDS sequence (opt3) from hemagglutinin__InfluenzaA__ADB03611

SEQ ID NO: 132040 - RNA, 1701 nt, Artificial Sequence
  derived and/or modified CDS sequence (opt3) from hemagglutinin__InfluenzaA__ADB03612
augaaggccauccuggugguccuccuuuacaccuucgcuacagcaaacgccgacacucugugcauuggcuaucacgcgaauaacagcacggauaccguugacacaguguuggagaaaaauguaacugugacccauuccgucaacuuacuggaagauaagcacaaugggaaacuauguaagcucagaggaguggcuccccugcaucuugguaaaugcaacauagccggcuggauccuggggaauccugagugugaaucuuugucaacagcaaguagcugguccuacauuguugagaccucuucgucagacaacggaacuugcuauccaggcgauuuuaucgacuacgaggagcucagggagcagcugagcaguguguccucuuucgaacgguuugagauuuucccgaagacaagcuccuggcccaaucacgauucaaacaagggugucaccgccgcuuguccucaugcaggggccaaaaguuuuuauaagaaucugaucuggcucgugaaaaagggaaacagcuacccaaaauuaucuaaguccuauauaaaugacaagggcaaagaaguacugguucuuuggggcauccaccaccccucaacgagcgcugaucaacagaguuuguaccagaacgccgacgcguacguguucgucgggacuucucgcuauuccaagaaauuuaagccugagauugcaauccgaccaaaagugcgugaucaggagggaagaaugaauuacuauuggacccugguggaacccggugacaagauuacauucgaggccacuggcaaccuagucguuccuagguacgcuuuugccauggaacggaacgcagggagcggaaucauaauuucggauaccccagugcaugacugcaauacaaccugucaaacgccgaaaggcgcuaucaacacuucucuccccuuccagaauauucacccuaucacaaucgguaagugcccaaaguauguaaaauccaccaagcugcgccuugccacugggcugagaaacgugcccuuuauucagucaaggggauuguucggcgcgauagccggcuuuaucgaagggggauggacagguauggucgacggcugguacggguaucaucaccagaaugaacaaggaaguggcuacgcagcugaucucaaaagcacccagaacgccauugacgagaucacgaauaaggugaacuccguuauagagaaaaugaauacccaguucacagcuguggguaaggaguucaaccaccuggaaaagcggauugaaaauuuaaacaaaaaggucgaugacggguuucuggauaucuggacuuacaaugccgagcuccuugugcuguuggaaaacgagcgcacccuagacuaucaugauucuaauguaaagaaccuguacgagaagguucgaagccagcucaaaaacaaugcaaaggaaaucggcaacggauguuucgaguuuuaucacaagugcgacaauacauguauggaaucagugaaaaacggcacuuacgauuauccuaaguacagugaggaagccaaacugaauagagaggagauugacggggucaaacuugaauccaccaggaucuaucaaauucuggcuauauacagcacaguggcgucuucauugguccucgugguuagucugggagcaaucagcuucuggaugugcuccaacgguucuuuacagugccggauuuguaucuga

SEQ ID NO: 132041 - RNA, 1701 nt, Artificial Sequence; identical to SEQ ID NO: 130717
  derived and/or modified CDS sequence (opt3) from hemagglutinin__InfluenzaA__ADB03614

SEQ ID NO: 132042 - RNA, 1701 nt, Artificial Sequence
  derived and/or modified CDS sequence (opt3) from hemagglutinin__InfluenzaA__ADB03617
augaaggccauccuggugguccuccuuuacaccuucgcuacagcaaacgccgacacucugugcauuggcuaucacgcgaauaacagcacggauaccguugacacaguguuggagaaaaauguaacugugacccauuccgucaacuuacuggaagauaagcacaaugggaaacuauguaagcucagaggaguggcuccccugcaucuugguaaaugcaacauagccggcuggauccuggggaauccugagugugaaucuuugucaacagcaaguagcugguccuacauuguugagaccucuucgucagacaacggaacuugcuauccaggcgauuuuaucgacuacgaagaacucagggagcagcugagcaguguguccucuuucgaacgguuugagauuuucccgaagacaagcuccuggcccaaucacgauucaaacaagggugucaccgccgcuuguccucaugcaggggccaaaaguuuuuauaagaaucugaucuggcucgugaaaaagggaaacagcuacccaaaauuaucuaaguccuauauaaaugacaagggcaaagaaguacugguucuuuggggcauccaccaccccucaacgagcgcugaucaacagaguuuguaccagaacgccgacgcguacguguucgucgggacuucucgcuauuccaagaaauuuaagccugagauugcaauccgaccaaaagugcgugagcaggaaggaagaaugaauuacuauuggacccugguggagcccggugauaagauuacauucgaagccacuggcaaccuagucguuccuagguacgcuuuugccauggagcggaacgcagggagcggaaucauaauuucggacaccccagugcaugauugcaauacaaccugucaaacgccgaaaggcgcuaucaacacuucucuccccuuccagaauauucacccuaucacaaucgguaagugcccaaaguauguaaaauccaccaagcugcgccuugccacugggcugagaaacgugcccucaauucagaguaggggauuguuuggcgcgauagccggcuucaucgaagggggauggacagguauggucgacggcugguacggguaucaucaccagaaugagcaaggaagcggcuacgcagcugaccucaaauccacccagaacgccauugaugagaucacgaauaaggugaacucuguuauagagaaaaugaauacccaguuuacagcuguggguaaggaguucaaccaccuggaaaagcggauugagaauuuaaacaaaaaggucgacgauggguuccuggacaucuggacuuacaaugccgaacuccuugugcuguuggagaacgagcgcacccuagauuaucaugacagcaauguuaaaaaccuguacgaaaagguacgaucacagcucaaaaacaaugcaaaggagaucggcaacggauguuuugaguucuaucacaagugcgauaauacauguauggaaagugugaaaaacggcacuuacgacuauccuaaguacuccaaagaagccaagcugaauagagaggagauugauggggucaaacuugaaagcaccaggaucuaucaaauucuggcuauauacucuacaguggcgucaaguuugguccucgugguuagccugggagcaaucuccuuuuggaugugcucuaacgguucguuacagugccggauuuguaucuga

SEQ ID NO: 132043 - RNA, 1701 nt, Artificial Sequence; identical to SEQ ID NO: 131070
  derived and/or modified CDS sequence (opt3) from hemagglutinin__InfluenzaA__ADB03619

SEQ ID NO: 132044 - RNA, 1701 nt, Artificial Sequence
  derived and/or modified CDS sequence (opt3) from hemagglutinin__InfluenzaA__ADB03620
augaaggccauccuggugguccuccuuuacaccuucgcuacagcaaacgccgacacucugugcauuggcuaucacgcgaauaacagcacggauaccguugacacaguguuggagaaaaauguaacugugacccauuccgucaacuuacuggaagggaagcacaauggaaaacuauguaagcucagagguguggcuccccugcaucuuggcaaaugcaacauagccggguggauccugggaaauccugagugugaaucuuugucaacagcaaguagcugguccuacauuguugagaccucuucgucagauaacggcacuugcuauccaggugacuuuaucgauuacgaggaacucagggagcagcugagcaguguguccucuuucgaacgguuugagauugucccgaagacaagcuccuggcccaaucacgacucaaacaagggggugaccgccgcuuguccucaugcaggagccaaaaguuucuauaagaaucugaucuggcucguaaagaagggcaacagcuacccaaaauuaucuaaguccuauauaaaugauaagggcaaagaaguucuggugcuuugggggauccaccaccccucaacgagcgcugaccaacagaguuuguaccagaacgccgaugcguacgucuuugugggaacuucucgcuauuccaagaaauucaagccugagauugcaauccgaccaaaagugcgugaccaggaggguagaaugaauuacuauuggacccuggucgaacccggcgauaagauuacauuugaggccacugggaaccuaguugugccuagguacgcuuucgccauggaacggaacgcaggaagcggcaucauaauuucggacaccccaguacaugauugcaauacaaccugucaaacgccgaaaggugcuaucaacacuucucuccccuuucagaauauucacccuaucacaaucgggaagugcccaaaguaugugaaauccaccaagcugcgccuugccacuggacugagaaacguccccucaauucagaguaggggcuuguucggcgcgauagccggguuuaucgagggagguuggacaggcaugguggacgggugguacggauaucaucaccagaaugaacaaggcagcgguuacgcagcugaccucaaauccacccagaacgccauugaugagaucacgaauaagguuaacucugugauagagaaaaugaauacccaguucacagcugucgggaaggaauuuaaccaccuggagaagcggauugaaaauuuaaacaaaaagguggacgauggcuuccuggacaucuggacuuacaaugccgagcuccuuguacuguuggaaaacgagcgcacccuagauuaucaugacagcaauguuaaaaaccuguacgagaaggugcgaucacagcucaaaaacaaugcaaaggaaaucggaaacggcuguuucgaguuuuaucacaagugcgauaauacauguauggaaagugucaaaaacgggacuuacgacuauccuaaguacuccgaggaagccaaacugaauagagaggagauugauggagugaaacuugaaagcaccaggaucuaucaaauucuggcuauauacucuacagucgcgucaaguuuggugcucguugugagccugggugcaaucuccuucuggaugugcucuaacggcucguuacagugccggauuuguaucuga

SEQ ID NO: 132045 - RNA, 1701 nt, Artificial Sequence
  derived and/or modified CDS sequence (opt3) from hemagglutinin__InfluenzaA__ADB03622
augaaggccauccuggugguccuccuuuacaccuucgcuacagcaaacgccgacacucugugcauuggcuaucacgcgaauaacagcacggauaccguugacacaguguuggagaaaaauguaacugugacccauuccgucaacuuacuggaagauaagcacaaugggaaacuauguaagcucagaggaguggcuccccugcaucuugguaaaugcaacauagccggcuggauccuggggaauccugagugugaaucuuugucaacagcaaguagcugguccuacauuguugagaccucuucgucagacaacggaacuugcuauccaggcgauuuuaucaauuacgaggagcucagggagcagcugagcaguguguccucuuucgaacgguuugagauuuucccgaagacaagcuccuggcccaaccacgacucaaauaagggugucaccgccgcuuguccucaugcaggggccaaaaguuuuuauaagaaccugaucuggcucgugaaaaagggaaauagcuacccaaaauuaucuaaguccuauauaaacgauaagggcaaagaaguacugguucuuuggggcauccaccaccccucaacgagcgcugaccaacagaguuuguaccagaaugccgaugcguacguguucgucgggacuucucgcuauuccaagaaauuuaagccugagauugcaauccgaccaaaagugcgugaccaggagggaagaaugaacuacuauuggacccugguggaacccggugauaagauuacauucgaggccacuggcaaccuagucguuccuagguacgcuuuugccauggaacggaaugcagggagcggaaucauaauuucggacaccccagugcaugauugcaacacaaccugucaaacgccgaauggcgcuaucaacacuucucuccccuuccagaauauucacccuaucacaaucgguaaaugcccaaaguauguaaaguccaccaaacugcgccuugccacugggcugagaaacgugcccucaauucagaguaggggauuguuuggcgcgauagccggcuucaucgaagggggauggacagguauggucgacggcugguacggguaucaucaccagaaugaacaaggaagcggcuacgcagcugaccucaaguccacccagaacgccauugauaaaaucacgaauaaggugaacucuguuauagagaaaaugaauacccaguuuacagcuguggguaaggaguucaaccaccuggaaaagcggauugagaauuuaaacaaaaaggucgacgauggguuccuggacaucuggacuuacaaugccgaacuccuugugcuguuggagaacgaacgcacccuagauuaucaugacagcaacguaaagaaucuguacgagaagguucgaucacagcucaaaaacaaugcaaaggagaucggcaacggauguuuugaguucuaucacaagugcgauaauacauguauggaaagugugaaaaacggcacuuacgacuauccuaaguacuccgaagaggccaaacugaauagagaagagauugauggggucaaacuugagagcaccaggaucuaucaaauucuggcuauauacucuacaguggcgucaaguuugguccucgugguuagccugggagcaaucuccuuuuggaugugcucuaacgguucguuacagugccggauuuguaucuga

SEQ ID NO: 132046 - RNA, 1701 nt, Artificial Sequence; identical to SEQ ID NO: 132045
  derived and/or modified CDS sequence (opt3) from hemagglutinin__InfluenzaA__ADB03623

SEQ ID NO: 132047 - RNA, 1701 nt, Artificial Sequence
  derived and/or modified CDS sequence (opt3) from hemagglutinin__InfluenzaA__ADB03628
auggaggccauccuggugguccuccuuuacaccuucgcuacagcaaacgccgacacucugugcauuggcuaucacgcgaauaacagcacggauaccguugacacaguguuggaaaagaauguaacugugacccauuccgucaacuuacuggaggauaaacacaaugggaagcuauguaaacucagaggaguggcuccccugcaucuugguaagugcaacauagccggcuggauccuggggaauccugaaugugagucuuugucaacagcaaguagcugguccuacauuguugaaaccucuucgucagacaacggaacuugcuauccaggcgauuuuaucgacuacgaggagcucagggaacagcugagcaguguguccucuuucgagcgguuugaaauuuucccgaaaacaagcuccuggcccaaucacgauucaaacaagggugucaccgccgcuuguccucaugcaggggccaagaguuuuuauaaaaaucugaucuggcucgugaagaaaggaaacagcuacccaaaguuaucuaaauccuauauaaaugacaagggcaaggagguacugguucuuuggggcauccaccaccccucaacgagcgcugaucaacagaguuuguaccagaacgccgacgcguacguguucgucgggacuucucgcuauuccaaaaaguuuaaaccugagauugcaauccgaccaaaggugcgugaucaggaaggaagaaugaauuacuauuggacccugguggagcccggugacaaaauuacauucgaagccacuggcaaccuagucguuccuagguacgcuuuugccauggagcggaacgcagggagcggaaucauaauuucggauaccccagugcaugacugcaauacaaccugucaaacgccgaagggcgcuaucaacacuucucuccccuuccacaauauucauccuaucacaaucgguaaaugcccaaaguauguaaaguccaccaaacugcgccuugccacugggcugagaaacgugcccucaauucagaguaggggauuguuuggcgcgauagccggcuucaucgaagggggauggacagguauggucgacggcugguacggguaucaccaccagaaugagcagggaagcggcuacgcagcugaucucaaguccacccaaaacgccauugacgagaucacgaauaaagugaacucuguuauagaaaagaugaauacccaguuuacagcuguggguaaagaguucaaccaucuggaaaagcggauugagaauuuaaacaagaaagucgaugacggguuccuggauaucuggacuuacaaugccgaacuccuugugcuguuggagaacgagcgcacccuagacuaucacgauagcaauguaaagaaccuguacgaaaaaguucgaucacagcucaagaacaaugcaaaagagaucggcaacggauguuuugaguucuaucauaagugcgacaauacauguauggaaagugugaagaacggcacuuacgauuauccuaaauacuccgaagaggccaagcugaauagagaggaaauugacggggucaaacuugagagcaccaggaucuaucagauucuggcuauauacucuacaguggcgucaaguuugguccucgugguuagccugggagcaaucuccuuuuggaugugcucuaacgguucguuacaaugccggauuuguaucuga

SEQ ID NO: 132048 - RNA, 1701 nt, Artificial Sequence
  derived and/or modified CDS sequence (opt3) from hemagglutinin__InfluenzaA__ADB03629
augaaggccauccuggugguccuccuuuacaccuucacaacugcuaacgcagacacgcugugcauuggcuaucacgccaauaacagcaccgauacaguugacacuguguuggagaaaaauguaaccgugacacauuccgucaacuuacuggaagauaagcacaaugggaaacuauguaagcucagaggaguggcgccccugcaucuugguaaaugcaacauagcuggcuggauccuggggaauccugagugugaaucuuugucaaccgccaguagcugguccuacauuguugagacuucuucgucagacaacggaacaugcuauccaggcgauuuuaucgacuacgaagaacucagggagcagcugagcaguguguccucuuucgaacgguuugagauuuucccgaagaccagcuccuggcccaaucacgauucaaacaagggugucacggcagccuguccucaugcuggggcaaaaaguuuuuauaagaaucugaucuggcucgugaaaaagggaaacagcuacccaaaauuaucuaaguccuauauaaaugacaagggcaaagaaguacugguucuuuggggcauccaccaccccucaacuagcgccgaucaacagaguuuguaccagaacgcugacgccuacguguucgucgggaccucucgcuauuccaagaaauuuaagccugagauugcgauccgaccaaaagugcgugagcaggaaggaagaaugaauuacuauuggacacugguggagcccggugauaagauuacuuucgaagcaaccggcaaccuagucguuccuagguacgccuuugcuauggagcggaacgccgggagcggaaucauaauuucggacacaccagugcaugauugcaauaccacgugucaaacuccgaaaggcgcaaucaacacaucucuccccuuccagaauauucacuccaucaccaucgguaagugcccuaaguauguaaaaucaacuaagcugcgccuugcuacagggcugagaaacgugccaaguauucagagcaggggauuguuuggcgccauagcgggcuucaucgaagggggauggaccgguauggucgacggcugguacggguuucaucaccagaaugagcaaggauccggcuaugccgcagaccucaaaucuacgcagaacgcuauugaugagaucaccaauaaggugaacagcguuauagagaaaaugaauacacaguucacugccguggguaaggaguucaaccaccuggaaaagcggauugagaauuuaaacaaaaaggucgacgauggguuucuggacaucuggaccuacaaugcugaacuccuugugcuguuggagaacgagcgcacacuagauuaccaugacucaaauguaaagaaccuguaugaaaagguucgaagucagcucaaaaacaaugccaaggagaucggcaacggauguuucgaauuuuaccacaagugcgauaauacuuguauggaguccgugaaaaacggcaccuaugacuaccccaaguauagcgaagaggcaaaacugaauagagaggaaauugauggggucaaacuugagucuacaaggaucuaccaaauucuggccauauauucaaccguggcuaguagcuugguccucgugguuucccugggagcgaucucuuucuggaugugcucgaacgguagcuuacagugccggauuuguaucuga

SEQ ID NO: 132049 - RNA, 1701 nt, Artificial Sequence
  derived and/or modified CDS sequence (opt3) from hemagglutinin__InfluenzaA__ADB03630
augaaggccauccuggugguccuccuuuacaccuucgcuacagcaaacgccgacacucugugcauuggcuaucacgcgaauaacagcacggauaccguugacacaguguuggagaaaaauguaacugugacccauuccgucaacuuacuggaagauaagcacaaugggaaacuauguaagcucagaggaguggcuccccugcaucuugguaaaugcaacauagccggcuggauccuggggaauccugagugugaaucuuugucaacagcaaguagcugguccuacauuguugagaccucuucgucagacaacggaacuugcuauccaggcgauuuuaucgacuacgaggagcucagggagcagcugagcaguguguccucuuucgaacgguuugagauuuucccgaagacaagcuccuggcccaaucacgauucaaacaagggugucaccgccgcuuguccucaugcaggggccaaaaguuuuuauaagaaucugaucuggcucgugaaaaagggaaacagcuacccaaaauuaucuaaguccuauauaaaugacaagggcaaagaaguacugguucuuuggggcauccaccaccccucaacgagcgcugaucaacagaguuuguaccagaacgccgacgcguacguguucgucgggacuucucgcuauuccaagaaauuuaagccugagauugcaauccgaccaaaagugcgugaucaggagggaagaaugaauuaccauuggacccugguggaacccggugacaagauuacauucgaggccacuggcaaccuagucguuccuagguaugcuuuugccauggaacggaacgcagggagcggaaucauaauuucggauaccccagugcacgacugcaauacaaccugucaaacgccgaaaggcgcuaucaacacuucucuccccuuccagaauauucauccuaucacaaucgguaagugcccaaaguacguaaaauccaccaagcugcgccuugccacugggcugagaaacgugcccucaauucagaguaggggauuguuuggcgcgauagccggcuucaucgaagggggauggacagguauggucgacggcugguauggguaccaccaccagaaugaacaaggaagcggcuaugcagcugaucucaaauccacccagaacgccauugacgagaucacgaauaaggugaacucuguuauagagaaaaugaauacccaguuuacagcuguggguaaggaguucaaccaucuggaaaagcggauugaaaauuuaaacaaaaaggucgaugacggguuccuggauaucuggacuuacaaugccgagcuccuugugcuguuggaaaacgagcgcacccuagacuaccacgauagcaauguuaaaaaccuguaugagaagguacgaucacagcucaaaaacaaugcaaaggaaaucggcaacggauguuuugaguucuaccauaagugcgacaauacauguauggaaagugugaaaaacggcacuuaugauuacccuaaguauuccaaagaggccaagcugaauagagaagagauugacggggucaaacuugagagcaccaggaucuaccaaauucuggcuauauauucuacaguggcgucaaguuugguccucgugguuagccugggagcaaucuccuuuuggaugugcucuaacgguucguuacagugccggauuuguaucuga

SEQ ID NO: 132050 - RNA, 1701 nt, Artificial Sequence; identical to SEQ ID NO: 131462
  derived and/or modified CDS sequence (opt3) from hemagglutinin__InfluenzaA__ADB25319

SEQ ID NO: 132051 - RNA, 1701 nt, Artificial Sequence; identical to SEQ ID NO: 130717
  derived and/or modified CDS sequence (opt3) from hemagglutinin__InfluenzaA__ADB25321

SEQ ID NO: 132052 - RNA, 1701 nt, Artificial Sequence
  derived and/or modified CDS sequence (opt3) from hemagglutinin__InfluenzaA__ADB27970
augaaggccauccuggugguccuccuuuacaccuucgcuacagcaaacgccgacacucugugcauuggcuaucacgcgaauaacagcacggauaccguugacacaguguuggagaagaauguaacugugacccauuccgucaacuuacuggaagauaagcacaaugggaaacuauguaagcucagaggaguggcuccccugcaucuugguaaaugcaacauagccggcuggauccuggggaauccugagugugaaucuuugucaacagcaaguagcugguccuacauuguugagaccucuucgucagacaacggaacuugcuauccaggcgauuuuaucgacuacgaggagcucagggagcagcugagcaguguguccucuuucgaacgguuugagauuuucccgaagacaagcuccuggcccaaucacgauucaaacaagggugucaccgccgcuuguccucaugcaggggccaaaaguuuuuauaagaaucugaucuggcucgugaaaaagggaaacagcuacccaaaauuaucuaaguccuauauaaaugacaagggcaaagaaguacugguucuuuggggcauccaccaccccucaacgagcgcugaucaacagaguuuguaccagaacgccgacgcguacguguucgucgggacuucucgcuauuccaagaaauuuaagccugagauugcaauccgaccaaaagugcgugaucaggagggaagaaugaauuacuauuggacccugguggaacccggugacaagauuacauucgaggccacuggcaaccuagucguuccuagguacgcuuuugccauggaacgggaugcagggagcggaaucauaauuucggacaccccagugcaugacugcaacacaaccugucaaacgccgaaaggcgcuaucaauacuucucuccccuuccagaacauucacccuaucacaaucgguaagugcccaaaguauguaaaauccaccaagcugcgccuugccacugggcugagaaaugugcccucaauucagaguaggggauuguuuggcgcgauagccggcuucaucgaagggggauggacagguauggucgauggcugguacggguaucaucaccagaacgaacaaggaagcggcuacgcagcugaccucaaauccacccagaaugccauugaugagaucacgaacaagguaaauucuguuauagagaaaaugaacacccaguuuacagcuguggguaaggaguucaaucaccuggaaaagcggauugaaaacuuaaauaaaaaggucgacgauggguuccuggacaucuggacuuacaacgccgagcuccuugugcuguuggaaaaugagcgcacccuagauuaucaugacagcaacgugaaaaaucuguacgagaagguucgaucacagcucaaaaacaacgcaaaggaaaucggcaauggauguuuugaguucuaucacaagugcgauaacacauguauggaaagugugaaaaauggcacuuacgacuauccuaaguacuccgaggaagccaaacugaacagagaggagauugauggggucaaacuugaaagcaccaggaucuaucaaauucuggcuauauacucuacaguggcgucaaguuugguccucgugguuagccugggagcaaucuccuuuuggaugugcucuaaugguucguuacagugccggauuuguaucuga

SEQ ID NO: 132053 - RNA, 1701 nt, Artificial Sequence; identical to SEQ ID NO: 130717
  derived and/or modified CDS sequence (opt3) from hemagglutinin__InfluenzaA__ADB27980

SEQ ID NO: 132054 - RNA, 1701 nt, Artificial Sequence; identical to SEQ ID NO: 130717
  derived and/or modified CDS sequence (opt3) from hemagglutinin__InfluenzaA__ADB54352

SEQ ID NO: 132055 - RNA, 1701 nt, Artificial Sequence; identical to SEQ ID NO: 130717
  derived and/or modified CDS sequence (opt3) from hemagglutinin__InfluenzaA__ADB54355

SEQ ID NO: 132056 - RNA, 1698 nt, Artificial Sequence
  derived and/or modified CDS sequence (opt3) from hemagglutinin__InfluenzaA__ADB65926
augaaggugaaacugcucguccuucugugcaccuucacagccacuuacgcugacacgaucuguauuggcuaucacgcaaacaauagcaccgauacaguugacacuguguuggagaagaacguaaccgugacacauuccgucaauuuacuggaagauaaacacaacgggaagcuaugccuccugaaaggaaaggcgccccuucagcuggguaauuguucuguggccggcuggauauuggggaacccugagugcggacuccugaucucaaaggaaaguuggagcuacauuguugagagaccaaauccggaaaacggcaccuguuaucccggucauuuugcugacuacgaggagcugagggaacaacucuccucugugucgucauucgagcgguuugaaaucuucccuaaagggagcaguuggccaaaucacacugucacaggaguguccgccucuugcagccauaacggcgaguccucauuuuauaagaauuuacuguggcuuaccggcaaaaacggguuguaccccaaucugaguaagagcuaugcaaacaauaaagagaaggaagugcuaguucucuggggagugcaccacccuccaaacauuggugaucagaugacgcuguaccauaaggagaacgccuacgucucugugguguccucacacuauagccgcaaauucacucccgaaaucgcuaagcgaccuaaaguccgugaccaggagggcagaauaaauuacuauuggacccuucuggaaccaggggauacaaucauuuuugaggcaaacggaaauuugaucgccccgagguacgcuuucgcccucagucggggcuuugguucugggauuaucaacuccaaugcgcccauggacgagugugaugcaaagugccagacuccucaaggagccauaaacagcucgcugccauuccagaauguucaucccgugaccauuggcgaauguccuaaauauguacgcucugcuaaguuaagaauggugacaggccugaggaacaucccauccauucagucacgggggcucuuuggagccaucgcagguuucaucgagggcggguggaccggaauggucgacggcugguacgguuaucaccaccagaaugaacaagggaguggcuacgcugccgaucagaaaagcacgcagaacgcgauuaauggaauaacuaacaagguaaauuccguuaucgagaagaugaacacacaguuuaccgccgugggcaaagaguucaauaaacuugaacgccgaauggagaaccugaacaagaaggucgacgauggguucauugacguguggacuuacaaugcagaauugcuaguacugcucgagaacgaaagaacacuggacuuucaugauucuaauguuaaaaaccuuuaugagaaggugaagaaucaacugaaaaacaaugcuaaggaaaugggaaacgguugcuucgaguuuuaccacaaauguaaugacgagugcauggaaagcgucaagaacggcaccuaugauuaccccaaauauucagaggaaaguaaguuguccagggagaagaucgacggggugaaacucgagagcaugggagucuaccagauacuggccauuuauucuacgguggcuucaaguuuaguucugcuagugagccucggcgccaucgguuucuggaugugcuccaaugggucucugcagugucggaucugcauuuga

SEQ ID NO: 132057 - RNA, 1698 nt, Artificial Sequence
  derived and/or modified CDS sequence (opt3) from hemagglutinin__InfluenzaA__ADB80153
augaaggugaaacugcucgcccuucugugcaccuucacagcuacuuacgcagacacgaucuguauuggcuaucacgccaacaauagcaccgauacagucgacacuguuuuggagaagaacgugaccguaacacauuccgugaauuuacuggaagauaaccacaaugggaaacuaugccuccugaagggaauagcgccccuucagcuggguaacuguucugucgcuggcuggaucuuggggaauccugagugcgaacuccugauuucaaaagagaguuggagcuacaucguggaaaagccaaacccggagaauggaaccuguuaucccggccauuuugccgacuacgaggaacugagagagcaacucuccucuguuucgucauucgaaagguuugagauuuucccuaaggagagcaguuggccaaaccacacugugacaggugucuccgcaucuugcagccauaauggggaauccucauuuuauaaaaacuuacuguggcuuaccggaaagaauggcuuguaccccaaccugaguaagagcuucgccaauaacaaggagaaagaagugcuaguacucuggggcguucaccacccuccaaacaucggggaucagaugacgcuguaucauaaggagaaugcuuacgugucugucguguccucacacuacagccggaaguuuacucccgaaauagcaaaacgcccuaaggugcgagaccaggagggacguaucaacuauuacuggacccuucuggagccaggugauacaauuaucuucgaagccaauggcaacuugauugcuccgagauaugccuuugcgcucaguaggggguucggaucuggcaucauaaauuccaacgcacccauggacgagugugaugccaaaugccagacuccucaaggugcuauuaauagcucgcugccauuucagaacguccaucccguuaccaucggggaauguccuaaguacgugcggucuacaaaauuacgcaugguaaccggacugagaaauauuccauccauccagucaaggggccucuucggcgccaucgcaggguuuauugagggagguuggacgggcaugguggacgggugguauggauaccaccaccagaacgaacaaggcagugguuaugcugccgaucagaaaagcacucagaaugcgauaaacgggaucacaaauaaagucaacuccgugauugagaagaugaauacccaguucacugccguuggcaaggaguucaacaaacuugaacggcgcauggagaaccugaauaagaaaguggacgauggauuuaucgacgucuggacauacaacgcagaauugcuagugcugcucgagaaugaacgaacccuggacuuccaugauucuaacguaaagaaucuuuacgagaaaguuaagaaccaacugaagaauaacgcuaaagagauaggcaaugggugcuuugaguucuaucacaaguguaacgacgaaugcauggaaagcgugaaaaauggaacguacgauuaucccaaguacucagaggagaguaaauuguccagagaaaagauugacggugucaagcucgagagcaugggcguguaucagauccuggccaucuacucuaccgucgcuucaaguuuagugcugcuaguuagccucggggccauuuccuuuuggaugugcucuaacggaucgcugcaguguaggaucugcauuuga

SEQ ID NO: 132058 - RNA, 1701 nt, Artificial Sequence; identical to SEQ ID NO: 131818
  derived and/or modified CDS sequence (opt3) from hemagglutinin__InfluenzaA__ADB81399

SEQ ID NO: 132059 - RNA, 1701 nt, Artificial Sequence; identical to SEQ ID NO: 131818
  derived and/or modified CDS sequence (opt3) from hemagglutinin__InfluenzaA__ADB81409

SEQ ID NO: 132060 - RNA, 1701 nt, Artificial Sequence
  derived and/or modified CDS sequence (opt3) from hemagglutinin__InfluenzaA__ADB81419
augaaggccauccuggugguccuccuuuacaccuucgcuacagcaaacgccgacacucugugcauuggcuaucacgcgaauaacagcacggauaccguugacacaguguuggagaaaaauguaacugugacccauuccgucaacuuacuggaagauaagcacaaugggaaacuauguaagcucagaggaguggcuccccugcaucuugguaaaugcaacauagccggcuggauccuggggaauccugagugugaaucuuugucaacagcaaguagcugguccuacauuguugagaccucuucgucagacaacggaacuugcuauccaggcgauuuuaucgacuacgaggagcucagggagcagcugagcaguguguccucuuucgaacgguuugagauuuucccgaagacaagcuccuggcccaaucacgauucaaacaagggugucaccgccgcuuguccucaugcaggggccaaaaguuuuuauaagaaucugaucuggcucgugaaaaagggaaacagcuacccaaaauuaucuaaguccuauauaaaugacaagggcaaagaaguacugguucuuuggggcauccaccaccccucaacgagcgcugaucaacagaguuuguaccagaacgccgacgcguacguguucgucgggacuucucgcuauuccaagaaauuuaagccugagauugcaauccgaccaaaagugcgugaucaggagggaagaaugaauuacuauuggacccugguggaacccggugacaagauuacauucgaggccacuggcaaccuagucguuccuagguacgcuuuugccauggaacggaacgcagggagcggaaucauaauuucggauaccccagugcaugacugcaauacaaccugucaaacgccgaaaggcgcuaucaacacuucucuccccuuccagaauauucacccuaucacaaucgguaagugcccaaaguauguaaaauccaccaagcugcgccuugccacugggcugagaaacauucccucaauacagaguaggggauuguuuggcgcgaucgccggcuucauugaagggggauggacagguaugguggacggcugguacggguaucaucaccagaaugaacaaggaagcggcuacgcagcugaucucaaauccacccagaacgccaucgacgagauaacgaauaaggucaacucugugauugagaaaaugaauacccaguuuacagcuguugguaaggaguucaaccaccuggaaaagcggaucgaaaauuuaaacaaaaagguggaugacggguuccuggauaucuggacuuacaaugccgagcuccuuguccuguuggaaaacgagcgcacccuagacuaucaugauagcaaugugaaaaaccuguacgagaagguacgaucacagcucaaaaacaaugcaaaggaaauuggcaacggauguuuugaguucuaucacaagugcgacaauacauguauggaaaguguuaaaaacggcacuuacgauuauccugaguacuccgaagaggccaagcugaauagagaggaaaucgacggggugaaacuugagagcaccaggauuuaucaaauacuggcuaucuacucuacagucgcgucaaguuuggugcucgucgugagccugggagcaauuuccuuuuggaugugcucuaacgguucguuacagugccggaucuguaucuga

SEQ ID NO: 132061 - RNA, 1701 nt, Artificial Sequence; identical to SEQ ID NO: 131877
  derived and/or modified CDS sequence (opt3) from hemagglutinin__InfluenzaA__ADB81429

SEQ ID NO: 132062 - RNA, 1701 nt, Artificial Sequence
  derived and/or modified CDS sequence (opt3) from hemagglutinin__InfluenzaA__ADB81439
augaaggccauccuggugguccuccuuuacaccuucgcuacagcaaacgccgacacucugugcauuggcuaucacgcgaauaacagcacggauaccguugacacaguguuggagaaaaauguaacugugacccauuccgucaacuuacuggaagauaagcacaaugggaaacuauguaagcucagaggaguggcuccccugcaucuugguaaaugcaacauagccggcuggauccuggggaauccugagugugaaucuuugucaacagcaaguagcugguccuacauuguugagaccucuucgucagacaacggaacuugcuauccaggcgauuuuaucgacuacgaggagcucagggagcagcugagcaguguguccucuuucgaacgguuugagauuuucccgaagacaagcuccuggcccaaucacgauccuaacaagggugucaccgccgcuuguccacaugcaggggccaaaucauuuuauaagaaucugaucuggcucgugaaaaagggaaacaguuaccccaaauuaagcaagucuuauauaaaugacaagggcaaagaaguacugguucuuuggggcauccaccacccuuccacgucagcugaucaacagagcuuguaccagaacgccgacgcguacguguucgucgggacuucccgcuauucuaagaaauuuaagccagagauugcaauccgacccaaagugcguaaucaggagggaagaaugaacuacuauuggacccugguggaaccuggugauaagauuacauucgaggccacuggcaaccuagucguuccaagguacgcuuuugccauggaacggaaugcaggguccggaaucauaauuagcgacaccccggugcaugauugcaacacaaccugucaaacgcccaaaggcgcuaucaauacuucgcucccuuuccagaacauucacccaaucacaaucgguaagugccccaaguauguaaaaucuaccaagcugcgccuugccacugggcugagaaaugugccuuccauucagucaaggggauuguuuggcgcgauagccggcuucaucgaagggggauggacagguauggucgacggcugguacggguaucaucaccagaacgaacaaggaaguggcuacgcagcugaccucaaaagcacccagaaugccauugaugagaucacgaacaaggugaauaguguuauagagaaaaugaacacccaguuuacagcuguggguaaggaguucaaucaccuggaaaagcggauugaaaacuuaaauaaaaaggucgacgauggguuccuggacaucuggacuuacaacgccgagcuccuugugcuguuggaaaaugagcgcacccuagauuaucaugacucuaacguaaagaaccuguacgagaagguucgaagccagcucaaaaauaacgcaaaggaaaucggcaauggauguuuugaguucuaucacaagugcgauaacacauguauggaaucagugaaaaauggcacuuacgacuauccaaaguacagugaggaagccaaacugaacagagaggagauugauggggucaaacuugaauccaccaggaucuaucaaauucuggcuauauacagcacaguggcgucuucauugguccucgugguuagucugggagcaaucagcuuuuggaugugcuccaaugguucuuuacagugccggauuuguaucuga

SEQ ID NO: 132063 - RNA, 1701 nt, Artificial Sequence
  derived and/or modified CDS sequence (opt3) from hemagglutinin__InfluenzaA__ADB81449
augaaggccauccuggugguccuccuuuacaccuucgcuacagcaaacgccgacacucugugcauuggcuaucacgcgaauaacagcacggauaccguugacacaguguuggagaaaaauguaacugugacccauuccgucaacuuacuggaagauaagcacaaugggaaacuauguaagcucagaggaguggcuccccugcaucuugguaaaugcaacauagccggcuggauccuggggaauccugagugugaaucuuugucaacagcaaguagcugguccuacauuguugagaccucuucgucagacaacggaacuugcuauccaggcgauuuuaucgacuacgaggagcucagggagcagcugagcaguguguccucuuucgaacgguuugagauuuucccgaagacaagcuccuggcccaaucacgauucaaacaagggugucaccgccgcuuguccucaugcaggggccaaaaguuuuuauaagaaucugaucuggcucgugaaaaagggaaacagcuacccaaaauuaaauaagucuuauauaaacgacaagggcaaagaaguacugguucuuuggggcauccaccaccccuccacgucagcugaucaacagagcuuguaccagaaugccgacgcguacguguucgucgggacuucccgcuauucuaagaaauuuaagccugagauugcaauccgaccaaaagugcgugaucaggagggaagaaugaacuacuauuggacccugguggaacccggugacaagauuacauucgaggccacuggcaaccuagucguuccuagguacgcuuuugccauggaacggaaugcaggguccggaaucauaauuagcgauaccccagugcaugacugcaacacaaccugucaaacgccgaaaggcgcuaucaauacuucgcuccccuuccagaacauucacccuaucacaaucgguaagugcccaaaguauguaaaaucuaccaagcugcgccuugccacugggcugagaaaugugcccuccauucagucaaggggauuguuuggcgcgauagccggcuucaucgaagggggauggacagguauggucgacggcugguacggguaucaucaccagaacgaacaaggaaguggcuacgcagcugaucucaaaagcacccagaaugccauugacgagaucacgaacaaggugaauaguguuauagagaaaaugaacacccaguuuacagcuguggguaaggaguucaaucaccuggaaaagcggauugaaaacuuaaauaaaaaggucgaugacggguuccuggauaucuggacuuacaacgccgagcuccuugugcuguuggaaaaugagcgcacccuagacuaucaugauucuaacguaaagaaccuguacgagaagguucgaagccagcucaaaaauaacgcaaaggaaaucggcaauggauguuuugaguucuaucacaagugcgacaacacauguauggaaucagugaaaaauggcacuuacgauuauccuaaguacagugaggaagccaaacugaacagagaggagauugacggggucaaacuugaauccaccaggaucuaucaaauucuggcuauauacagcacaguggcgucuucauugguccucgugguuagucugggagcaaucagcuuuuggaugugcuccaaugguucuuuacagugccggauuuguaucuga

SEQ ID NO: 132064 - RNA, 1701 nt, Artificial Sequence
  derived and/or modified CDS sequence (opt3) from hemagglutinin__InfluenzaA__ADB81459
augaaggccauccuggugguccuccuuuacaccuucgcuacagcaaacgccgacacucugugcauuggcuaucacgcgaauaacagcacggauaccguugacacaguguuggagaaaaauguaacugugacccauuccgucaacuuacuggaagauaagcacaaugggaaacuauguaagcucagaggaguggcuccccugcaucuugguaaaugcaacauagccggcuggauccuggggaauccugagugugaaucuuugucaacagcaaguagcugguccuacauuguugagaccucuucgucagacaacggaacuugcuauccaggcgauuuuaucgacuacgaagaacucagggagcagcugagcaguguguccucuuucgaacgguuugagauuuucccgaagacaagcuccuggcccaaucacgauucaaacaagggugucaccgccgcuuguccucaugcaggggccaaaaguuuuuauaagaaucugaucuggcucgugaaaaagggaaacagcuacccaaaauuaaauaagucuuauauaaacgacaagggcaaagaaguacugguucuuuggggcauccaccaccccuccacgucagcugaucaacagagcuuguaccagaaugccgacgcguacguguucgucgggacuucccgcuauucuaagaaauuuaagccugagauugcaauccgaccaaaagugcgugaucaggagggaagaaugaacuacuauuggacccugguggaacccggugacaagauuacauucgaggccacuggcaaccuagucguuccuagguacgcuuuugccauggaacggaaugggggauccggcaucauaauuagcgauaccccagugcaugacugcaacacaaccugucaaacgccgaaaggugcaaucaauacuucgcuccccuuccagaacauucacccuaucacaaucgggaagugcccaaaguauguaaaaucuaccaagcugcgccuugcuacuggacugagaaaugugcccuccauucagucaaggggcuuguuuggcgccauagcgggguucaucgagggagguuggacaggcauggucgacgggugguacggauaucaucaccagaacgaacaaggcagugguuacgccgcagaucucaaaagcacccagaaugcuauugacgagaucacgaacaaggugaauaguguuauagagaaaaugaacacccaguuuacagccguggggaaggaguucaaucaccuggagaagcggauugaaaacuuaaauaaaaaggucgaugacggcuuccuggauaucuggacuuacaacgcugagcuccuugugcuguuggaaaaugagcgcacccuagacuaucaugauucuaacguaaagaaccuguacgagaagguucgaagccagcucaaaaauaacgccaaggaaaucggaaauggcuguuuugaguucuaucacaagugcgacaacacauguauggaaucagugaaaaaugggacuuacgauuauccuaaguacagugaggaagcaaaacugaacagagaggagauugacggagucaaacuugaauccaccaggaucuaucaaauucuggccauauacagcacaguggcuucuucauugguccucgugguuagucugggugcgaucagcuuuuggaugugcuccaauggcucuuuacagugccggauuuguaucuga

SEQ ID NO: 132065 - RNA, 1701 nt, Artificial Sequence
  derived and/or modified CDS sequence (opt3) from hemagglutinin__InfluenzaA__ADB82655
augaaggccauccugcucgugcuucugugcaccuuggcugcagccaacgcggacacauuauguauuggcuaccacgcuaauaacagcacugauacggucgacaccguucuggagaaaaaugugacaguaacucauuccgugaaccuacucgaagauagacacaaugggaagcugugcaaccuuaggggaaaagcaccccugcauuuggguaaguguaauauagccggcuggcuccuggggaacccugagugcgaacuacucuucgccgucaauucuuggucauauaucguggagaccaguaacagcgacaauggaacauguuacccaggcgauuuuaccuccuaugaagaguuacgggagcagcugucuucgguuagcucauucgaacgcuuugagauuuucccgaaagcuaguuccuggcccaaccacgaaacuaaucgaggugugacagcagccugcccuuacgcugggaccaacggauuuuaucguaaucuuaucugguuggucaagaaggagaacucuuacccaaaacugagaaagagcuaugugaacaauaaaaagaaagagguacugguucucuggggcauucaucaucccccuacgaacacugaccaacagucccuguaccagaaugccgaugcguacguguucgucggcucaaguaaguauagcaggaaguuuaaaccagaaaucgcagagcggcccaaggugcgcgggcaggccggaagaaugaacuacuauuggacccuuauagaaccuggugacacaaucacuuucgaggcuaccggcaaucugguggccccaagguacgcauuugcuaugaaccgggggccggucucuggaauuaucacauccgaugcccccguucacgacuguaaugcgaccugccaaacgccuaaaggcgccauuaacacuucauugccauuccagaauauccaccccauaacaauuggugaauguccuaaguaugugaaaagcacccgccuccgaauggcaacugggcugagaaacaucccaaguauucagucuaggggauuauuuggcgcuaucgccggcuucaucgaagggggauggacagguaugauugauggcugguacggguaucaccaucagaauggacaaggcuccgguuacgcugccgaccaaaagagcacccagaacgcaauagaucggaucacgaauaaaguaaacucggugauugagaagaugaauauccaguuuaccgccgucgggaaggaguucaaccaccuggagcgucgcauagaaaaccucaauaaaaagguggacgacggcuuccuugauguuuggacauacaacgcugagcuguuggugcuacuggaaaaugagagaacucucgacuuucacgauucuaacgucaaaacccuguaugagaaggugaaaacacagcuuaggaauaacgcgaaggaaauuggaaauggcugcuucgaguuuuaccauaagugugacgauacuugcauggaauccaucaaaaacgggaccuauaauuaccccaaguauucagaggaaaguaaacugaaccgggaggagaucgacggaguaaaguuggaaagcacacgaauuuaccagauccucgcaauuuauuccaccgccgcuucuagccugguuuuacuggugucacuaggugccauaggcuucuggaugugcaguaaugggucccuccagugucgcaucugcauuuga

SEQ ID NO: 132066 - RNA, 1701 nt, Artificial Sequence
  derived and/or modified CDS sequence (opt3) from hemagglutinin__InfluenzaA__ADB82656
augaaggccauccugcucgugcuucagugcauucugaccgcugcaaacgccgacacauuguguauaggcuaccacgcgaauaacagcacugauacggucgacaccguuuuagagaaaaaugugacaguaacucauuccgugaaccugcuagaagauagacacaaugggaagcucugcaaacugaagggaaucgcuccccuucaucuggguaaauguaacauugccggcugguugcucgggaauccugagugcgaacugcuguucaaggcaaacucuuggucauauaucgucgagaccaguuacagcgacaauggaacauguuauccaggcgauuuuaccaacuacgaagaacucagggagcaauuauccucugugucgucauucgaacgguuugagauguucccgaaggccaauagcuggcccaaccacgaaacuaauaaagguguuacagcugcaugcccuuaugccggggcuaacaguuuuuaccgcaaucugauuuggcuugugaagaaaggaaacuccuauccacgauugucuaagagcuacgucaacaauaaaaagaaggaggugcugguacuauggggcauccaucaccccuccaccucaacggaccagcagagucucuaccagaacgccgaugcguauguuuucgugucuagcuccacuuacaauaaacguuuuaagccugagauaggcaccagaccaaaagucagggaccaaucagggcggaugaacuauuacuggacaaucguggaacccggagauacuauuaccuucgaggcaacagguaaucugguggccccucgcuaugcuuuugccaugaagagagacagcggcagugggaucauuaugucugauaccccaguccacgacuguaacacgacuugccagacaccgaaaggagcaaucaauaccucccuucccuuccagaacguucauccugugacuauaggcgaauguccaaaguacguaaaaagcacaaagcugaggauggcuaccgguuugcggaauauucccucgauccagucucgcgggcucuuuggagccauugcgggcuucaucgagggcggguggacgggaaugaucgaugguugguauggcuaccaccaucaaaacgaacagggguccggauacgccgcagaccgaaagucaacccagaaugcuauugacggcauaacaaacaaagugaauaguaucauugagaagaugaacauccaguuuacugccgucgguaaagaguucagccaccuggaaaagagaguggagaauuuaaacaaaaagguugaugacggguuccuggauguguggaccuauaacgcugaacuccuuguccuguuggagaaugaaaggacacuagacuaccacgauuccaacgugaagaaucuguaugagaaaguacggucucaacucaagaacaaugccaaagagauaggcaacggaugcuuugaguucuaccauaagugugacgauagcugcauggagucaauuaaaaaugaaacuuaugacuacaguaaguauuccgaggaaagccgucugaaccgcgagaagaucgauggcguuaaacuugagucuacccagaucuaccagauucuggcaaucuacucaacaguggccaguagcuugguccuccugguguccuuaggggcuauuucuuuuuggaugugcucgaauggaagccugcaauguagaauaugcaucuga

SEQ ID NO: 132067 - RNA, 1701 nt, Artificial Sequence
  derived and/or modified CDS sequence (opt3) from hemagglutinin__InfluenzaA__ADB82944
augaaggccauccuggugguccuccuuuacaccuucgcuacagcaaacgccgacacucugugcauuggcuaucacgcgaauaacagcacggauaccguugacacaguguuggagaagaauguaacugugacccauuccgucaacuuacuggaagauaagcacaaugggaaacuauguaagcucagaggaguggcuccccugcaucuugguaaaugcaacauagccggcuggauccuggggaauccugagugugaaucuuugucaacagcaaguagcugguccuacauuguugagaccucuucgucagacaacggaacuugcuauccaggcgauuuuaucgacuacgaggagcucagggagcagcugagcaguguguccucuuucgaacgguuugagauuuucccgaagacaagcuccuggcccaaucacgauccuaacaagggugucaccgccgcuuguccacaugcaggggccaaaucauuuuauaagaaucugaucuggcucgugaaaaagggaaacaguuaccccaaauuaagcaagucuuauauaaaugacaagggcaaagaaguacugguucuuuggggcauccaccacccuuccacgucagcugaucaacagagcuuguaccagaacgccgacgcguacguguucgucgggaccagucgcuauucuaagaaauuuaagccagagauugcaauccgacccaaagugcgugaucaggagggaagaaugaauuacuauuggacucugguggaaccuggugacaagauuacauucgaggccacuggcaaccuagucguuccaagguacgcuuuugccauggaacggaacgcaggguccggaaucauaauuagcgauaccccggugcaugacugcaauacaaccugucaaacgcccaaaggcgcuaucaacacuucgcucccuuuccagaauauucacccaaucacaaucgguaagugccccaaguauguaaaaucuaccaagcugcgccuugccacugggcugagaaacauuccuuccauacagucaaggggauuguuuggcgcgaucgccggcuucauugaagggggauggacagguaugguggacggcugguacggguaucaucaccagaaugaacaaggaaguggcuacgcagcugaucucaaaagcacccagaacgccaucgacgagauaacgaauaaggucaacuccgugauugagaaaaugaauacccaguuuacagcuguugguaaggaguucaaccaccuggaaaagcggaucgaaaauuuaaacaaaaagguggaugacggguuccuggauaucuggacuuacaaugccgagcuccuuguccuguuggaaaacgagcgcacccuagacuaucaugauucuaaugugaaaaaccuguacgagaagguacgaagccagcucaaaaacaaugcaaaggaaauuggcaacggauguuuugaguucuaucacaagugcgacaauacauguauggaaucaguuaaaaacggcacuuacgauuauccaaaguacagugaggaagccaaacugaauagagaggagaucgacggggugaaacuugaauccaccaggauuuaucaaauacuggcuaucuacagcacagucgcgucuucauuggugcucgucgugagucugggagcaauuagcuuuuggaugugcuccaacgguucuuuacagugccggaucuguaucuga

SEQ ID NO: 132068 - RNA, 1701 nt, Artificial Sequence
  derived and/or modified CDS sequence (opt3) from hemagglutinin__InfluenzaA__ADB82950
augaaggccauccuggugguccuccuuuacaccuucgcuacagcaaacgccgacacucugugcauuggcuaucacgcgaauaacagcacggauaccguugacacaguguuggagaaaaauguaacugugacccauuccgucaacuuacuggaagauaagcacaaugggaaacuauguaagcucagaggaguggcuccccugcaucuugguaaaugcaacauagccggcuggauccuggggaauccugagugugaaucuuugucaacagcaaguagcugguccuacauuguugagaccucuucgucagacaacggaacuugcuauccaggcgauuuuaucgacuacgaagaacucagggagcagcugagcaguguguccucuuucgaacgguuugagauuuucccgaagacaagcuccuggcccaaucacgauucaaacaagggugucaccgccgcuuguccucaugcaggggccaaaaguuuuuauaagaaucugaucuggcucgugaaaaagggaaacagcuacccaaaauuaucuaaguccuauauaaaugacaagggcaaagaaguacugguucuuuggggcauccaccaccccucaacgagcgcugaucaacagaguuuguaccagaacgccgacgcguacguguucgucgggacuucucgcuauuccaagaaauuugagccugagauugcaauccgaccaaaggugcgugaucaggaaggaagaaugaauuacuauuggacccugguggagcccggugacaaaauuacauucgaagccacuggcaaccuagucguuccuagguacgcuuuugccauggagcggaacgcagggagcggaaucauaauuucggauaccccagugcaugacugcaauacaaccugucaaacgccgaagggcgcuaucaacacuucucuccccuuccagaauauucacccuaucacaaucgguaaaugcccaaaguauguaaaguccaccaaacugcgccuugccacugggcugagaaacgugcccucaauucagaguaggggauuguuuggcgcgauagccggcuucaucgaagggggauggacagguauggucgacggcugguacggguaucaucaccagaaugagcaaggaagcggcuacgcagcugaucucaaguccacccagaacgccauugacgagaucacgaauaaagugaacucuguuauagaaaagaugaauacccaguuuacagcuguggguaaagaguucaaccaccuggaaaagcggauugagaauuuaaacaagaaagucgaugacggguuccuggauaucuggacuuacaaugccgaacuccuugugcuguuggagaacgagcgcacccuagacuaucaugauagcaauguaaagaaccuguacgaaaaaguucgaucacagcucaagaacaaugcaaaagagaucggcaacggauguuuugaguucuaucacaagugcgacaauacauguauggagagugugaagaacggcacuuacgauuauccuaaauacuccgaagaggccaagcugaauagagaggaaauugacggggucaaacuugagagcaccaggaucuaucaaauucuggcuauauacucuacaguggcgucaaguuugguccucgugguuagccugggagcaaucuccuuuuggaugugcucuaacgguucguuacagugccggauuuguaucuga

SEQ ID NO: 132069 - RNA, 1701 nt, Artificial Sequence; identical to SEQ ID NO: 131515
  derived and/or modified CDS sequence (opt3) from hemagglutinin__InfluenzaA__ADB89129

SEQ ID NO: 132070 - RNA, 1701 nt, Artificial Sequence; identical to SEQ ID NO: 130717
  derived and/or modified CDS sequence (opt3) from hemagglutinin__InfluenzaA__ADB89139

SEQ ID NO: 132071 - RNA, 1701 nt, Artificial Sequence
  derived and/or modified CDS sequence (opt3) from hemagglutinin__InfluenzaA__ADB89149
augaaggccauccuggugguccuccuuuacaccuucgcuacagcaaacgccuauacucugugcauuggcuaccacgcgaauaacagcacggacaccguugauacaguguuggagaaaaauguaacugugacccauuccgucaacuuacuggaagacaagcacaaugggaaacuauguaagcucagaggaguggcuccccugcaucuugguaaaugcaacauagccggcuggauccuggggaauccugagugugaaucuuugucaacagcaaguagcugguccuauauuguugagaccucuucgucagauaacggaacuugcuacccaggcgacuuuaucgauuaugaagaacucagggagcagcugagcaguguguccucuuucgaacgguuugagauuuucccgaagacaagcuccuggcccaaucacgacucaaacaagggugucaccgccgcuuguccucaugugggggcaaaaaguuuuuacaagaaucugaucuggcucguaaagaagggaaacagcuauccaaaauuaucuaaguccuacauaaaugauaagggcaaagaaguucuggugcuuuggggcauccaccaccccucaacgagcgccgaccaacagaguuuguaccagaacgcugaugccuaugucuucguggggacuucucgcuacuccaagaaauuuaagccugagauugcgauccgaccaaaagugcguggacaggaggguagaaugaauuauuacuggacccuggucgaacccggcgacaagauuacauucgaggcaacugggaaccuaguugugccuagguaugccuuugcuauggaacggaacgccggaagcggcaucauaauuucggauaccccaguacaugacugcaauacaaccugucaaacgccgaaaggugcaaucaacacuucucuccccuuccagaauauucacccuaucacaaucgggaagugcccaaaguacgugaaauccaccaagcugcgccuugcuacuggacugagaaacauucccucaauacagaguaggggcuuguuuggcgccaucgcgggguucauugagggagguuggacaggcauggucgaugggugguauggauaccaucaccagaaugaacaaggcagcgguuacgccgcagaccucaaauccacccagaacgcuaucgacgagauaacgaauaaggugaacucuguuauugagaaaaugaauacccaguuuacagccguggggaaggaguucaaccaccuggagaagcggaucgaaaauuuaaacaaaaaggucgaugacggcuuccuggauaucuggacuuauaaugcugagcuccuugugcuguuggaaaacgagcgcacccuagacuaccaugauagcaauguuaaaaaccuguaugagaagguacgaucacagcucaaaaacaaugccaaggaaauuggaaacggcuguuuugaguucuaccacaagugcgacaauacauguauggaaagugugaaaaacgggacuuaugauuacccuaaguauuccgaggaagcaaaacugaauagagaggagaucgacggagucaaacuugaaagcaccaggauuuaccaaauacuggccaucuacucuacaguggcuucaaguuugguccucgugguuagccugggugcgauuuccuuuuggaugugcucuaacggcucguuacagugccggaucuguaucuga

SEQ ID NO: 132072 - RNA, 1701 nt, Artificial Sequence; identical to SEQ ID NO: 131070
  derived and/or modified CDS sequence (opt3) from hemagglutinin__InfluenzaA__ADB89150

SEQ ID NO: 132073 - RNA, 1701 nt, Artificial Sequence
  derived and/or modified CDS sequence (opt3) from hemagglutinin__InfluenzaA__ADB89221
augaaggccauccuggugguccuccuuuacaccuucgcuacagcaaacgccgacacucugugcauuggcuaucacgcgaauaacagcacggauaccguugacacaguguuggagaagaauguaacugugacccauuccgucaacuuacuggaagauaagcacaaugggaaacuauguaagcucagaggaguggcuccccugcaucuugguaaaugcaacauagccggcuggauccuggggaauccugagugugaaucuuugucaacagcaaguagcugguccuacauuguugagaccucuucgucagacaacggaacuugcuauccaggcgauuuuaucgacuacgaggagcucagggagcagcugagcaguguguccucuuucgaacgguuugagauuuucccgaagacaagcuccuggcccaaucacgauucaaacaagggugucaccgccgcuuguccucaugcaggggccaaaaguuuuuauaagaaucugaucuggcucgugaaaaagggaaacagcuacccaaaauuaucuaaguccuauauaaaugacaagggcaaagaaguacugguucuuuggggcauccaccaccccucaacgagcgcugaucaacagaacuuguaccagaaugccgacgcguacguguucgucgggaguucucgcuauuccaagaaauuuaagccugagauugcaauccgaccaaaagugcgugaucaggagggaagaaugaacuacuauuggacucugguggaacccggugacaagauuaccuucgaggccacaggcaaccuagucguuccuagguacgcuuuugccauggaacggaaugcagggagcggaaucauaauuucggauacuccagugcaugacugcaacaccacaugucaaaccccgaaaggcgcuaucaauacgucucuccccuuccagaacauucacccuaucacuaucgguaagugcccaaaguauguaaaauccacaaagcugcgccuugccaccgggcugagaaaugugcccucaauucagaguaggggauuguuuggcgcgauagccggcuucaucgaagggggauggacugguauggucgacggcugguacggguaucaucaccagaacgaacaaggaagcggcuacgcagcugaucucaaauccacacagaaugccauugacgagaucaccaacaagguaaauucuguuauagagaaaaugaacacgcaguuuaccgcuguggguaaggaguucaaucaccuggaaaagcggauugaaaacuuaaauaaaaaggucgaugacggguuccuggauaucuggacauacaacgccgagcuccuugugcuguuggaaaaugagcgcacucuagacuaucaugauagcaacgugaaaaaccuguacgagaagguucgaucacagcucaaaaauaacgcaaaggaaaucggcaauggauguuuugaguucuaucacaagugcgacaacaccuguauggaaagugugaaaaauggcacauacgauuauccuaaguacuccgaggaagccaaacugaacagagaggagauugacggggucaaacuugaaagcacuaggaucuaucaaauucuggcuauauacucuaccguggcgucaaguuugguccucgugguuagccugggagcaaucuccuuuuggaugugcucuaaugguucguuacagugccggauuuguaucuga

SEQ ID NO: 132074 - RNA, 1701 nt, Artificial Sequence; identical to SEQ ID NO: 130770
  derived and/or modified CDS sequence (opt3) from hemagglutinin__InfluenzaA__ADB89241

SEQ ID NO: 132075 - RNA, 1701 nt, Artificial Sequence; identical to SEQ ID NO: 130717
  derived and/or modified CDS sequence (opt3) from hemagglutinin__InfluenzaA__ADB89251

SEQ ID NO: 132076 - RNA, 1701 nt, Artificial Sequence; identical to SEQ ID NO: 131164
  derived and/or modified CDS sequence (opt3) from hemagglutinin__InfluenzaA__ADB89261

SEQ ID NO: 132077 - RNA, 1701 nt, Artificial Sequence
  derived and/or modified CDS sequence (opt3) from hemagglutinin__InfluenzaA__ADB89271
augaaggccauccuggugguccuccuuuacaccuucgcuacagcaaacgccgacacucugugcauuggcuaucacgcgaauaacagcacggauaccguugacacaguguuggagaaaaauguaacugugacccauuccgucaacuuacuggaagauaagcacaaugggaaacuauguaagcucagaggaguggcuccccugcaucuugguaaaugcaacauagccggcuggauccuggggaauccugagugugaaucuuugucaacagcaaguagcugguccuacauuguugagaccucuucgucagacaacggaacuugcuauccaggcgauuuuaucgacuacgaggagcucagggagcagcugagcaguguguccucuuucgaacgguuugagauuuucccgaagacaagcuccuggcccaaucacgauucaaacaagggugucaccgccgcuuguccucaugcaggggccaaaaguuuuuauaagaaucugaucuggcucgugaaaaagggaaacagcuacccaaaauuaucuaaguccuauauaaaugacaagggcaaagaaguacugguucuuuggggcauccaccaccccucaacgagcgcugaucaacagaguuuguaccagaacgccgacgcguacguguucgucgggucuucccgcuauagcaagaaauuuaagccugagauugcaauccgaccaaaagugcgugaucaggagggaagaaugaauuacuauuggacucugguggaacccggugacaagauuaccuucgaggccacaggcaaccuagucguuccuagguacgcuuuugccauggaacggaacgcagggucgggaaucauaauuucugauacuccagugcaugacugcaauaccacaugucaaaccccgaaaggcgcuaucaacacgucccuccccuuccagaauauucacccuaucacuaucgguaagugcccaaaguauguaaaaucaacaaagcugcgccuugccaccgggcugagaaacgugcccaguauucagagcaggggauuguuuggcgcgauagccggcuucaucgaagggggauggacugguauggucgacggcugguacggguaucaucaccagaaugaacaaggauccggcuacgcagcugaucucaaaucuacacagaacgccauugacgagaucaccaauaaggugaacagcguuauagagaaaaugaauacgcaguuuaccgcuguggguaaggaguucaaccaccuggaaaagcggauugaaaauuuaaacaaaaaggucgaugacggguuccuggauaucuggacauacaaugccgagcuccuugugcuguuggaaaacgagcgcacucuagacuaucaugauucaaauguaaagaaccuguacgagaagguucgaagucagcucaaaaacaaugcaaaggaaaucggcaacggauguuuugaguucuaucacaagugcgacaauaccuguaugggcuccgugaaaaacgggacauacgauuauccuaaguacagcgaagaggccaaacugaauagagaagagauugacggagucaaacuugagucuacuaggaucuaucaaauucuggcuauauacucaaccguggcgaguagcuugguccucgugguuucccugggugcaaucucuuuuuggaugugcucgaacggcagcuuacagugccggauuuguaucuga

SEQ ID NO: 132078 - RNA, 1701 nt, Artificial Sequence
  derived and/or modified CDS sequence (opt3) from hemagglutinin__InfluenzaA__ADB89281
augaaggccauccuggugguccuccuuuacaccuucgcuacagcaaacgccgacacucugugcauuggcuaucacgcgaauaacagcacggauaccguugacacaguguuggagaaaaauguaacugugacccauuccgucaacuuacuggaagauaagcacaaugggaaacuauguaagcucagaggaguggcuccccugcaucuugguaaaugcaacauagccggcuggauccuggggaauccugagugugaaucuuugucaacagcaaguagcugguccuacauuguugagaccucuucgucagacaacggaacuugcuauccaggcgauuuuaucgacuacgaagaacucagggagcagcugagcaguguguccucuuucgaacgguuugagauuuucccgaagacaagcuccuggcccaaucacgauucaaacaagggugucaccgccgcuuguccucaugcaggggccaaaaguuuuuauaagaaucugaucuggcucgugaaaaagggaaacagcuacccaaaauuaucuaaguccuauauaaaugacaagggcaaagaaguacugguucuuuggggcauccaccaucccccuacgucagcugaucaacagagcuuguaccagaacgccgacgcguacguguucgucgggaccagucgcuauucuaagaaauuuaagccagagauugcaauccgacccaaagugcguggacaggaggguagaaugaauuacuauuggacucugguggaaccuggcgauaagauuacauucgaggccacugggaaccuagucguuccaagguacgcuuuugccauggaacggaacgcaggauccggcaucauaauuagcgacaccccggugcacgauugcaauacaaccugucaaacgcccaaaggugcuaucaacacuucgcucccuuuccagaauauucacccaaucacaaucgggaagugccccaaguauguaaaaucuaccaagcugcgccuugccacuggacugagaaacgugccuuccauucagucaaggggcuuguuuggcgcgauagccggguucaucgagggagguuggacaggcauggucgacgggugguacggauaucaucaccagaaugaacaaggcagugguuacgcagcugaccucaaaagcacccagaacgccauugaugagaucacgaauaaggugaacuccguuauagagaaaaugaauacccaguuuacagcuguggggaaggaguucaaccaccuggagaagcggauugaaaauuuaaacaaaaaggucgacgauggcuuccuggacaucuggacuuacaaugccgagcuccuugugcuguuggaaaacgagcgcacccuagauuaucaugacucuaauguaaagaaccuguacgagaagguucgaagccagcucaaaaacaaugcaaaggaaaucggaaacggcuguuuugaguucuaucacaagugcgauaauacauguauggaaucagugaaaaacgggacuuacgacuauccaaaguacagugaggaagccaaacugaauagagaggagauugauggagucaaacuugaauccaccaggaucuaucaaauucuggcuauauacagcacaguggcgucuucauugguccucgugguuagucugggugcaaucagcuuuuggaugugcuccaacggcucuuuacagugccggauuuguaucuga

SEQ ID NO: 132079 - RNA, 1701 nt, Artificial Sequence; identical to SEQ ID NO: 130717
  derived and/or modified CDS sequence (opt3) from hemagglutinin__InfluenzaA__ADB89291

SEQ ID NO: 132080 - RNA, 1701 nt, Artificial Sequence; identical to SEQ ID NO: 130717
  derived and/or modified CDS sequence (opt3) from hemagglutinin__InfluenzaA__ADB89301

SEQ ID NO: 132081 - RNA, 1701 nt, Artificial Sequence; identical to SEQ ID NO: 130717
  derived and/or modified CDS sequence (opt3) from hemagglutinin__InfluenzaA__ADB89311

SEQ ID NO: 132082 - RNA, 1701 nt, Artificial Sequence
  derived and/or modified CDS sequence (opt3) from hemagglutinin__InfluenzaA__ADB89321
augaaggccauccuggugguccuccuuuacaccuucgcuacagcaaacgccgacacucugugcauuggcuaucacgcgaauaacagcacggauaccguugacacaguguuggagaaaaauguaacugugacccauuccgucaacuuacuggaagauaagcacaaugggaaacuauguaagcucagaggaguggcuccccugcaucuugguaaaugcaacauagccggcuggauccuggggaauccugagugugaaucuuugucaacagcaaguagcugguccuacauuguugagaccucuucgucagacaacggaacuugcuauccaggcgauuuuaucgacuacgaagaacucagggagcagcugagcaguguguccucuuucgaacgguuugagauuuucccgaagacaagcuccuggcccaaucacgauucaaacaagggugucaccgccgcuuguccucaugcaggggccaaaaguuuuuauaagaaucugaucuggcucgugaaaaagggaaacagcuacccaaaauuaucugaauccuauauaaaugacaagggcaaggagguacugguucuuuggggcauccaccaccccucaacgagcgcugaucaacagaguuuguaccagaacgccgacgcguacguguucgucgggacuucuaaauauuccaagaaauuuaagccugagauugcaauccgcccaaaagugcgagaucaggaaggacguaugaauuacuauuggacccugguggagcccggugacaagauuacauucgaagccacuggcaaccuagucguuccuagauacgcuuuugccauggagaggaacgcagggagcggaaucauaauuucggauaccccagugcaugacugcaauacaaccugucaaacgccgaaaggcgcuaucaacacuucucuccccuuccagaauauucacccuaucacaaucgguaagugcccaaaguauguaaaauccaccaagcugcggcuugccacugggcugcgcaacgugcccucaauucagaguagaggauuguuuggcgcgauagccggcuucaucgaagggggauggacagguauggucgacggcugguacggguaucaucaccagaaugagcaaggaagcggcuacgcagcugaucucaaauccacccagaacgccauugacgagaucacgaauaaggugaacucuguuauagaaaagaugaauacccaguuuacagcuguggguaaggaguucaaccaccuggaaaagaggauugagaauuuaaacaaaaaggucgaugacggguuccuggauaucuggacuuacaaugccgaacuccuugugcuguuggagaacgagcggacccuagacuaucaugauagcaauguuaaaaaccuguacgaaaagguacgcucacagcucaaaaacaaugcaaaggagaucggcaacggauguuuugaguucuaucacaagugcgacaauacauguauggagagugugaaaaacggcacuuacgauuauccuaaguacuccgaagaggccaaacugaaucgagaggaaauugacggggucaaacuugagagcaccagaaucuaucaaauucuggcuauauacucuacaguggcgucaaguuugguccucgugguuagccugggagcaaucuccuuuuggaugugcucuaacgguucguuacagugcaggauuuguaucuga

SEQ ID NO: 132083 - RNA, 1701 nt, Artificial Sequence
  derived and/or modified CDS sequence (opt3) from hemagglutinin__InfluenzaA__ADB89331
augaaggccauccuggugguccuccuuuacaccuucgcuacagcaaacgccgacacucugugcauuggcuaucacgcgaauaacagcacggauaccguugacacaguguuggagaaaaauguaacugugacccauuccgucaacuuacuggaagauaagcacaaugggaaacuauguaagcucagaggaguggcuccccugcaucuugguaaaugcaacauagccggcuggauccuggggaauccugagugugaaucuuugucaacagcaaguagcugguccuacauuguugagaccucuucgucagacaacggaacuugcuauccaggcgauuuuaucgacuacgaggagcucagggagcagcugagcaguguguccucuuucgaacgguuugagauuuucccgaagacaagcuccuggcccaaucacgauucaaacaagggugucaccgccgcuuguccucaugcaggggccaaaaguuuuuauaagaaucugaucuggcucgugaaaaagggaaacagcuacccaaaauuaucuaaguccuauauaaaugacaagggcaaagaaguacugguucuuuggggcauccaccaccccucaacgagcgcugaucaacagaguuuguaccagaacgccgacgcguacguguucgucgggucuuccaaguauagcaaaaaguuuaaaccugagauugcaauccgcccaaaggugcgagaucaggagggacguaugaauuacuauuggacucugguggaacccggugacaaaauuaccuucgaggccacaggcaaccuagucguuccuagauacgcuuuugccauggaaaggaacgcagggucgggaaucauaauuucugauacuccagugcaugacugcaauaccacaugucaaaccccgaagggcgcuaucaacacgucccuccccuuccagaauauucacccuaucacuaucgguaagugcccaaaauauguaaagucaacaaaacugcggcuugccaccgggcugcgcaacgugcccaguauucagagcagaggauuguuuggcgcgauagccggcuucaucgaagggggauggacugguauggucgacggcugguacggguaucaucaccagaaugaacaaggauccggcuacgcagcugaucucaagucuacacagaacgccauugacgagaucaccaauaaagugaacagcguuauagagaagaugaauacgcaguuuaccgcuguggguaaggaauuuaaccaccuggagaaaaggauugaaaauuuaaacaagaaagucgaugacggguuccuggauaucuggacauacaaugccgagcuccuugugcuguuggaaaacgagcggacucuagacuaucaugauucaaauguaaagaaccuguacgagaaaguucgcagucagcucaagaacaaugcaaaggaaaucggcaacggauguuucgaguucuaucacaaaugcgacaauaccuguauggaauccgugaagaacggcacauacgauuauccuaaauacagcgaggaagccaagcugaaucgagaggagauugacggggucaaacuugaaucuacuagaguguaucaaauccuggcuauuuacucaaccgucgcgaguagcuuggugcucguugugucccugggagcaauaucuuuuuggaugugcucgaacgguagcuuacagugcaggaucuguauuuga

SEQ ID NO: 132084 - RNA, 1701 nt, Artificial Sequence; identical to SEQ ID NO: 130717
  derived and/or modified CDS sequence (opt3) from hemagglutinin__InfluenzaA__ADB89341

SEQ ID NO: 132085 - RNA, 1701 nt, Artificial Sequence; identical to SEQ ID NO: 130717
  derived and/or modified CDS sequence (opt3) from hemagglutinin__InfluenzaA__ADB89351

SEQ ID NO: 132086 - RNA, 1701 nt, Artificial Sequence; identical to SEQ ID NO: 130717
  derived and/or modified CDS sequence (opt3) from hemagglutinin__InfluenzaA__ADB89361

SEQ ID NO: 132087 - RNA, 1701 nt, Artificial Sequence; identical to SEQ ID NO: 130717
  derived and/or modified CDS sequence (opt3) from hemagglutinin__InfluenzaA__ADB89371

SEQ ID NO: 132088 - RNA, 1701 nt, Artificial Sequence; identical to SEQ ID NO: 131462
  derived and/or modified CDS sequence (opt3) from hemagglutinin__InfluenzaA__ADB89381

SEQ ID NO: 132089 - RNA, 1701 nt, Artificial Sequence
  derived and/or modified CDS sequence (opt3) from hemagglutinin__InfluenzaA__ADB89391
augaaggccauccuggugguccuccuuuacaccuucgcuacagcaaacgccgacacucugugcauuggcuaucacgcgaauaacagcacggauaccguugacacaguguuggagaaaaauguaacugugacccauuccgucaacuuacuggaagauaagcacaaugggaaacuauguaagcucagaggaguggcuccccugcaucuugguaaaugcaacauagccggcuggauccuggggaauccugagugugaaucuuugucaacagcaaguagcugguccuacauuguugagaccucuucgucagacaacggaacuugcuauccaggcgauuuuaucgacuacgaggagcucagggagcagcugagcaguguguccucuuucgaacgguuugagauuuucccgaagacaagcuccuggcccaaucacgauucaaacaagggugucaccgccgcuugucugcaugcaggggccaaaaguuuuuauaagaaucucaucugguuagugaaaaagggaaacagcuacccuaaacugucuaaguccuauauaaaugacaagggcaaagaaguacuuguuuuguggggcauccaccacccaucaacgagcgcugaucaacagagucuguaccagaacgccgacgcguacguguucgucgggacuucucgcuauuccaagaaauuuaagcccgagauugcaauccgaccuaaagugcgugaucaggagggaagaaugaauuacuauuggacccuaguggaaccaggugacaagauuacauucgaggccacuggcaaccucgucguucccagguacgcuuuugccauggaacggaacgcagggagcggaaucauaauuucggauaccccugugcaugacugcaauacaaccugucaaacgccaaaaggcgcuaucaacacuucucugccguuccagaauauucaccccaucacaaucgguaagugcccuaaguauguaaaauccaccaaacuucgccuggccacuggguugagaaacgugccaucaauucagaguaggggacucuuuggcgcgauagccggcuucaucgaagggggauggacagguaugauugacggcugguacggguaucaucaccagaaugaacaaggaagcggcuacgcagcugaucugaaguccacccagaacgccaucgacgagauaacgaauaaggucaacucugugauugagaaaaugaauacccaguuuacagcuguugguaaggaguucaaccacuuagaaaagcggaucgaaaaucugaacaaaaagguggaugacggguuccucgauaucuggacuuacaaugccgagcuucuggucuugcuagaaaacgagcgcacccuggacuaucaugauagcaaugugaaaaaccucuacgagaagguacgaucacagcugaaaaacaaugcaaaggaaauuggcaacggauguuuugaguucuaucacaagugcgacaauacauguauggaaaguguuaaaaacggcacuuacgauuaucccaaguacuccgaggaagccaaacuuaauagagaggagaucgacggggugaagcuggaaagcaccaggauuuaucaaauauuggcuaucuacucuacagucgcgucaagucucgugcuggucgugagcuuaggagcaauuuccuuuuggaugugcucuaacgguucgcugcagugccggaucuguaucuga

SEQ ID NO: 132090 - RNA, 1701 nt, Artificial Sequence; identical to SEQ ID NO: 130704
  derived and/or modified CDS sequence (opt3) from hemagglutinin__InfluenzaA__ADB89401

SEQ ID NO: 132091 - RNA, 1701 nt, Artificial Sequence; identical to SEQ ID NO: 130717
  derived and/or modified CDS sequence (opt3) from hemagglutinin__InfluenzaA__ADB89411

SEQ ID NO: 132092 - RNA, 1701 nt, Artificial Sequence; identical to SEQ ID NO: 131164
  derived and/or modified CDS sequence (opt3) from hemagglutinin__InfluenzaA__ADB89431

SEQ ID NO: 132093 - RNA, 1701 nt, Artificial Sequence; identical to SEQ ID NO: 131070
  derived and/or modified CDS sequence (opt3) from hemagglutinin__InfluenzaA__ADB89441

SEQ ID NO: 132094 - RNA, 1701 nt, Artificial Sequence; identical to SEQ ID NO: 130717
  derived and/or modified CDS sequence (opt3) from hemagglutinin__InfluenzaA__ADB89461

SEQ ID NO: 132095 - RNA, 1701 nt, Artificial Sequence; identical to SEQ ID NO: 131164
  derived and/or modified CDS sequence (opt3) from hemagglutinin__InfluenzaA__ADB89481

SEQ ID NO: 132096 - RNA, 1701 nt, Artificial Sequence; identical to SEQ ID NO: 131164
  derived and/or modified CDS sequence (opt3) from hemagglutinin__InfluenzaA__ADB89491

SEQ ID NO: 132097 - RNA, 1701 nt, Artificial Sequence
  derived and/or modified CDS sequence (opt3) from hemagglutinin__InfluenzaA__ADB89501
augaaggccauccuggugguccuccuuuacaccuucgcuacagcaaacgccgacacucugugcauuggcuaucacgcgaauaacagcacggauaccguugacacaguguuggagaaaaauguaacugugacccauuccgucaacuuacuggaagauaagcacaaugggaaacuauguaagcucagaggaguggcuccccugcaucuugguaaaugcaacauagccggcuggauccuggggaauccugagugugaaucuuugucaacagcaaguagcugguccuacauuguugagaccucuucgucagacaacggaacuugcuauccaggcgauuuuaucgacuacgaggagcucagggagcagcugagcaguguguccucuuucgaacgguuugagauuuucccgaagacaagcuccuggcccaaucacgauucaaacaagggugucaccgccgcuuguccucaugcaggggccaaaaguuuuuauaagaaucugaucuggcucgugaaaaagggaaacagcuacccaaaauuaucuaaguccuauauaaaugacaagggcaaagaaguacugguucuuuggggcauccaccaccccucaacgagcgcugaucaacagaguuuguaccagaacgccgacgcguacguguucgucgggucuucccgcuauagcaagaaauuuaagccugagauugcaauccgaccaaaagugcgugaucaggagggaagaaugaauuacuauuggacucugguggaacccggugacaagauuaccuucgaggccacaggcaaccuagucguuccuagguacgcuuuugccauggaacggaacgcagggucgggaaucauaauuucugauacuccagugcaugacugcaauaccacaugucaaaccccgaaaggcgcuaucaacacgucccuccccuuccagaauauucacccuaucacuaucgguaagugcccaaaguauguaaaaucaacaaagcugcgccuugccaccgggcugagaaacgugcccaguauucagagcaggggauuguuuggcgcgauagccggcuucaucgaagggggauggacuggucucgucgacggcugguacggguaucaucaccagaaugaacaaggauccggcuacgcagcugaucugaaaucuacacagaacgccauugacgagaucaccaauaaggugaacagcguuauagagaaaaugaauacgcaguuuaccgcuguggguaaggaguucaaccacuuagaaaagcggauugaaaaucugaacaaaaaggucgaugacggguuccucgauaucuggacauacaaugccgagcuucugguguugcuagaaaacgagcgcacucuggacuaucaugauucaaauguuaaaaaccucuacgagaagguacgaagucagcugaaaaacaaugcaaaggaaaucggcaacggauguuuugaguucuaucacaagugcgacaauaccuguauggaauccgugaaaaacggcacauacgauuauccuaaguacagcgaggaagccaaacuuaauagagaggagauugacggggucaagcuggaaucuacuaggaucuaucaaauuuuggcuauauacucaaccguggcgaguagccucguccuggugguuuccuuaggagcaaucucuuuuuggaugugcucgaacgguagccugcagugccggauuuguaucuga

SEQ ID NO: 132098 - RNA, 1701 nt, Artificial Sequence; identical to SEQ ID NO: 130717
  derived and/or modified CDS sequence (opt3) from hemagglutinin__InfluenzaA__ADB89511

SEQ ID NO: 132099 - RNA, 1701 nt, Artificial Sequence; identical to SEQ ID NO: 131164
  derived and/or modified CDS sequence (opt3) from hemagglutinin__InfluenzaA__ADB89531

SEQ ID NO: 132100 - RNA, 1701 nt, Artificial Sequence; identical to SEQ ID NO: 131164
  derived and/or modified CDS sequence (opt3) from hemagglutinin__InfluenzaA__ADB89541

SEQ ID NO: 132101 - RNA, 1701 nt, Artificial Sequence; identical to SEQ ID NO: 131877
  derived and/or modified CDS sequence (opt3) from hemagglutinin__InfluenzaA__ADB89551

SEQ ID NO: 132102 - RNA, 1701 nt, Artificial Sequence; identical to SEQ ID NO: 130717
  derived and/or modified CDS sequence (opt3) from hemagglutinin__InfluenzaA__ADB89561

SEQ ID NO: 132103 - RNA, 1701 nt, Artificial Sequence; identical to SEQ ID NO: 130717
  derived and/or modified CDS sequence (opt3) from hemagglutinin__InfluenzaA__ADB89571

SEQ ID NO: 132104 - RNA, 1701 nt, Artificial Sequence; identical to SEQ ID NO: 130717
  derived and/or modified CDS sequence (opt3) from hemagglutinin__InfluenzaA__ADB89581

SEQ ID NO: 132105 - RNA, 1701 nt, Artificial Sequence
  derived and/or modified CDS sequence (opt3) from hemagglutinin__InfluenzaA__ADB89591
augaaggccauccuggugguccuccuuuacaccuucgcuacagcaaacgccgacacucugugcauuggcuaucacgcgaauaacagcacggauaccguugacacaguguuggagaaaaauguaacugugacccauuccgucaacuuacuggaagauaagcacaaugggaaacuauguaagcucagaggaguggcuccccugcaucuugguaaaugcaacauagccggcuggauccuggggaauccugagugugaaucuuugucaacagcaaguagcugguccuacauuguugagaccucuucgucagacaacggaacuugcuauccaggcgauuuuaucgacuacgaagaacucagggagcagcugagcaguguguccucuuucgaacgguuugagauuuucccgaagacaagcuccuggcccaaucacgauucaaacaagggugucaccgccgcuuguccucaugcaggggccaaaaguuuuuauaagaaucugaucuggcucgugaaaaagggaaacagcuacccaaaauuaucuaaguccuauauaaaugacaagggcaaagaaguacugguucuuuggggcauccaccaccccucaacgagcgcugaucaacagaguuuguaccagaacgccgacgcguacguguucgucgggacuucucgcuauuccaagaaauuuaagccugagauugcaauccgaccaaaagugcgugagcaggaaggaagaaugaauuacuauugggcccugguggagcccggugauaagauuaccuucgaagcuacaggcaaccuagucguuccuagguacgccuuugcaauggagcggaacgcugggagcggaaucauaauuucggacacuccagugcaugauugcaauaccacaugucaaaccccgaaaggcgccaucaacacgucucuccccuuccagaauauucacuccaucacuaucgguaagugcccuaaguauguaaaaucaacaaagcugcgccuugcgaccgggcugagaaacgugccaaguauucagagcaggggauuguuuggcgccauagcaggcuucaucgaagggggauggacugguauggucgacggcugguacggguaucaucaccagaaugagcaaggauccggcuacgcugccgaccucaaaucuacacagaacgcuauugaugagaucaccaauaaggugaacagcguuauagaaaagaugaauacgcaguuuaccgccguggguaaggaguucaaccaccuggaaaagcggauugagaauuuaaacaaaaaggucgacgauggguuccuggacaucuggacauacaaugcagaacuccuugugcuguuggagaacgagcgcacucuagauuaucaugacucaaauguuaaaaaccuguacgaaaagguacgaagucagcucaaaaacaaugccaaggagaucggcaacggauguuuugaguucuaucacaagugcgauaauaccuguauggaguccgugaaaaacggcacauacgacuaucccaaguacagcgaagaggcuaaacugaauagagaggaaauugauggggucaaacuugagucuacuaggaucuaucaaauucuggcgauauacucaaccguggcaaguagcuugguccucgugguuucccugggagccaucucuuuuuggaugugcucgaacgguagcuuacagugccggauuuguaucuga

SEQ ID NO: 132106 - RNA, 1701 nt, Artificial Sequence
  derived and/or modified CDS sequence (opt3) from hemagglutinin__InfluenzaA__ADB89601
augaaggccaucauugugguccugcucuacaccuucgcuacagcaaacgccgacacucuuugcauaggcuaucacgcgaauaacagcacggauaccguugacacagugcuggagaaaaauguaacugugacccauuccgucaacuuguuagaagauaagcacaaugggaaacuguguaagcuaagaggaguggcuccccuccaucuggguaaaugcaacaucgccggcuggauucuugggaauccugagugugaaucucugucaacagcaaguagcugguccuacaucguugagaccucuucgucagacaacggaacuugcuauccaggcgauuuuauugacuacgaagaguugagggagcagcucagcaguguguccucuuucgaacgguuugagaucuucccgaagacaagcuccuggcccaaucacgauucaaacaagggugucaccgccgcuuguccucaugcaggggccaaaaguuuuuauaagaaucugauauggcuggugaaaaagggaaacagcuacccaaaacucucuaaguccuauaucaaugacaagggcaaagaaguauuaguucuguggggcauucaccaccccucaacgagcgcugaucaacagagucuuuaccagaacgccgacgcguacguguucgucgggacuucucgcuauuccaagaaauuuaagccugagaucgcaauucgaccaaaagugcgugaucaggagggaagaaugaauuacuauuggaccuugguggaacccggugacaagaucacauucgaggccacuggcaaccuggucguuccuagguacgcuuuugccauggaacggaacgcagggagcggaauaauuaucucggauaccccagugcaugacugcaauacaaccugucaaacgccgaaaggcgcuauuaacacuucucuacccuuccagaauauccacccuaucacaauugguaagugcccaaaguauguaaaauccaccaagcuccgccuggccacugggcuuagaaacgugcccucaauacagaguaggggacuguuuggcgcgaucgccggcuucauugaagggggauggacagguauggucgacggcugguacggguaucaucaccagaaugaacaaggaagcggcuacgcagcugauuugaaauccacccagaacgccaucgacaagauaacgaauaaagugaacucuguuauugagaagaugaauacccaguuuacagcuguggguaaggaguucaaccaccucgaaaaacggaucgagaaucugaacaagaaagucgaugacggguucuuagauaucuggacuuacaaugccgaacugcucgugcuucuggagaacgaacgcaccuuggacuaucaugauagcaauguaaagaaccuauacgagaaaguucgaucacagcugaagaacaaugcaaaggagauuggcaacggauguuuugaguucuaucacaaaugcgacaauacauguauggagagugugaagaacggcacuuacgauuauccuaaauacuccgaagaggccaagcucaauagagaagagaucgacggggucaaacuggagagcaccaggauuuaucaaauacuuacaaucuacucuaccguggcuucaagucuggucuuggugguuagccucggagcgauuuccuuuuggaugugcucuaacgguucgcugcagugccggaucuguaucuga

SEQ ID NO: 132107 - RNA, 1701 nt, Artificial Sequence; identical to SEQ ID NO: 131881
  derived and/or modified CDS sequence (opt3) from hemagglutinin__InfluenzaA__ADB89611

SEQ ID NO: 132108 - RNA, 1701 nt, Artificial Sequence; identical to SEQ ID NO: 131881
  derived and/or modified CDS sequence (opt3) from hemagglutinin__InfluenzaA__ADB89621

SEQ ID NO: 132109 - RNA, 1701 nt, Artificial Sequence
  derived and/or modified CDS sequence (opt3) from hemagglutinin__InfluenzaA__ADB89631
augaaggccauccugauugugcuccuuuacaccuucgcuacagcaaacgccgacacucugugcauaggcuaucacgcgaauaacagcacggauaccgucgacacaguuuuggagaaaaaugugacuguaacccauuccgugaacuuacuggaagauaagcacaaugggaaacuauguaagcucagaggagucgcuccccugcaucuugguaaaugcaacaucgccggcuggauucuggggaauccugagugugaaucuuugucaacagcaaguagcugguccuacaucguggagaccucuucgucagacaacggaacuugcuauccaggcgauuuuauugacuacgaggagcucagggagcagcugagcaguguuuccucuuucgaacgguuugagaucuucccgaagacaagcuccuggcccaaucacgauucaaacaagggugugaccgccgcuuguccucaugcaggggccaaaaguuuuuauaagaaucugauauggcucgucaaaaagggaaacagcuacccaaaauuaucuaaguccuauaucaaugacaagggcaaagaagugcugguacuuuggggcauucaccaccccucaacgagcgcugaucaacagaguuuguaccagaacgccgacgcguacguuuucguggggacuucucgcuauuccaagaaauuuaagccugagaucgcaauucgaccaaaaguccgugaucaggagggaagaaugaauuacuauuggacccugguggaacccggugacaagaucacauucgaggccacuggcaaccuaguggucccuagguacgcuuuugccauggaacggaacgcagggagcggaauaauuaucucggauaccccaguucaugacugcaauacaaccugucaaacgccgaaaggcgcuauuaacacuucucuccccuuccagaauauccacccuaucacaauugguaagugcccaaaguaugugaaauccaccaagcugcgccuugccacugggcugagaaacauacccucaauccagaguaggggauuguuuggcgcgauugccggcuucaucgaagggggauggacagguaugguagacggcugguacggguaucaucaccagaaugaacaaggaagcggcuacgcagcugaucucaaauccacccagaacgccauagacgagauuacgaauaaggugaacucugucaucgagaaaaugaauacccaguuuacagcuguggguaaggaguucaaccaccuggaaaagcggaucgaaaauuuaaacaaaaagguugaugacggguuccuggauauuuggacuuacaaugccgagcuccuugugcuguuggaaaacgagcgcacccuagacuaucaugauagcaaugucaaaaaccuguacgagaaggugcgaucacagcucaaaaacaaugcaaaggaaaucggcaacggauguuuugaguucuaucacaagugcgacaauacauguauggaaaguguaaagaacggcacuuacgauuauccuaaguacuccgaggaagccaaacugaauagagaggagauugacgggguuaaacuugaaagcaccaggauauaucaaauccuggcuauuuacucuacaguggcgucaaguuugguccucguggucagccugggagcaaucuccuuuuggaugugcucuaacgguucguuacagugccggaucuguauuuga

SEQ ID NO: 132110 - RNA, 1701 nt, Artificial Sequence; identical to SEQ ID NO: 131881
  derived and/or modified CDS sequence (opt3) from hemagglutinin__InfluenzaA__ADB89641

SEQ ID NO: 132111 - RNA, 1701 nt, Artificial Sequence; identical to SEQ ID NO: 130717
  derived and/or modified CDS sequence (opt3) from hemagglutinin__InfluenzaA__ADB89651

SEQ ID NO: 132112 - RNA, 1701 nt, Artificial Sequence; identical to SEQ ID NO: 130717
  derived and/or modified CDS sequence (opt3) from hemagglutinin__InfluenzaA__ADB89661

SEQ ID NO: 132113 - RNA, 1701 nt, Artificial Sequence; identical to SEQ ID NO: 131881
  derived and/or modified CDS sequence (opt3) from hemagglutinin__InfluenzaA__ADB89671

SEQ ID NO: 132114 - RNA, 1701 nt, Artificial Sequence; identical to SEQ ID NO: 130717
  derived and/or modified CDS sequence (opt3) from hemagglutinin__InfluenzaA__ADB89681

SEQ ID NO: 132115 - RNA, 1701 nt, Artificial Sequence; identical to SEQ ID NO: 130717
  derived and/or modified CDS sequence (opt3) from hemagglutinin__InfluenzaA__ADB89691

SEQ ID NO: 132116 - RNA, 1701 nt, Artificial Sequence; identical to SEQ ID NO: 131819
  derived and/or modified CDS sequence (opt3) from hemagglutinin__InfluenzaA__ADB89701

SEQ ID NO: 132117 - RNA, 1701 nt, Artificial Sequence
  derived and/or modified CDS sequence (opt3) from hemagglutinin__InfluenzaA__ADB89711
augaaggccauccuggugguccuccuuuacaccuucgcuacagcaaacgccgacacucugugcauuggcuaucacgcgaauaacagcacggauaccguugacacaguguuggagaaaaauguaacugugacccauuccgucaacuuacuggaagauaagcacaaugggaaacuauguaagcucagaggaguggcuccccugcaucuugguaaaugcaacauagccggcuggauccuggggaauccugagugugaaucuuugucaacagcaaguagcugguccuacauuguugagaccucuucgucaggaaacggcacuugcuauccaggugacuuuaucgauuacgaagaacucagggagcagcugagcaguguguccucuuucgaacgguuugagauuuucccgaagacaagcuccuggcccaaucacgacucaaacaagggggucaccgccgcuuguccucaugcaggagccaaaaguuuuuauaagaaucugaucuggcucgugaaaaagggcaacagcuacccaaaauuaucuaaguccuauauaaaugauaagggcaaagaaguacugguucuuugggggauccaccaccccucaacgagcgcugaccaacagaguuuguaccagaacgccgaugcguacguguucgucggaacuucucgcuauuccaagaaauuuaagccugagauugcaauccgaccaaaagugcgugaccaggaggguagaaugaauuaccauuggacccugguggaacccggcgauaagauuacauucgaggccacugggaaccuagucguuccuagguaugcuuuugccauggaacggaacgcaggaagcggcaucauaauuucggacaccccagugcacgauugcaauacaaccugucaaacgccgaaaggugcuaucaacacuucucuccccuuccagaauauucauccuaucacaaucgggaagugcccaaaguacguaaaauccaccaagcugcgccuugccacuggacugagaaacgugcccucaauucagaguaggggcuuguuuggcgcgauagccggguucaucgagggagguuggacaggcauggucgacgggugguauggauaccaccaccagaaugaacaaggcagcgguuaugcagcugaccucaaauccacccagaacgccauugaugagaucacgaauaaggugaacucuguuauagagaaaaugaauacccaguuuacagcuguggggaaggaguucaaccaucuggagaagcggauugaaaauuuaaacaaaaaggucgacgauggcuuccuggacaucuggacuuacaaugccgagcuccuugugcuguuggaaaacgagcgcacccuagauuaccacgacagcaauguaaagaaccuguaugagaagguucgaucacagcucaaaaacaaugcaaaggaaaucggaaacggcuguuuugaguucuaccauaagugcgauaauacauguauggaaagugugaaaaacgggacuuaugacuacccuaaguauuccgaggaagccaaacugaauagagaggagauugauggagucaaacuugaaagcaccaggaucuaccaaauucuggcuauauauucuacaguggcgucaaguuugguccucgugguuagccugggugcaaucuccuuuuggaugugcucuaacggcucguuacagugccggauuuguaucuga

SEQ ID NO: 132118 - RNA, 1701 nt, Artificial Sequence
  derived and/or modified CDS sequence (opt3) from hemagglutinin__InfluenzaA__ADB89721
augaagaccaucauugcccugagcuacauacucugccuuguguucgcucagaaacugcccggcaacgacaauuccacagcaacuuuguguuuagggcaccaugccgucccuaacggaacgaucguuaagaccauuacaaaugaucaaaucgaggugacuaacgcgaccgaacugguacagucuucaaguacaggugagauuugcgacagcccacaccagauccuagauggcaaaaauuguacccucauagacgcucugcuuggggauccgcagugcgacggauuucaaaacaagaaaugggaucuguucguggaaagauccaaggccuauucuaauuguuaccccuaugacgucccugauuacgcaucguugaggucacucguggccagcaguggcacucuggaguuugacaacgaauccuucaauuggacagguguuacccagaacgggacgucuagcgcuugcauccggcgcuccaaaaauucauuuuucagucgacugaacuggcucacucauuuaaauuuuaaauauccagcacugaacgugaccaugcccaauaacgagcaguucgauaaguuguacuuguggggaguccaccauccuggcacagacaaagaucagauuuuucuguaugcccaagcuagcggccguaucacugugucuaccaagagaucccagcagacaguaauuccaaacaucgggucaaggccccggguucgcaauauaccuagcagaauuaguaucuacuggaccauugugaaaccaggagacauccuacucaucaacucuacggguaaucugauugccccgaggggcuacuucaagauacaguccggaaagagcucgaucaugcggucugacgcgcccauugggaaauguaacuccgagugcaucacuccuaauggcucaauaccaaacgauaagcccuuucaaaaugucaaccgcauuacauauggugcauguccucgauacgugaaacagaauacccuuaagcuggccacugggaugagaaacgugccagaaaaacagacaaggggaaucuucggcgcuaucgccggcuuuauugagaaugggugggaaggaauggucgacgguugguauggcuuccggcaccaaaacagugaggggcguggacaggcagcugaucuuaagagcacccaggccgcgaucgaccagauuaauggcaaacucaaccgccugauagguaagacgaaugagaaguuccaccaaaucgaaaaagaguuuuccgaaguugaggggaggauucaggauuuagaaaaguacguggaggacaccaaaaucgaucuguggucuuauaacgccgagcuccuuguagcacuggaaaaccagcauacaaucgacuugacugauagcgagaugaauaagcuauucgaaaagaccaagaagcagcugagagagaacgcugaagacaugggcaauggaugcuuuaaaauuuaccacaagugugauaacgccugcauaggcucaauccggaaugggacauaugaccaugacguguaccgagaugaggcucucaacaaucgcuuccaaauuaaaggagucgagcugaagagugguuacaaagacuggauccuuuggauuuccuuugccaucagcugcuuccuguuguguguggcacuccugggcuuuauaaugugggccugccagaaggggaacaucagauguaauauuugcaucuga

SEQ ID NO: 132119 - RNA, 1701 nt, Artificial Sequence
  derived and/or modified CDS sequence (opt3) from hemagglutinin__InfluenzaA__ADB90360
augaaggccauccuggugguccuccuuuacaccuucgcuacagcaaacgccgacacucugugcauuggcuaucacgcgaauaacagcacggauaccguugacacaguguuggagaagaauguaacugugacccauuccgucaacuuacuggaagauaagcacaaugggaaacuauguaagcucagaggaguggcuccccugcaucuugguaaaugcaacauagccggcuggauccuggggaauccugagugugaaucuuugucaacagcaaguagcugguccuacauuguugagaccucuucgucaaacaauggaacuugcuauccaggcgacuuuaucgauuacgaagaacucagggagcagcugagcaguguguccucuuucgaacgguuugagauuuucccgaagacaagcuccuggcccaaccacgacccuaauaagggugucaccgccgcuuguccacaugcaggggccaaaucauuuuauaagaaccugaucuggcucgugaaaaagggaaauaguuaccccaaauuaagcaagucuuauauaaacgauaagggcaaagaaguacugguucuuuggggcauccaccacccuuccacgucagcugaccaacagagcuuguaccagaaugccgaugcguacguguucgucgggaccagucgcuauucuaagaaauuuaagccagagauugcaauccgacccaaagugcguggacaggaggguagaaugaacuacuauuggacucugguggaaccuggcgacaagauuacauucgaggccacugggaaccuagucguuccaagguacgcuuuugccauggaacggaaugcaggauccggcaucauaauuagcgauaccccggugcaugacugcaacacaaccugucaaacgcccaaaggugcuaucaauacuucgcucccuuuccagaacauucacccaaucacaaucgggaagugccccaaguauguaaaaucuaccaagcugcgccuugccacuggacugagaaauauuccuuccauacagucaaggggcuuguuuggcgcgaucgccggguucauugagggagguuggacaggcaugguggaugggugguacggauaucaucaccagaacgaacaaggcagugguuacgcagcugaccucaaaagcacccagaaugccaucgacgagauaacgaacaaggucaauuccgugauugagaaaaugaacacccaguuuacagcuguugggaaggaguucaaucaccuggagaagcggaucgaaaacuuaaauaaaaagguggaugacggcuuccuggauaucuggacuuacaacgccgagcuccuuguccuguuggaaaaugagcgcacccuagacuaucaugauucuaacgugaaaaaccuguacgagaagguacgaagccagcucaaaaauaacgcaaaggaaauuggaaauggcuguuuugaguucuaucacaagugcgacaacacauguauggaaucaguuaaaaaugggacuuacgauuauccaaaguacagugaggaagccaaacugaacagagaggagaucgacggagugaaacuugaauccaccaggauuuaucaaauacuggcuaucuacagcacagucgcgucuucauuggugcucgucgugagucugggugcaauuagcuuuuggaugugcuccaauggcucuuuacagugccggaucuguaucuga

SEQ ID NO: 132120 - RNA, 1701 nt, Artificial Sequence
  derived and/or modified CDS sequence (opt3) from hemagglutinin__InfluenzaA__ADB90370
augaaggccauccuggugguccuccuuuacaccuucgcuacagcaaacgccgacacucugugcauuggcuaucacgcgaauaacagcacggauaccguugacacaguguuggagaaaaauguaacugugacccauuccgucaacuuacuggaagauaagcacaaugggaaacuauguaagcucagaggaguggcuccccugcaucuugguaaaugcaacauagccggcuggauccuggggaauccugagugugaaucuuugucaacagcaaguagcugguccuacauuguugagaccucuucgucagacaacggaacuugcuauccaggcgauuuuaucgacuacgaagaacucagggagcagcugagcaguguguccucuuucgaacgguuugagauuuucccgaagacaagcuccuggcccaaucacgauccuaacaagggugucaccgccgcuuguccacaugcaggggccaaaucauuuuauaagaaucugaucuggcucgugaaaaagggaaacaguuaccccaaauuaagcaagucuuauauaaaugacaagggcaaagaaguacugguucuuuggggcauccaccacccuuccacgucagcugaucaacagagcuuguaccagaacgccgacgcguacguguucgucgggaccagucgcuauucuaagaaauuuaagccagagauugcaauccgacccaaagugcguggacaggaggguagaaugaauuacuauuggacucugguggaaccuggcgauaagauuacauucgaggccacugggaaccuagucguuccaagguacgcuuuugccauggaacggaacgcaggauccggcaucauaauuagcgacaccccggugcaugauugcaauacaaccugucaaacgcccaaaggugcuaucaacacuucgcucccuuuccagaauauucacccaaucacaaucgggaagugccccaaguauguaaaaucuaccaagcugcgccuugccacuggacugagaaacgugccuuccauucagucaaggggcuuguuuggcgcgauagccggguucaucgagggagguuggacaggcauggucgacgggugguacggauaucaucaccagaaugaacaaggcagugguuacgcagcugaccucaaaagcacccagaacgccauugaugagaucacgaauaaggugaacuccguuauagagaaaaugaauacccaguuuacagcuguggggaaggaguucaaccaccuggagaagcggauugaaaauuuaaacaaaaaggucgacgauggcuuccuggacaucuggacuuacaaugccgagcuccuugugcuguuggaaaacgagcgcacccuagauuaucaugacucuaauguaaagaaccuguacgagaagguucgaagccagcucaaaaacaaugcaaaggaaaucggaaacggcuguuuugaguucuaucacaagugcgauaauacauguauggaaucagugaaaaacgggacuuacgacuauccaaaguacagugaggaagccaaacugaauagagaggagauugauggagucaaacuugaauccaccaggaucuaucaaauucuggcuauauacagcacaguggcgucuucauugguccucgugguuagucugggugcaaucagcuuuuggaugugcuccaacggcucuuuacagugccggauuuguaucuga

SEQ ID NO: 132121 - RNA, 1701 nt, Artificial Sequence; identical to SEQ ID NO: 131636
  derived and/or modified CDS sequence (opt3) from hemagglutinin__InfluenzaA__ADB90414

SEQ ID NO: 132122 - RNA, 1701 nt, Artificial Sequence; identical to SEQ ID NO: 131164
  derived and/or modified CDS sequence (opt3) from hemagglutinin__InfluenzaA__ADC32409

SEQ ID NO: 132123 - RNA, 1701 nt, Artificial Sequence
  derived and/or modified CDS sequence (opt3) from hemagglutinin__InfluenzaA__ADC32410
augaaggccauccuggugguccuccuuuacaccuucgcuacagcaaacgccgacacucugugcauuggcuaucacgcgaauaacagcacggauaccguugacacaguguuggagaaaaauguaacugugacccauuccgucaacuuacuggaagauaagcacaaugggaaacuauguaagcucagaggaguggcuccccugcaucuugguaaaugcaacauagccggcuggauccuggggaauccugagugugaaucuuugucaacagcaaguagcugguccuacauuguugagaccucuucgucagacaacggaacuugcuauccaggcgauuuuaucgacuacgaggagcucagggagcagcugagcaguguguccucuuucgaacgguuugagauuuucccgaagacaagcuccuggcccaaucacgauucaaacaagggugucaccgccgcuuguccucaugcaggggccaaaaguuuuuauaagaaucugaucuggcucgugaaaaagggaaacagcuacccaaaauuaucuaaguccuauauaaaugacaagggcaaagaaguacugguucuuuggggcauccaccaccccucaacgagcgcugaucaacagaguuuguaccagaacgccgacgcguacguguucgucgggacuucucgcuauuccaagaaauuuaagccugagauugcaauccgaccaaaagugcgugaucaggagggaagaaugaauuacuauuggacccugguggaacccggugacaagauuacauucgaggccacuggcaaccuagucguuccuagguacgcuuuugccauggaacggaacgcagggagcggaaucauaauuucggauaccccagugcaugacugcaauacaaccugucaaacgccgaaaggcgcuaucaacacuucucuccccuuccagaauauucacccuaucacaaucgguaagugcccaaaguauguaaaauccaccaagcugcgccuugccacugggcugagaaacgugcccucaauucagaguaggggauuguuuggcgcgauagccggcuucaucgaagggggauggacagguauggucgacggcugguacggguaucaucaccagaaugaacaaggaagcggcuacgcagcugaucucaaauccacccagaacgccauugacgagaucacgaauaaggugaacucuguuauagagaaaaugaauacccaguuuacagcuguggguaaggaguucaaccaccuggaaaagcggauugaaaauuuaaacaaaaaggucgaugacggguuccuggauaucuggacuuacaaugccgagcuccuugugcuguuggaaaacgagaaaacccuagacuaucaugauagcaauguaaagaaccuguacgagaaaguucgcucacagcucaagaacaaugcaaaggaaaucggcaacggauguuuugaguucuaucacaaaugcgacaauacauguauggaaagugugaagaacggcacuuacgauuauccuaaauacuccgaggaagccaagcugaaucgagaggagauugacggggucaaacuugaaagcaccagaaucuaucaaauucuggcuauauacucuacaguggcgucaaguuugguccucgugguuagccugggagcaaucuccuuuuggaugugcucuaacgguucguuacagugcaggauuuguaucuga

SEQ ID NO: 132124 - RNA, 1701 nt, Artificial Sequence
  derived and/or modified CDS sequence (opt3) from hemagglutinin__InfluenzaA__ADC32411
augaaggccauccuggugguccuccuuuacaccuucgcuacagcaaacgccgacacucugugcauuggcuaucacgcgaauaacagcacggauaccguugacacaguguuggagaaaaauguaacugugacccauuccgucaacuuacuggaagauaagcacaaugggaaacuauguaagcucagaggaguggcuccccugcaucuugguaaaugcaacauagccggcuggauccuggggaauccugagugugaaucuuugucaacagcaaguagcugguccuacauuguugagaccucuucgucagacaacggaacuugcuauccaggcgauuuuaucgacuacgaagaacucagggagcagcugagcaguguguccucuuucgaacgguuugagauuuucccgaagacaagcuccuggcccaaucacgauucaaacaagggugucaccgccgcuuguccucaugcaggggccaaaaguuuuuauaagaaucugaucuggcucgugaaaaagggaaacagcuacccaaaauuaucuaaguccuauauaaaugacaagggcaaagaaguacugguucuuuggggcauccaccaccccucaacgagcgcugaucaacagaguuuguaccagaacgccgacgcguacguguucgucgggacuucucgcuauuccaagaaauuuaagccugagauugcaauccgaccaaaagugcgugagcaggaaggaagaaugaauuacuauuggacccugguggagcccggugauaagauuacauucgaagccacuggcaaccuagucguuccuagguacgcuuuugccauggagcggaacgcagggagcggaaucauaauuucggacaccccagugcaugauugcaauacaaccugucaaacgccgaaaggcgcuaucaacacuucucuccccuuccagaauauucacuccaucacaaucgguaagugcccuaaguauguaaaaucaaccaagcugcgccuugccacugggcugagaaacgugccaaguauucagagcaggggauuguuuggcgcgauagccggcuucaucgaagggggauggacagguauggucgacggcugguacggguaucaucaccagaaugagcaaggauccggcuacgcagcugaccucaaaucuacccagaacgccauugaugagaucacgaauaaggugaacagcguuauagagaaaaugaauacccaguuuacagcuguggguaaggaguucaaccaccuggccaagcggauugaaaauuuaaacaaaaaggucgacgauggguuccuggacaucuggacuuacaaugcagagcuccuugugcuguuggaaaacgagcgcacccuagauuaucaugacucaaauguaaagaaccuguacgagaagguucgaagucagcucaaaaacaaugccaaggaaaucggcaacggauguuuugaguucuaucacaagugcgauaauacauguauggaauccgugaaaaacggcacuuacgacuaucccaaguacagcgaggaagcuaaacugaauagagaggagauugauggggucaaacuugaaucuaccaggaucuaucaaauucuggcgauauacucaacaguggcaaguagcuugguccucgugguuucccugggagccaucucuuuuuggaugugcucgaacgguagcuuacagugccggauuuguaucuga

SEQ ID NO: 132125 - RNA, 1701 nt, Artificial Sequence; identical to SEQ ID NO: 131070
  derived and/or modified CDS sequence (opt3) from hemagglutinin__InfluenzaA__ADC32412

SEQ ID NO: 132126 - RNA, 1701 nt, Artificial Sequence; identical to SEQ ID NO: 130717
  derived and/or modified CDS sequence (opt3) from hemagglutinin__InfluenzaA__ADC32413

SEQ ID NO: 132127 - RNA, 1701 nt, Artificial Sequence; identical to SEQ ID NO: 131164
  derived and/or modified CDS sequence (opt3) from hemagglutinin__InfluenzaA__ADC32414

SEQ ID NO: 132128 - RNA, 1701 nt, Artificial Sequence; identical to SEQ ID NO: 131164
  derived and/or modified CDS sequence (opt3) from hemagglutinin__InfluenzaA__ADC32415

SEQ ID NO: 132129 - RNA, 1701 nt, Artificial Sequence; identical to SEQ ID NO: 131164
  derived and/or modified CDS sequence (opt3) from hemagglutinin__InfluenzaA__ADC32416

SEQ ID NO: 132130 - RNA, 1701 nt, Artificial Sequence
  derived and/or modified CDS sequence (opt3) from hemagglutinin__InfluenzaA__ADC32417
augaaggccauccuggugguccuccuuuacaccuucgcuacagcaaacgccgacacucugugcauuggcuaucacgcgaauaacagcacggauaccguugacacaguguuggagaaaaauguaacugugacccauuccgucaacuuacuggaauacaagcacaaugggaaacuauguaagcucagaggaguggcuccccugcaucuugguaaaugcaacauagccggcuggauccuggggaauccugagugugaaucuuugucaacagcaaguagcugguccuauauuguugagaccucuucgucagauaacggaacuugcuacccaggcgacuuuaucgauuaugaagaacucagggagcagcugagcaguguguccucuuucgaacgguuugagauuuucccgaagacaagcuccuggcccaaucacgacucaaacaagggugucaccgccgcuuguccucaugcaggggccaaaaguuuuuacaagaaucugaucuggcucgugaaaaagggaaacagcuauccaaaauuaucuaaguccuacauaaaugauaagggcaaagaaguacugguucuuuggggcauccaccaccccucaacgagcgcugaccaacagaguuuguaccagaacgccgaugcguauguguucgucgggacuucucgcuacuccaagaaauuuaagccugagauugcaauccgaccaaaagugcgugagcaggaaggaagaaugaauuauuacuggacccugguggagcccggugacaagauuacauucgaagccacuggcaaccuagucguuccuagguaugcuuuugccauggagcggaacgcagggagcggaaucauaauuucggauaccccagugcaugacugcaauacaaccugucaaacgccgaaaggcgcuaucaacacuucucuccccuuccagaauauucacccuaucacaaucgguaagugcccaaaguacguaaaauccaccaagcugcgccuugccacugggcugagaaacgugcccucaauucagaguaggggauuguuuggcgcgauagccggcuucaucgaagggggauggacagguauggucgauggcugguauggguaccaucaccagaaugagcaaggaagcggcuacgcagcugaccucaaauccacccagaacgccauugacgagaucacgaauaaggugaacucuguuauagaaaagaugaauacccaguuuacagcuguggguaaggaguucaaccaccuggaaaagcggauugagaauuuaaacaaaaaggucgaugacggguuccuggauaucuggacuuauaaugccgaacuccuugugcuguuggagaacgagcgcacccuagacuaccaugauagcaauguuaaaaaccuguaugaaaagguacgaucacagcucaaaaacaaugcaaaggagaucggcaacggauguuuugaguucuaccacaagugcaauaacacauguauggagagugugaaaaauggcacuuaugacuacccuaaguauuccgaagaggccaaacugaacagagaggaaauugauggggucaaacuugagagcaccaggaucuaccaaauucuggcuauauacucuacaguggcgucaaguuugguccucgugguuagccugggagcaaucuccuuuuggaugugcucuaaugguucguuacagugccggauuuguaucuga

SEQ ID NO: 132131 - RNA, 1701 nt, Artificial Sequence; identical to SEQ ID NO: 131164
  derived and/or modified CDS sequence (opt3) from hemagglutinin__InfluenzaA__ADC32418

SEQ ID NO: 132132 - RNA, 1701 nt, Artificial Sequence
  derived and/or modified CDS sequence (opt3) from hemagglutinin__InfluenzaA__ADC32419
augaaggccauccuggugguccuccuuuacaccuucgcuacagcaaacgccgacacucugugcauuggauaucacgcgaauaacagcacggauaccguugacacaguguuggagaaaaauguaacugugacccauuccgucaacuuacuggaagauaagcacaaugggaaacuauguaagcucagaggaguggcuccccugcaucuugguaaaugcaacauagccggcuggauccuggggaauccugagugugaaucuuugucaacagcaaguagcugguccuacauuguugagaccucuucgucagacaacggaacuugcuauccaggcgauuuuaucgacuacgaagaacucagggagcagcugagcaguguguccucuuucgaacgguuugagauuuucccgaagacaagcuccuggcccaaucacgauucaaacaagggugucaccgccgcuuguccucaugcaggggccaaaaguuuuuauaagaaucugaucuggcucgugaaaaagggaaacagcuacccaaaauuaucuaaguccuauauaaaugacaagggcaaagaaguacugguucuuuggggcauccaccaccccucaacgagcgcugaucaacagaguuuguaccagaacgccgacgcguacguguucgucgggacuucucgcuauuccaagaaauuuaagccugagauugcaauccgaccaaaagugcgugagcaggaaggaagaaugaauuacuauuggacccugguggagcccggugauaagauuacauucgaagccacuggcaaccuagucguuccuagguacgcuuuugccauggagcggaacgcagggagcggaaucauaauuucggacaccccagugcaugauugcaauacaaccugucaaacgccgaaaggcgcuaucaacacuucucuccccuuccagaauauucacuccaucacaaucgguaagugcccuaaguauguaaaaucaaccaagcugcgccuugccacugggcugagaaacgugccaaguauucagagcaggggauuguuuggcgcgauagccggcuucaucgaagggggauggacagguauggucgacggcugguuuggguaccaucaccagaaugaccaaggauccgcauaugcugccgaucucaaaucuacccagaacgcuauugacgagaucacgaauaaggugaacagcguuauagagaaaaugaauacccaguucacagccgugggcaaggaguucaaccaccuggagaagcggauugaaaauuuaaacaaaaaggucgaugacgguuuucuggauaucuggacuuacaaugcagagcuccuugugcuguuggaaaacgagcgcacccuagacuaccaugauucaaauguaaagaaccuguaugagaagguucgaagucagcucaaaaacaaugccaaggaaaucgggaacggcuguuucgaguuuuaccacaagugcgacaauacauguauggaauccgugaaaaacggaacuuaugauuaccccaaguauagcgaggaagcuaaacugaauagagaggagauugacggcgucaaacuugaaucuaccaggaucuaccaaauucuggcgauauauucaacaguggcaaguagcuugguccucgugguuucccugggggccaucucuuucuggaugugcucgaacggcagcuuacagugccggauuuguaucuga

SEQ ID NO: 132133 - RNA, 1701 nt, Artificial Sequence; identical to SEQ ID NO: 131164
  derived and/or modified CDS sequence (opt3) from hemagglutinin__InfluenzaA__ADC32420

SEQ ID NO: 132134 - RNA, 1701 nt, Artificial Sequence; identical to SEQ ID NO: 131164
  derived and/or modified CDS sequence (opt3) from hemagglutinin__InfluenzaA__ADC32421

SEQ ID NO: 132135 - RNA, 1701 nt, Artificial Sequence
  derived and/or modified CDS sequence (opt3) from hemagglutinin__InfluenzaA__ADC32422
augaaggccauccuggugguccuccuuuacaccuucgcuacagcaaacgccgacacucugugcauuggcuaucacgcgaauaacagcacggauaccguugacacaguguuggagaaaaauguaacugugacccauuccgucaacuuacuggaagauaagcacaaugggaaacuauguaagcucagaggaguggcuccccugcaucuugguaaaugcaacauagccggcuggauccuggggaauccugagugugaaucuuugucaacagcaaguagcugguccuacauuguugagaccucuucgucagacaacggaacuugcuauccaggcgauuuuaucgacuacgaagaacucagggagcagcugagcaguguguccucuuucgaacgguuugagauuuucccgaagacaagcuccuggcccaaucacgauucaaacaagggugucaccgccgcuuguccucaugcaggggccaaaaguuuuuauaagaaucugaucuggcucgugaaaaagggaaacagcuacccaaaauuaucuaaguccuauauaaaugacaagggcaaagaaguacugguucuuuggggcauccaccaccccucaacgagcgcugaucaacagaguuuguaccagaacgccgacgcguacguguucgucgggacuucucgcuauuccaagaaauuuaagccugagauugcaauccgaccaaaagugcgugagcaggaaggaagaaugaauuacuauuggacccugguggagcccggugauaagauuacauucgaagccacuggcaaccuaauggucccuagguacgcuuuugccauggagcggaacgcagggagcggaaucauaauuucggacaccccaguucaugauugcaauacaaccugucaaacgccgaaaggcgcuaucaacacuucucuccccuuccagaauauucacuccaucacaaucgguaagugcccuaaguaugugaaaucaaccaagcugcgccuugccacugggcugagaaacguaccaaguauucagagcaggggauuguuuggcgcgauagccggcuucaucgaagggggauggacagguaugguggacggcugguacggguaucaucaccagaaugagcaaggauccggcuacgcagcugaccucaaaucuacccagaacgccauugaugagaucacgaauaaggucaacagcgugauagaaaagaugaauacccaguuuacagcuguugguaaggaguucaaccaccuggaaaagcggauugagaauuuaaacaaaaagguggacgauggguuccuggacaucuggacuuacaaugccgaacuccuuguccuguuggagaacgagcgcacccuagauuaucaugacucaaaugugaaaaaccuguacgaaaagguacgaagucagcucaaaaacaaugcaaaggagaucggcaacggauguuuugaguucuaucacaagugcgauaauacauguauggaguccguuaaaaacggcacuuacgacuaucccaaguacagcgaagaggccaaacugaauagagaggaaauugauggggugaaacuugagucuaccaggaucuaucaaauucuggcuauauacucaacagucgcgaguagcuuggugcucgucgugucccugggagcaaucucuuuuuggaugugcucgaacgguagcuuacagugccggauuuguaucuga

SEQ ID NO: 132136 - RNA, 1701 nt, Artificial Sequence
  derived and/or modified CDS sequence (opt3) from hemagglutinin__InfluenzaA__ADC32423
augaaggccauccuggugguccuccuuuacaccuucgcuacagcaaacgccgacacucugugcauuggcuaucacgcgaauaacagcacggauaccguugacacaguguuggagaaaaauguaacugugacccauuccgucaacuuacuggaagauaagcacaaugggaaacuauguaagcucagaggaguggcuccccugcaucuugguaaaugcaacauagccggcuggauccuggggaauccugagugugaaucuuugucaacagcaaguagcugguccuacauuguugagaccucuucgucagacaacggaacuugcuauccaggcgauuuuaucgacuacgaagaacucagggagcagcugagcaguguguccucuuucgaacgguuugagauuuucccgaagacaagcuccuggcccaaucacgauucaaacaagggugucaccgccgcuuguccucaugcaggggccaaaaguuuuuauaagaaucugaucuggcucgugaaaaagggaaacagcuacccaaaauuaucuaaguccuauauaaaugacaagggcaaagaaguacugguucuuuggggcauccaccaccccucaacgagcgcugaucaacagaguuuguaccagaacgccgacgcguacguguucgucgggacuucucgcuauuccaagaaauuuaagccugagauugcaauccgaccaaaagugcgugagcaggaaggaagaaugaauuacuauuggacccugguggagcccggugauaagauuacauucgaagccacuggcaaccuagucguuccuagguacgcuuuugccauggagcggaacgcagggagcggaaucauaauuucggacaccccagugcaugauugcaauacaaccugucaaacgccgaaaggcgcuaucaacacuucucuccccuuccagaauauucacuccaucacaaucgguaagugcccuaaguauguaaaaucaaccaagcugcgccuugccacugggcugagaaacgugccaaguauucagagcaggggauuguuuggcgcgauagccggcuucaucgaagggggauggacagguauggucgacggcugguacggguaucaucaccagaaugagcaaggauccggcuacgcagcugaccucaaaucuacccagaacgccauugaugagaucacgaauaaggugaacagcguuauagaaaagaugaauacccaguuuacagcuguggguaaggaguucaaccaccuggaaaagcggauugagaauuuaaacaaaaaggucaaugacggguuccuggauaucuggacuuacaacgccgaacuccuugugcuguuggagaaugagcgcacccuagacuaucaugauucaaacguuaaaaaccuguacgaaaagguacgaagucagcucaaaaauaacgcaaaggagaucggcaauggauguuuugaguucuaucacaagugcgacaacacauguauggaguccgugaaaaauggcacuuacgauuaucccaaguacagcgaagaggccaaacugaacagagaggaaauugacggggucaaacuugagucuaccaggaucuaucaaauucuggcuauauacucaacaguggcgaguagcuugguccucgugguuucccugggagcaaucucuuuuuggaugugcucgaaugguagcuuacagugccggauuuguaucuga

SEQ ID NO: 132137 - RNA, 1701 nt, Artificial Sequence
  derived and/or modified CDS sequence (opt3) from hemagglutinin__InfluenzaA__ADC32434
augaaggccauccuggugguccuccuuuacaccuucgcuacagcaaacgccgacacucugugcauuggcuaucacgcgaauaacagcacggauaccguugacacaguguuggagaagaauguaacugugacccauuccgucaacuuacuggaagauaagcacaaugggaaacuauguaagcucagaggaguggcuccccugcaucuugguaaaugcaacauagccggcuggauccuggggaauccugagugugaaucuuugucaacagcaaguagcugguccuacauuguugagaccucuucgucagacaacggaacuugcuauccaggcgauuuuaucgacuacgaggagcucagggagcagcugagcaguguguccucuuucgaacgguuugagauuuucccgaagacaagcuccuggcccaaucacgauucaaacaagggugucaccgccgcuuguccucaugcaggggccaaaaguuuuuauaagaaucugaucuggcucgugaaaaagggaaacagcuacccaaaauuaucuaaguccuauauaaaugacaagggcaaagaaguacugguucuuuggggcauccaccaccccucaacgagcgcugaucaacagaguuuguaccagaacgccgacgcguacguguucgucgggacuucucgcuauuccaagaaauuuaagccugagauugcaauccgaccaaaagugcgugaucaggagggaagaaugaauuacuauuggacccugguggaacccggugacaagauuacauucgaggccacuggcaaccuagucguuccuagguacgcuuuugccauggaacggaacgcagggagcggaaucauaauuucggauaccccagugcaugacugcaauacaaccugucaaacgccgaaaggcgcuaucaacacuucucuccccuuccagaauauucacccuaucacaaucgguaagugcccaaaguauguaaaauccaccaagcugcgccuugccacugggcugagaaacgugcccucaauucagaguaggggauuguuuggcgcgauagccggcuucaucgaagggggauggacagguauggucgacggcugguacggguaucaucaccagaaugaacaaggaagcggcuacgcagcugaucucaaauccacccagcacgccauugacgagaucacgaacaagguaaauucuguuauagagaaaaugaacacccaguuuacagcuguggguaaggaguucaaucaucuggaaaagcggauugaaaacuuaaauaaaaaggucgaugacggguuccuggauaucuggacuuacaacgccgagcuccuugugcuguuggaaaaugagcgcacccuagacuaucacgauagcaacgugaaaaaucuguacgagaagguucgaucacagcucaaaaacaacgcaaaggaaaucggcaauggauguuuugaguucuaucauaagugcgacaacacauguauggaaagugugaaaaauggcacuuacgauuauccuaaguacuccgaggaagccaaacugaacagagaggagauugacggggucaaacuugaaagcaccaggaucuaucaaauucuggcuauauacucuacaguggcgucaaguuugguccucgugguuagccugggagcaaucuccuuuuggaugugcucuaaugguucguuacagugccggauuuguaucuga

SEQ ID NO: 132138 - RNA, 1701 nt, Artificial Sequence; identical to SEQ ID NO: 132137
  derived and/or modified CDS sequence (opt3) from hemagglutinin__InfluenzaA__ADC32435

SEQ ID NO: 132139 - RNA, 1701 nt, Artificial Sequence
  derived and/or modified CDS sequence (opt3) from hemagglutinin__InfluenzaA__ADC34940
augaagaccaucauugcccugagcuacauacucugccuuguguucgcucagaaacugcccggcaacgacaauuccacagcaacuuuguguuuagggcaccaugccgucccuaacggaacgaucguuaagaccauuacaaaugaucaaaucgaggugacuaacgcgaccgaacugguacagucuucaaguacagguggcauuugcgacagcccacaccagauccuagauggggagaauuguacccucauagacgcucugcuuggagauccgcagugcgacggcuuucaaaacaaaaagugggaucuguucguggaaagauccaaagccuauucuaauuguuaccccuaugacgucccugauuacgcaucguugaggucacucguggccagcagugguacucuggaguuuaacaaugaacgguucaacuggacagggguuacccagaauggaacguccucugcuugcaagcgcggcagcgacaacuccuuuuucucacgacugaauuggcucacucauuuaaaguuuaaauauccagcacugaacgugaccaugcccaauaacgagaaguucgauaaacuuuacaucuggggcguccaccauccugggacagacaacgaucagaucuuuuugcacgcccaggcuaguggacguauuacugugagcaccaagagaucucaacagacaguaauuccaaauaucgguuccaggccccggguucgcaacauaccuucaagaauuagcaucuauuggaccauugugaaaccaggcgacauccugcuaaucaauaguacggggaaccucauugccccgaggggauacuucaagauacggucuggcaaguccagcaucaugaaaucggacgcgcccauugguaaguguaauucugagugcaucacuccuaacggguccauaccaaaugauaaacccuuucagaacgucaaucgcauuacauacggagcauguccucgauaugugaagcagaacacccugaaacuugccacuggcaugagaaaugugccagaaaagcaaacaaggggcaucuucggggcuaucgccggauuuauugagaacgguugggaaggcauggucgacgggugguacggauuccggcaccaaaauucagagggcaucggucaggcagcugaucugaaaaguacccaggccgcgauuaaccagauaaaugggaaguugaaccgucucaucggcaagacgaacgagaaauuccaucagauugaaaaggaguuuagcgaaguugagggacgcauccaggaccuggaaaaauauguggaggauaccaagaucgacuuaugguccuacaaugccgagcugcucguagcacuugaaaaccaacacacaauugaucugacugacucugagaugaauaaauuguucgaaagaaccaagaagcagcuaagggagaacgcugaagauaugggcaaugggugcuuuaaaauauaucauaagugugacaacgccugcaucggaagcauucggaaugguacauacgaucacgacguguaucgagacgaggcucugaacaaucgcuuccagaucaaaggcgucgagcucaagucaggguacaaagauuggauucuguggaucaguuuugccauauccugcuuccuucuguguguggcauugcucggauuuaucaugugggccugccagaagggcaacauuagauguaauaucugcauuuga

SEQ ID NO: 132140 - RNA, 1701 nt, Artificial Sequence; identical to SEQ ID NO: 132052
  derived and/or modified CDS sequence (opt3) from hemagglutinin__InfluenzaA__ADC38987

SEQ ID NO: 132141 - RNA, 1701 nt, Artificial Sequence
  derived and/or modified CDS sequence (opt3) from hemagglutinin__InfluenzaA__ADC38997
augaaggccauccuggugguccuccuuuacaccuucgcuacagcaaacgccgacacucugugcauuggcuaucacgcgaauaacagcacggauaccguugacacaguguuggagaaaaauguaacugugacccauuccgucaacuuacuggaagauaagcacaaugggaaacuauguaagcucagaggaguggcuccccugcaucuugguaaaugcaacauagccggcuggauccuggggaauccugagugugaaucuuugucaacagcaaguagcugguccuacauuguugagaccucuucgucagacaacggaacuugcuauccaggcgauuuuaucgacuacgaagaacucagggagcagcugagcaguguguccucuuucgaacgguuugagauuuucccgaagacaagcuccuggcccaaucacgauucaaacaagggugucaccgccgcuuguccucaugcaggggccaaaaguuuuuauaagaaucugaucuggcucgugaaaaagggaaacagcuacccaaaauuaucuaaguccuauauaaaugacaagggcaaagauguacugguucuuuggggcauccaccaccccucaacgagcgcugaccaacagaguuuguaccagaacgccgaugcguacguguucgucgggacuucucgcuauuccaagaaauuuaagccugaaauugcaauccgaccaaaagugcgugaccaggagggaagaaugaauuacuauuggacccugguggagcccggugauaagauuacauucgaagccacuggcaaccuagucguuccuagguacgcuuuugccauggagcggaacgcagggagcggaaucauaauuucggacaccccagugcaugacugcaauacaaccugucaaacgccgaaaggcgcuaucaacacuucucuccccuuccagaauauucacccuaucacaaucgguaagugcccaaaguauguaaaauccaccaagcugcgccuugccacugggcugagaaacgugcccucaauucagaguaggggauuguuuggcgcgauagccggcuucaucgaagggggauggacagguauggucgauggcugguacggguaucaucaccagaaugagcaaggaagcggcuacgcagcugaccucaaauccacccagaacgccauugaugaaaucacgaauaaggugaacucuguuauagagaaaaugaauacccaguuuacagcuguggguaaggaguucaaccaccuggaaaagcggauugagaauuuaaacaaaaaggucgacgauggguuccuggacaucuggacuuacaaugccgaacuccuugugcuguuggagaacgaacgcacccuagauuaucaugacagcaauguaaagaaccuguacgagaagguucgaucacagcucaaaaacaaugcaaaggagaucggcaacggauguuuugaguucuaucacaagugcgauaauacauguauggagagugugaaaaacggcacuuacgacuauccuaaguacuccgaagaggccaaacugaauagagaagagauugauggggucaaacuugagagcaccaggaucuaucaaauucuggcuauauacucuacaguggcgucaaguuugguccucgugguuagccugggagcaaucuccuuuuggaugugcucuaacgguucguuacagugccggauuuguaucuga

SEQ ID NO: 132142 - RNA, 1701 nt, Artificial Sequence; identical to SEQ ID NO: 131818
  derived and/or modified CDS sequence (opt3) from hemagglutinin__InfluenzaA__ADC39007

SEQ ID NO: 132143 - RNA, 1698 nt, Artificial Sequence
  derived and/or modified CDS sequence (opt3) from hemagglutinin__InfluenzaA__ADC45604
augaaggccaaacugcucgugcuucugugcaccuucacagcuacuuacgcagacacgaucuguauuggcuaucacgccaacaauagcaccgauacagucgacacuguuuuggagaagaacgugaccguaacacauuccgugaauuuacuggaaaacucucacaaugggaaacuaugccuccugaagggaauagcgccccuucagcuggguaacuguucagucgcuggcuggaucuuggggaauccugagugcgaacuccugauuaguaaagagagcugguccuacaucguggaaaagccaaacccggagaauggaaccuguuaucccggccauuuugccgauuacgaggaacugagagagcaacucucuucgguuagcucauucgaaagguuugagauuuucccuaaggagaguuccuggccaaaccacacugugacaggugucucugcaagcugcucccauaauggggaaucaaguuuuuaucggaacuuacuguggcuuaccggcaaaaauggauuguaccccaaccugagcaagucuuaugccaauaacaaagagaaggaagugcuaguacucuggggcguucaccacccuccaaacaucggggaccagaaagcucuguaccauacggagaaugcauacguguccgucgugucaagccacuauagucgcaaguucacucccgaaauagccaagcgaccuaaagugcgugaucaggagggaagaaucaacuacuauuggacccuucuggagccaggugacacaauuaucuuugaagcuaauggcaacuugauugccccgagguacgcguucgcacucucucgggggcugggauccggcaucauaaauagcaacgcccccauggauaagugugacgcuaaaugccagacuccucaaggugccauuaauucgucuuuaccauuucagaacguccaucccguuaccaucggggaguguccuaaguaugugcgcuccgcaaaacugagaaugguaacaggacucaggaauauuccaucaauccagagucggggccuuuucggcgcuaucgccggguuuauugaaggagguuggaccggcaugguggaugggugguacggauaucaccaccagaacgagcaaggcagcgguuacgcggccgaccagaaguccacgcagaaugcaauaaacgggaucacuaauaaagucaacucugugauugaaaagaugaauacacaguucaccgcuguuggcaaggaguuuaacaaacuggagcgccgaauggaaaacuugaauaagaaaguggaugacggauucaucgauauauggacuuacaacgccgagcuacugguccuccuggaaaaugagagaacacuugacuuccaugacagcaacgugaagaaucuguaugaaaaaguaaagucacaauugaagaacaaugcuaaagagauuggcaacgggugcuuugaguucuaccacaaguguaaugaugaaugcauggagaguguuaaaaacggaaccuaugacuaccccaaguauuccgaagagagcaaacucaauagggagaagaucgauggugugaagcuggaaucuaugggcgucuaccagaucuuagccauuuauucaacgguggcaaguagccugguccuacucgugucccugggggccaucucuuuuuggaugugcucgaacggaagccuucagugucggauuugcauauga

SEQ ID NO: 132144 - RNA, 1698 nt, Artificial Sequence
  derived and/or modified CDS sequence (opt3) from hemagglutinin__InfluenzaA__ADC45626
augaaggugaaacugcucguccuucugugcaccuucacagccacuuacgcugacacgaucuguauuggcuaucacgcaaacaauagcaccgauacaguugacacuguguuggagaagaacguaaccgugacacauuccgucaauuuacuggaagauaaccacaaugggaaacuaugccuccugaagggaauagcgccccuucagcuggguaacuguucuguggccggcuggaucuuggggaauccugagugcgaacuccugauuucaaaagagaguuggagcuacaucguugaaaagccaaacccggagaauggaaccuguuaucccggccauuuugcugacuacgaggaacugagagagcaacucuccucugugucgucauucgaaagguuugagauuuucccuaaggagagcaguuggccaaaccacacugucacagguguguccgccucuugcagccauaauggggaauccucauuuuauaaaaacuuacuguggcuuaccggaaagaauggcuuguaccccaaccugaguaaaagcuaugcaaauaacaaggagaaagaaguucuaguacucuggggcgugcaccacccuccaaacaucgggaaucagaugacgcuguaccauaaggagaacgccuacgucucugugguguccucacacuauagccggaaguucacucccgaaauagcuaaacgcccuaagguccgagaucaggagggacguaucaauuacuauuggacccuucuggagccaggugacacaauuaucuuugaagcaaguggcaacuugauugccccgagauacgcuuucgcccucucuaggggguuuggauccggcaucauaaauagcaacgcgcccauggaugagugugacgcaaaaugccagacuccucaaggugccauuaauucgucucugccauuccagaacguucaucccgugaccaucggggaauguccuaaguauguacgguccgcuaaauuacgcauggugacaggacugagaaauauuccaucaauccagaguaggggccucuuuggcgccaucgcaggguucauugagggagguuggaccggcauggucgaugggugguacggauaucaccaccagaacgaacaaggcagcgguuacgcugccgaccagaaguccacgcagaaugcgauaaacgggaucacuaauaaagugaacucuguuauugagaagaugaauacacaguuuaccgccgugggcaaggaguucaacaaacuugaacggcgcauggagaaccugaauaagaaagucgaugacggauucaucgauguguggacuuacaacgcagaauugcuaguacugcucgagaaugaacgaacacuggacuuucaugacagcaacguuaagaaucuuuaugagaaagugaagaaccaacugaagaauaacgcuaaagagauaggcaaugggugcuucgaauuuuaccacaaguguaacgaugagugcauggaaucagucaaaaauggaaccuaugacuaccccaaguauagugaggaguccaaauugagcagagaaaagauugauggugugaagcucgagucuaugggcgucuaccagauccuggccaucuauucaacgguggcuaguagcuuaguucugcuagugucccucggggccauuucuuucuggaugugcucgaacggaagccugcaguguaggaucugcauuuga

SEQ ID NO: 132145 - RNA, 1698 nt, Artificial Sequence
  derived and/or modified CDS sequence (opt3) from hemagglutinin__InfluenzaA__ADC45637
augaaggugaaacugcucguccuucugugcaccuucacagccacuuacgcugacacgaucuguauuggcuaucacgcaaacaauagcaccgauacaguugacacuguguuggagaagaacguaaccgugacacauuccgucaauuuacuggaagauaaccacaaugggaaacuaugccuccugaagggaauagcgccccuucagcuggguaacuguucuguggccggcuggaucuuggggaauccugagugcgaacuccugauuucaaaagagaguuggagcuacaucguugaaaagccaaacccggagaauggaaccuguuaucccggccauuuugcugacuacgaggaacugagagagcaacucuccucugugucgucauucgaaagguuugagauuuucccuaaggagagcaguuggccaaaccacacugucacagguguguccgccucuugcagccauaauggggaauccucauuuuauaaaaacuuacuguggcuuaccggaaagaauggcuuguaccccaaccugaguaaaagcuaugcaaauaacaaggagaaagaagugcuaguucucuggggcgugcaccacccuccaaacaucggggaucagaugacgcuguaccauaaggagaaugccuacgucucugugguguccucacacuauagccggaaguucacucccgaaauagcuaaacgcccuaagguccgagaccaggagggacguaucaacuacuauuggacccuucuggagccaggugauacaauuaucuuugaagcaaguggcaauuugauugccccgagauacgcuuucgcccucucuaggggguuuggauccggcaucauaaacagcaaugcgcccauggacgagugugaugcaaaaugccagacuccucaaggugccauuaacucgucucugccauuccagaauguucaucccgugaccaucggggaauguccuaaguauguacgguccgcuaaauuacgcauggugacaggacugagaaacauuccaucaauccagaguaggggccucuuuggcgccaucgcaggguucauugagggagguuggaccggcauggucgacgggugguacggauaucaccaccagaaugaacaaggcagcgguuacgcugccgaucagaaguccacgcagaacgcgauaaaugggaucacuaacaaaguaaauucuguuauugagaagaugaacacacaguuuaccgccgugggcaaggaguucaauaaacuugaacggcgcauggagaaccugaacaagaaagucgacgauggauucaucgacguguggacuuacaaugcagaauugcuaguacugcucgagaacgaacgaacacuggacuuucaugauagcaauguuaagaaccuuuaugagaaagugaagaaucaacugaagaacaaugcuaaagagauaggcaacgggugcuucgaauuuuaccacaaguguaaugacgagugcauggaaucagucaaaaacggaaccuaugauuaccccaaguauagugaggaguccaaauugagcagagaaaagauugacggugugaagcucgagucuaugggcgucuaccagauccuggccaucuauucaacgguggcuaguagcuuaguucugcuagugucccucggggccauuucuuucuggaugugcucgaauggaagccugcaguguaggaucugcauuuga

SEQ ID NO: 132146 - RNA, 1698 nt, Artificial Sequence
  derived and/or modified CDS sequence (opt3) from hemagglutinin__InfluenzaA__ADC45648
augaaggugaaacugcucguccuucugugcaccuucgccgcuacauacgcagacacuaucuguauuggcuaucacgccaacaauagcacggauaccguugacacaguguuggagaagaacguaacugugacccauuccgucaauuuacuggaaaacucucacaaugggaaacuaugccuccugaagggaauagcgccccuucagcuggguaacuguucaaucgcuggcuggguguuggggaauccugagugcgaacuccugauuaguaaagagagcugguccuacaucguugaaaagccaaacccggagaauggaacauguuaucccggccauuuugccgauuacgaggaacugagagagcaacucucuucggugagcucauucgaaagguuugagauuuucccuaaggagaguuccuggccaaaccacaccgucacuggugugucugcaagcugcucccauaauggggaaucaaguuuuuaucggaacuuacuguggcuuacaggcaaaaauggauuguaccccaaccugagcaagucuuaugccaauaacaaagagaaggaaguucuaguacucuggggcgugcaccacccuccaaacaucggggaccagaaagcucuguaccauaccgagaaugcauacgucuccguggugucaagccacuauagucgcaaguucacgcccgaaauagccaagcgaccuaaaguccgugaucaggagggaagaaucaacuacuauuggacucuucuggagccaggugacaccauuaucuuugaagcuaauggcaacuugauugccccgagguacgcguucgcacucucucggggguuuggauccggcaucauaaauagcaacgcccccauggauaagugugacgcuaaaugccagacaccucaaggugccauuaauucgucucugccauuccagaacguucaucccgugacuaucggggaguguccuaaguauguacgcuccgcaaaauuaagaauggugaccggacugaggaauauuccaucaauccagagucggggccucuuuggcgcuaucgccggguucauugaaggagguuggacaggcauggucgaugggugguacggauaucaccaccagaacgagcaaggcagcgguuacgcggccgaccagaaguccacccagaaugcaauaaacgggaucacgaauaaagugaacucuguuauugaaaagaugaauacucaguuuacagcugugggcaaggaguucaacaaacuugagcgccgaauggaaaaccugaauaagaaagucgaugacggauucaucgauauauggaccuacaacgccgaguugcuagugcugcucgaaaaugagagaacucuggacuuucaugacagcaacguaaagaaucuuuaugaaaaaguuaagucacaacugaagaacaaugcuaaagagauuggcaacgggugcuucgaguuuuaccacaaguguaaugaugaaugcauggagagugugaaaaacggaacauaugacuaccccaaguauuccgaagagagcaaauugaauagggagaagaucgauggugucaagcucgaaucuaugggcguguaccagauccuggccauuuauucaaccgucgcaaguagcuuagugcugcuaguuucccucggggccaucucuuucuggaugugcucgaacggaagccugcagugucggauuugcauauga

SEQ ID NO: 132147 - RNA, 1698 nt, Artificial Sequence
  derived and/or modified CDS sequence (opt3) from hemagglutinin__InfluenzaA__ADC45659
augaaggugaaacugcucguccuucugugcaccuucacagccacuuacgcugacacgaucuguauuggcuaucacgcaaacaauagcaccgauacaguugacacuguguuggagaagaacguaaccgugacacauuccgucaauuuacuggaaaacucucacaaugggaaacuaugccuccugaagggaauagcgccccuucagcuggguaacuguucaguggccggcuggaucuuggggaauccugagugcgaacuccugauuaguaaagagagcugguccuacaucguugaaaagccaaacccggagaauggaaccuguuaucccggccauuuugcugauuacgaggaacugagagagcaacucucuucggugagcucauucgaaagguuugagauuuucccuaagaaaaguuccuggccaaaccacacugucacaggugugucugccagcugcucccauaauggggagucaaguuuuuaucggaacuuacuguggcuuaccgaaaagaauggauuguaccccaaccugagcaaaucuuaugcaaauaacaaggagaaagaaguucuaguacucuggggcgugcaccacccuccaaacaucggcgaccagaaggcccuguaccauacggagaaugcuuacgucuccguggugucaagccacuauagucgcaaguucacucccgaaauagcaaaacgaccuaagguccgugaucaggaggggagaaucaacuacuauuggacccuucuggagccaggagacacaauuaucuuugaagccaaugguaacuugauugcuccgagguacgccuucgcgcucucucggggcuuuggguccggaaucauaaauagcaacgcacccauggauaaaugugacgccaagugccagacuccucaaggcgcuauuaauucgucucugccauuccagaacguucaucccgugaccaucggugaguguccuaaauauguacgcuccgccaaguuaagaauggugacagggcugaggaauauuccaucaauccagagucggggacucuuuggcgcaaucgcuggcuucauugaagggggauggaccgguauggucgauggcugguacggguaucaccaccagaacgagcaaggaagcggcuacgccgcggaccagaaauccacgcagaaugccauaaacgguaucacuaauaaggugaacucuguuauugaaaagaugaauacacaguuuaccgcaguggggaaagaguucaacaaacuugagcgccgaauggaaaaccugaauaaaaaggucgaugacggcuucaucgauauauggacuuacaacgcugaguugcuagugcugcucgaaaaugagagaacacuggacuuucaugacagcaacguaaagaaucuuuaugaaaagguuaagucacaacugaaaaacaaugccaaggagauuggaaacggcugcuucgaguuuuaccacaaauguaaugaugaaugcauggagagugugaagaacgggaccuaugacuaccccaaauauuccgaagagagcaaguugaauagggagaagaucgauggagucaaacucgaaucuauggguguguaccagauccuggcuauuuauucaacggucgccaguagcuuagugcugcuaguuucccucggcgcaaucucuuucuggaugugcucgaacgggagccugcagugucggauuugcauauga

SEQ ID NO: 132148 - RNA, 1698 nt, Artificial Sequence
  derived and/or modified CDS sequence (opt3) from hemagglutinin__InfluenzaA__ADC45670
augaaggugaaacugcucguccuucugugcaccuucacagccacuuacgcugacacgaucuguauuggcuaucacgcaaacaauagcaccgauacaguugacacuguguuggagaagaacguaaccgugacacauuccgucaauuuacuggaaaacucucacaaugggaaacuaugccuccugaagggaauagcgccccuucagcuggguaacuguucaguggccggcuggaucuuggggaauccugagugcgaacuccugauuaguaaagagagcugguccuacaucguugaaaagccaaacccggagaauggaaccuguuaucccggccauuuugcugauuacgaggaacugagagagcaacucucuucggugagcucauucgaaagguuugagauuuucccuaaggagaguuccuggccaaaccacacugucacaggugggucugccagcugcucccauaauggagaaucaaguuuuuaucggaacuuacuguggcuuaccggcaaaaauggcuuguaccccaaccugagcaagucuuaugcaaauaacaaagagaaggaagugcuaguacucuggggaguucaccacccuccaaacaucggggaccagaaagcccuguaccauacggagaaugcuuacguguccgucgugucaagccacuauagucgcaaguucacucccgaaauagcaaagcgaccuaaagugcgugaucaggaggguagaaucaacuacuauuggacccuucuggagccaggcgacacaauuaucuuugaagccaaugggaacuugauugcuccgagguacgccuucgcgcucucucggggauuuggcuccgguaucauaaauagcaacgcacccauggauaagugugacgccaaaugccagacuccucaaggggcuauuaauucgucucugccauuccagaacguccaucccguuaccaucggagaguguccuaaguaugugcgcuccgccaaauuaagaaugguaacaggccugaggaauauuccaucaauccagagucggggccucuuuggggcaaucgcuggauucauugaagguggcuggaccgggaugguggauggaugguacggcuaucaccaccagaacgagcaagguagcggguacgccgcggaccagaaguccacgcagaaugccauaaacggcaucacuaauaaagucaacucugugauugaaaagaugaauacacaguuuaccgcaguuggaaaggaguucaacaaacuugagcgccgaauggaaaaccugaauaagaaaguggaugacggcuucaucgauauauggacuuacaacgcugaguugcuaguccugcucgaaaaugagagaacacuggacuuucaugacagcaacgugaagaaucuuuaugaaaaaguaaagucacaacugaagaacaaugccaaagagauugggaacggaugcuucgaguuuuaccacaaguguaaugaugaaugcauggagaguguuaaaaacgguaccuaugacuaccccaaguauuccgaagagagcaaauugaauagggagaagaucgauggcgugaagcucgaaucuaugggggucuaccagauccuggcuauuuauucaacgguggccaguagcuuaguccugcuagugucccucggagcaaucucuuucuggaugugcucgaacggcagccugcagugucggauuugcauauga

SEQ ID NO: 132149 - RNA, 1698 nt, Artificial Sequence
  derived and/or modified CDS sequence (opt3) from hemagglutinin__InfluenzaA__ADC45681
augaaggugaaacugcucguccuucugugcaccuucacagccacuuacgcugacacgaucuguauuggcuaucacgcaaacaauagcaccgauacaguugacacuguguuggagaagaacguaaccgugacacauuccgucaauuuacuggaagauaaccacaaugggaaacuaugccuccugaagggaauagcgccccuucagcuggguaacuguucuguggccggcuggaucuuggggaauccugagugcgaacuccugauuucaaaagagaguuggagcuacaucguugaaaagccaaacccggagaauggaaccuguuaucccggccauuuugcugacuacgaggaacugagagagcaacucuccucugccucgucauucgaaagguuugagauuuucccuaaggagagcaguuggccaaaccacacugugacaggugucuccgcaucuugcagccauaauggggaauccucauuuuauaaaaacuuacuguggcuuaccggaaagaauggcuuguaccccaaccugcggaaaaguuaugccaauaacaaggagaaagaagugcuaguacucuggggcguucaccacccuccaaacaucggggaucagaugacgcuguaccauaaggagaaugcuuacgugagcgucgugucuucccacuauucacgcaaguucacucccgaaauagcaaaacgaccuaaggugcgugaccaggagggaagaaucaacuacuauuggacccuucuggagccaggugauacaauuaucuuugaagccagcggcaauuugauugcuccgagguacgccuucgcgcucagucggggguuuggaucuggcaucauaaacuccaaugcacccauggacgagugugaugccaaaugccagacuccucaaggugcuauuaacagcucgcugccauuccagaauguccaucccguuaccaucggggaauguccuaaguaugugcgcucugccaaauuaagaaugguaacaggacugaggaacauuccauccauccagucacggggccucuuuggcgcaaucgcuggguucauugagggagguuggaccggcaugguggacgggugguacggauaucaccaccagaaugaacaaggcagugguuacgccgcggaucaaaagagcacgcagaacgccauaaaugggaucacuaacaaagucaauuccgugauugagaagaugaacacacaguuuaccgcaguuggcaaggaguucaauaaacuugaacgccgaauggagaaccugaacaagaaaguggacgauggauucaucgacgucuggacuuacaaugcugaauugcuagugcugcucgagaacgaaagaacacuggacuuucaugauucuaauguaaagaaccuuuaugagaaaguuaagaaucagcugaagaacaaugccaaagagauaggcaacgggugcuucgaauuuuaccacaaguguaaugacgagugcauggaaagcgugaaaaacggaaccuaugauuaccccaaguauucagaggagaguaaauuguccagggaaaagauugacggugucaagcucgagagcaugggcguguaccagauccuggcuaucuauucuacggucgccucaaguuuagugcugcuaguuagccucggggcaauuuccuucuggaugugcucuaauggaucgcugcagugucggaucugcauuuga

SEQ ID NO: 132150 - RNA, 1698 nt, Artificial Sequence
  derived and/or modified CDS sequence (opt3) from hemagglutinin__InfluenzaA__ADC45692
augaaggugaaacugcucguccuucugugcaccuucacagccacuuacgcugacacgaucuguauuggcuaucacgcaaacaauagcaccgauacaguugacacuguguuggagaagaacguaaccgugacacauuccgucaauuuacuggaaaacucucacaaugggaaacuaugccuccugaagggaauagcgccccuucagcuggguaacuguucaguggccggcuggaucuuggggaauccugagugcgaacuccugauuaguaaaaagagcugguccuacaucguugagaagccaaacccggaaaauggaaccuguuaucccggccauuuugcugauuacgaggagcugagagaacaacucucuucggugagcucauucgagagguuugaaauuuucccuaaagagaguuccuggccaaaccacacugucacaggugugucugccagcugcucccauaauggggagucaaguuuuuaucggaacuuacuguggcuuaccggaaagaauggcuuguaccccaaccugagcaaaucuuaugcaaauaacaaggaaaaagagguucuaguacucuggggcgugcaccacccuccaaacaucggggaccagaaggcccuguaccauacggaaaaugcuuacgucuccguggugucaagccacuauagucgcaaguucacucccgagauagcaaaacgaccuaagguccgugaucaggaaggaagaaucaacuacuauuggacccuucuggagccaggugacacaauuaucuuugaggccaauggcaacuugauugcuccgagguacgccuucgcgcucucucggggguuuggauccggcaucauaaauagcaacgcacccauggauaaaugugacgccaagugccagacuccucaaggugcuauuaauucgucucugccauuccagaacguucaucccgugaccaucggggaauguccuaaauauguacgcuccgccaaguuaagaauggugacaggacugaggaauauuccaucaauccagagucggggccucuuuggcgcaaucgcuggguucauugagggagguuggaccggcauggucgaugggugguacggauaucaccaccagaacgaacaaggcagcgguuacgccgcggaccagaaauccacgcagaaugccauaaacgggaucacuaauaaggugaacucuguuauugagaagaugaauacacaguuuaccgcagugggcaaagaguucaacaaacuugaacgccgaauggagaaccugaauaaaaaggucgaugacggauucaucgauauauggacuuacaacgcugaauugcuagugcugcucgagaaugaaagaacacuggacuuucaugacagcaacguaaagaaucuuuaugagaagguuaagucacaacugaaaaacaaugccaaggaaauuggcaacgggugcuucgaguuuuaccacaaauguaaugaugagugcauggaaagugugaagaacggaaccuaugacuaccccaaauauuccgaggaaagcaaguugaauagggagaagaucgauggugucaaacucgagucuaugggcguguaccagauccuggcuauuuauucaacggucgccaguagcuuagugcugcuaguuucccucggggcaaucucuuucuggaugugcucgaacggaagccugcagugucggauuugcauauga

SEQ ID NO: 132151 - RNA, 1698 nt, Artificial Sequence; identical to SEQ ID NO: 131218
  derived and/or modified CDS sequence (opt3) from hemagglutinin__InfluenzaA__ADC45703

SEQ ID NO: 132152 - RNA, 1698 nt, Artificial Sequence
  derived and/or modified CDS sequence (opt3) from hemagglutinin__InfluenzaA__ADC45714
augaaggugaaacugcucguccuucugugcaccuucacagccacuuacgcugacacgaucuguauuggcuaucacgcaaacaauagcaccgauacaguugacacuguguuggagaagaacguaaccgugacacauuccgucaauuuacuggaagauaaccacaaugggaaacuaugccuccugaagggaauagcgccccuucagcuggguaacuguucuguggccggcuggaucuuggggaauccugagugcgaacuccugauuucaaaagagaguuggagcuacaucguugaaaagccaaacccggagaauggaaccuguuaucccggccauuuugcugacuacgaggaacugagagagcaacucuccucugugucgucauucgaaagguuugagauuuucccuaaggagagcaguuggccaaaccacacugucacagguguguccgccucuugcagccauaauggggaauccucauuuuauaaaaacuuacuguggcuuaccggaaagaauggcuuguaccccaaccugaguaaaagcuaugcaaauaacaaggagaaagaagugcuaguucucuggggcgugcaccacccuccaaacaucggggaucagacgacucuguaccauaaggagaaugccuacgucucugugguguccucacacuauagccggaaguucacccccgaaauagcuaaacgcccuaagguccgagaccaggagggacguaucaacuacuauuggacacuucuggagccaggugauacuauuaucuuugaagcaaguggcaauuugauugccccgagauacgcuuucgcccucucuaggggguuuggauccggcaucauaaacagcaaugcgcccauggacgagugugaugcaaaaugccagaccccucaaggugccauuaacucgucucugccauuccagaauguucaucccgugacaaucggggaauguccuaaguauguacgguccgcuaaauuacgcauggugaccggacugagaaacauuccaucaauccagaguaggggccucuuuggcgccaucgcaggguucauugagggagguuggacgggcauggucgacgggugguacggauaucaccaccagaaugaacaaggcagcgguuacgcugccgaucagaaguccacucagaacgcgauaaaugggaucacaaacaaaguaaauucuguuauugagaagaugaacacccaguuuacugccgugggcaaggaguucaauaaacuugaacggcgcauggagaaccugaacaagaaagucgacgauggauucaucgacguguggacauacaaugcagaauugcuaguacugcucgagaacgaacgaacccuggacuuucaugauagcaauguuaagaaccuuuaugagaaagugaagaaucaacugaagaacaaugcuaaagagauaggcaacgggugcuucgaauuuuaccacaaguguaaugacgagugcauggaaucagucaaaaacggaacguaugauuaccccaaguauagugaggaguccaaauugagcagagaaaagauugacggugugaagcucgagucuaugggcgucuaccagauccuggccaucuauucaaccguggcuaguagcuuaguucugcuagugucccucggggccauuucuuucuggaugugcucgaauggaagccugcaguguaggaucugcauuuga

SEQ ID NO: 132153 - RNA, 1698 nt, Artificial Sequence; identical to SEQ ID NO: 131218
  derived and/or modified CDS sequence (opt3) from hemagglutinin__InfluenzaA__ADC45725

SEQ ID NO: 132154 - RNA, 1698 nt, Artificial Sequence
  derived and/or modified CDS sequence (opt3) from hemagglutinin__InfluenzaA__ADC45736
augaaggugaaacugcucguccuucugugcaccuucacagccacuuacgcugacacgaucuguauuggcuaucacgcaaacaauagcaccgauacaguugacacuguguuggagaagaacguaaccgugacacauuccgucaauuuacuggaaaacucucacaaugggaaacuaugccuccugaagggaauagcgccccuucagcuggguaacuguucaguggccggcuggaucuuggggaauccugagugcgaacuccugauuaguaaagagagcugguccuacaucguugaaaagccaaacccggagaauggaaccuguuaucccggccauuuugcugauuacgaggaacugagagagcaacucucuucggugagcucauucgaaagguuugagauuuucccuaaggagaguuccuggccaaaccacacugucacaggugugucugccagcugcucccauaauggggaaucaaguuuuuaucggaacuuacuguggcuuaccggcaaaaauggauuguaccccaaccugagcaagucuuaugcaaauaacaaagagaaggaaguucuaguacucuggggcgugcaccacccuccaaacaucggggaccagaaagcccuguaccauacggagaauacuuacgucuccguggugucaagccacuauagucgcaaguucacccccgaaauagcuaagcgaccuaaaguccgugaucaggagggaagaaucaacuacuauuggacacuucuggagccaggugacacuauuaucuuugaagcaaauggcaacuugauugccccgagguacgcuuucgcccucucucggggguuuggauccggcaucauaaauagcaacgcgcccauggauaagugugacgcaaaaugccagaccccucaaggugccauuaauucgucucugccauuccagaacguucaucccgugacaaucggggaguguccuaaguauguacgcuccgcuaaauuaagaauggugaccggacugaggaauauuccaucaauccagagucggggccucuuuggcgccaucgcaggguucauugaaggagguuggacgggcauggucgaugggugguacggauaucaccaccagaacgagcaaggcagcgguuacgcugccgaccagaaguccacucagaaugcgauaaacgggaucacaaauaaagugaacucuguuauugaaaagaugaauacccaguuuacugccgugggcaaggaguucaacaaacuugagcgccgaauggaaaaccugaauaagaaagucgaugacggauucaucgauauauggacauacaacgcagaguugcuagugcugcucgaaaaugagagaacccuggacuuucaugacagcaacguaaagaaucuuuaugaaaaaguuaagucacaacugaagaacaaugcuaaagagauuggcaacgggugcuucgaguuuuaccacaaguguaaugaugaaugcauggagagugugaaaaacggaacguaugacuaccccaaguauuccgaagagagcaaauugaauagggagaagaucgauggugucaagcucgaaucuaugggcguguaccagauccuggccauuuauucaaccgucgcuaguagcuuagugcugcuaguuucccucggggccaucucuuucuggaugugcucgaacggaagccugcagugucggauuugcauauga

SEQ ID NO: 132155 - RNA, 1698 nt, Artificial Sequence; identical to SEQ ID NO: 130536
  derived and/or modified CDS sequence (opt3) from hemagglutinin__InfluenzaA__ADC45747

SEQ ID NO: 132156 - RNA, 1698 nt, Artificial Sequence
  derived and/or modified CDS sequence (opt3) from hemagglutinin__InfluenzaA__ADC45758
augaaggugaaacugcucguccuucugugcaccuucacagccacuuacgcugacacgaucuguauuggcuaucacgcaaacaauagcaccgauacaguugacacuguguuggagaagaacguaaccgugacacauuccgucaauuuacuggaaaacucucacaaugggaaacuaugccuccugaagggaauagcgccccuucagcuggguaacuguucaguggccggcuggaucuuggggaauccugagugcgaacuccugauuaguaaagagagcugguccuacaucguugaaaagccaaacccggagaauggaaccuguuaucccggccauuuugcugauuacgaggaacugagagagcaacucucuucggugagcucauucgaaagguuugagauuuucccuaaggagaguuccuggccaaaccacacugucacaggugugucugccagcugcucccauaauggggaaaacucauuuuaucggaauuuacuguggcuuaccggaaagaacggcuuguaccccaaucugaguaagagcuaugcaaacaacaaagagaaggaagugcuaguucucuggggcgugcaccacccuccaaauaucgccgaccagaaaacgcuguaccauacugagaacgcuuacgucucugugguguccucacacuauagccgcaaguucacccccgaaauagcaaagcgaccuaaaguccgugaucaggaggggagaaucaauuacuauuggacacuucuggagccaggagacacuauuaucuuugaagccaacgguaauuugauugcuccgagguacgccuucgcgcucagucggggcuuugggucuggaaucauaaacuccaaugcacccauggauaagugugacgccaaaugccagaccccucaaggcgcuauuaacagcucgcugccauuccagaauguucaucccgugacaaucggugaguguccuaaguauguacgcucugccaaauuaagaauggugaccgggcugaggaacauuccauccauccagucacggggacucuuuggcgcaaucgcuggcuucauugaagggggauggacggguauggucgauggcugguacggguaucaccaccagaaugagcaaggaaguggcuacgccgcggaccagaaaagcacucagaacgccauaaaugguaucacaaacaaaguaaauuccguuauugaaaagaugaacacccaguuuacugcaguggggaaggaguucaacaaacuugagcgccgaauggaaaaucugaacaagaaagucgaugacggcuucaucgauauauggacauacaaugcugaguugcuagugcugcucgaaaacgagagaacccugaauuuucaugacucuaacguaaagaaucuuuaugaaaaaguuaagagccaacugaagaacaaugccaaagagauuggaaacggcugcuucgaguuuuaccacaaguguaaugacgaaugcauggagucagugaaaaacgggacguaugauuaccccaaguauagugaagaguccaaauugaauagggagaagaucgacggagucaagcucgaaagcauggguguguaccagauccuggcuauuuauucuaccgucgccucaaguuuagugcugcuaguuagccucggcgcaaucuccuucuggaugugcucuaacgggucgcugcagugucggauuugcauauga

SEQ ID NO: 132157 - RNA, 1698 nt, Artificial Sequence; identical to SEQ ID NO: 131674
  derived and/or modified CDS sequence (opt3) from hemagglutinin__InfluenzaA__ADC45780

SEQ ID NO: 132158 - RNA, 1698 nt, Artificial Sequence; identical to SEQ ID NO: 131179
  derived and/or modified CDS sequence (opt3) from hemagglutinin__InfluenzaA__ADC45791

SEQ ID NO: 132159 - RNA, 1698 nt, Artificial Sequence
  derived and/or modified CDS sequence (opt3) from hemagglutinin__InfluenzaA__ADC45813
augaaggugaaacugcucauccuucugugcaccuucacagccacuuacgcugacacgauuuguauaggcuaucacgcaaacaauagcaccgauacagucgacacuguuuuggagaagaacgugaccguaacacauuccgugaauuuacuggaaaacucucacaaugggaaacuaugccuccugaagggaaucgcgccccuucagcuggguaacuguucagucgccggcuggauuuuggggaauccugagugcgaacuccugaucaguaaagagagcugguccuacauuguggaaaagccaaacccggagaauggaaccuguuaucccggccauuuugcugauuacgaggaacugagagagcaacucucuucgguuagcucauucgaaagguuugagaucuucccuaaggagaguuccuggccaaaccacacugugacaggugucucugccagcugcucccauaauggggaaucaaguuuuuaucggaacuuacuguggcuuaccaugaaaaauggauuguaccccaaccugagcaagucuuaugcaaauaacaaagagaaggaagugcuaguacucuggggcguucaccacccuccaaacauaggcgaccagaaaacgcuguacaauacugagaacgccuacguguccgucgugucaagccauuauagucgcaaguucacccccgaaaucgcuaagcgaccuaaagugcgugaucaggaggggagaauuaauuacuauuggacacuucuggagccaggagacacuaucauuuuugaagcaaacgguaauuugaucgccccgagguacgcuuucgcccucucucggggcuuuggguccggaauaauuaacagcaaugcgcccauggauaagugugacgcaaaaugccagaccccucaaggcgccaucaacucgucucugccauuccagaauguccaccccguuacaauuggugaguguccuaaguaugugcgcuccgcuaaauuaagaaugguaaccgggcugaggaacaucccaucaauccagagucggggacucuuuggcgccauugcaggcuucauagaagggggauggacggguaugguggauggcugguacggguaucaucaccagaaugagcaaggaagcggcuacgcugccgaccagaaguccacucagaacgcgaucaaugguauuacaaacaaagucaauucugugaucgaaaagaugaacacccaguuuacugccguugggaaggaguucaacaaacuugagcgccgaauggaaaaucugaacaagaaaguggaugacggcuucauagauauuuggacauacaaugcagaguugcuaguccugcucgaaaacgagagaacccuggacuuucacgacagcaaugugaagaaccuuuaugaaaaaguaaagucacaacugaagaauaacgcuaaagagaucggaaauggcugcuucgaguuuuaccauaaguguaacgaugaaugcauggagaguguuaaaaaugggacguaugacuaccccaaguauuccgaagagagcaaauugaacagggagaagaucgauggagugaagcucgaaucuaugggugucuaccagauucuggccaucuauucaaccguggcuaguagcuuaguccugcuagugucccucggcgccauuucuuucuggaugugcucgaaugggagccugcagugucggauaugcaucuga

SEQ ID NO: 132160 - RNA, 1698 nt, Artificial Sequence; identical to SEQ ID NO: 131179
  derived and/or modified CDS sequence (opt3) from hemagglutinin__InfluenzaA__ADC45824

SEQ ID NO: 132161 - RNA, 1698 nt, Artificial Sequence
  derived and/or modified CDS sequence (opt3) from hemagglutinin__InfluenzaA__ADC45835
augaaggugaaacugcucguccuucugugcaccuucacagccacuuacgcugacacgaucuguauuggcuaucacgcaaacaauagcaccgauacaguugacacuguguuggagaagaacguaaccgugacacauuccgucaauuuacuggaaaacucucacaaugggaaacuaugccuccugaagggaauagcgccccuucagcuggguaacuguucaguggccggcuggaucuuggggaauccugagugcgaacuccugauuaguaaagagagcugguccuacaucguugaaaagccaaacccggagaauggaaccuguuaucccggccauuuugcugauuacgaggaacugagagagcaacucucuucggugagcucauucgaaagguuugagauuuucccuaaggagaguuccuggccaaaccacacugucacaggugugucugccagcugcucccauaauggggaaaacucauuuuaucggaauuuacuguggcuuaccggaaagaacggcuuguaccccaaucugaguaagagcuaugcaaacaacaaagagaaggaagugcuaguucucuggggcgugcaccacccuccaaauaucgccgaccagaaaacgcuguaccauacugagaacgcuuacgucucugugguguccucacacuauagccgcaaguucacccccgaaauagcaaagcgaccuaaaguccgugaucaggaggggagaaucaauuacuauuggacacuucuggagccaggagacacuauuaucuuugaagccaacgguaauuugauugcuccgagguacgccuucgcgcucagucggggcuuugggucuggaaucauaaacuccaaugcacccauggauaagugugacgccaaaugccagaccccucaaggcgcuauuaacagcucgcugccauuccagaauguucaucccgugacaaucggugaguguccuaaguauguacgcucugccaaauuaagaauggugaccgggcugaggaacauuccauccauccagucacggggacucuuuggcgcaaucgcuggcuucauugaagggggauggacggguauggucgauggcugguacggguaucaccaccagaaugagcaaggaaguggcuacgccgcggaccagaaaagcacucagaacgccauaaaugguaucacaaacaaaguaaauuccguuauugaaaagaugaacacccaguuuacugcaguggggaaggaguucaacaaacuugagcgccgaauggaaaaucugaacaagaaagucgaugacggcuucaucgauauauggacauacaaugcugaguugcuagugcugcucgaaaacgagagaacccuggacuuucaugacucuaauguaaagaaccuuuaugaaaaaguuaagagccaacugaagaauaacgccaaagagauuggaaauggcugcuucgaguuuuaccacaaguguaacgaugaaugcauggagucagugaaaaaugggacguaugacuaccccaaguauagugaagaguccaaauugaacagggagaagaucgauggagucacccucgaaagcauggguguguaccagauccuggcuauuuauucuacagucgccucaaguuuagugcugcuaguuagccucggcgcaaucuccuucuggaugugcucuaaugggucgcugcagugucggauuugcauauga

SEQ ID NO: 132162 - RNA, 1698 nt, Artificial Sequence; identical to SEQ ID NO: 130536
  derived and/or modified CDS sequence (opt3) from hemagglutinin__InfluenzaA__ADC45846

SEQ ID NO: 132163 - RNA, 1701 nt, Artificial Sequence; identical to SEQ ID NO: 130717
  derived and/or modified CDS sequence (opt3) from hemagglutinin__InfluenzaA__ADC53558

SEQ ID NO: 132164 - RNA, 1701 nt, Artificial Sequence; identical to SEQ ID NO: 130808
  derived and/or modified CDS sequence (opt3) from hemagglutinin__InfluenzaA__ADD14087

SEQ ID NO: 132165 - RNA, 1701 nt, Artificial Sequence; identical to SEQ ID NO: 130717
  derived and/or modified CDS sequence (opt3) from hemagglutinin__InfluenzaA__ADD14089

SEQ ID NO: 132166 - RNA, 1701 nt, Artificial Sequence; identical to SEQ ID NO: 130717
  derived and/or modified CDS sequence (opt3) from hemagglutinin__InfluenzaA__ADD14093

SEQ ID NO: 132167 - RNA, 1701 nt, Artificial Sequence
  derived and/or modified CDS sequence (opt3) from hemagglutinin__InfluenzaA__ADD14095
augaaggccauccuggugguccuccuuuacaccuucgcuacagcaaacgccgacacucugugcauuggcuaucacgcgaauaacagcacggauaccguugacacaguguuggagaaaaauguaacugugacccauuccgucaacuuacuggaagauaagcacaaugggaaacuauguaagcucagaggaguggcuccccugcaucuugguaaaugcaacauagccggcuggauccuggggaauccugagugugaaucuuugucaacagcaaguagcugguccuacauuguugagaccucuucgucagacaacggaacuugcuauccaggcgauuuuaucgacuacgaggagcucagggagcagcugagcaguguguccucuuucgaacgguuugagauuuucccgaagacaagcuccuggcccaaucacgauucaaacaagggugucaccgccgcuuguccucaugcaggggccaaaaguuuuuauaagaaucugaucuggcucgugaaaaagggaaacagcuacccaaaauuaucuaaguccuauauaaaugacaagggcaaagaaguacugguucuuuggggcauccaccaccccucaacgagcgcugaucaacagaguuuguaccagaacgccgacgcguacguguucgucgggacuucucgcuauuccaagaaauuuaagccugagauugcaauccgaccaaaagugcgugaucaggagggaagaaugaauuacuauuggacccugguggaacccggugacaagauuacauucgaggccacuggcaaccuaguccucccuagguacgcuuuugccauggaacggaacgcagggagcggaaucauaauuucggauaccccaguucaugacugcaauacaaccugucaaacgccgaaaggcgcuaucaacacuucucugcccuuccagaauauucacccuaucacaaucgguaagugcccaaaguaugugaaauccaccaaacuucgccuggccacuggguugagaaacguacccucaauucagaguaggggacucuuuggcgcgauagccggcuucaucgaagggggauggacagguaugguggacggcugguacggguaucaucaccagaaugaacaaggaagcggcuacgcagcugaucugaaguccacccagaacgccauugacgagaucacgaauaaggucaacucugugauagagaaaaugaauacccaguuuacagcuguugguaaggaguucaaccacuuagaaaagcggauugaaaaucugaacaaaaagguggaugacggguuccucgauaucuggacuuacaaugccgagcuucuggucuugcuagaaaacgagcgcacccuggacuaucaugauagcaaugugaaaaaccucuacgagaagguacgaucacagcugaaaaacaaugcaaaggaaaucggcaacggauguuuugaguucuaucacaagugcgacaauacauguauggaaaguguuaaaaacggcacuuacgauuauccuaaguacuccgaggaagccaaacuuaauagagaggagauugacggggugaagcuggaaagcaccaggaucuaucaaauuuuggcuauauacucuacagucgcgucaagucucgugcuggucgugagcuuaggagcaaucuccuuuuggaugugcucuaacgguucgcugcagugccggauuuguaucuga

SEQ ID NO: 132168 - RNA, 1701 nt, Artificial Sequence; identical to SEQ ID NO: 130717
  derived and/or modified CDS sequence (opt3) from hemagglutinin__InfluenzaA__ADD14097

SEQ ID NO: 132169 - RNA, 1701 nt, Artificial Sequence; identical to SEQ ID NO: 130717
  derived and/or modified CDS sequence (opt3) from hemagglutinin__InfluenzaA__ADD14099

SEQ ID NO: 132170 - RNA, 1701 nt, Artificial Sequence; identical to SEQ ID NO: 130717
  derived and/or modified CDS sequence (opt3) from hemagglutinin__InfluenzaA__ADD14101

SEQ ID NO: 132171 - RNA, 1701 nt, Artificial Sequence
  derived and/or modified CDS sequence (opt3) from hemagglutinin__InfluenzaA__ADD14103
augaaggccauccuggugguccuccuuugcaccuucgcuacagcaaacgccgacacucuguguauuggcuaccacgcgaauaacagcacggauaccguugacacaguguuggagaagaauguaacugugacccauuccgucaacuuacuggaagauaagcacaaugggaaacuaugcaagcucagaggaguggcuccccugcaucuugguaaauguaacauagccggcuggauccuggggaauccugagugcgaaucuuugucaacagcaaguagcugguccuauauuguugagaccucuucgucagacaacggaacuuguuacccaggcgauuuuaucgacuaugaagaacucagggagcagcugagcaguguguccucuuucgaacgguuugagauuuucccgaagacaagcuccuggcccaaucacgauucaaacaagggugucaccgccgcuugcccucaugcaggggccaaaaguuuuuacaagaaucugaucuggcucgugaaaaagggaaacagcuauccaaaauuaucuaaguccuacauaaaugacaagggcaaagaaguacugguucuuuggggcauccaccaccccucaacgagcgcugaucaacagaguuuguaucagaacgccgacgcguacguguucgucgggacuucucgcuacuccaagaaauuuaagccugagauugcaauccgaccaaaagugcgugaucaggagggaagaaugaauuauuacuggacccugguggaacccggugacaagauuacauucgaggccacuggcaaccuagucguuccuagguaugcuuuugccauggaacggaacgcagggagcggaaucauaauuucggauaccccagugcaugacuguaauacaaccugccaaacgccgaaaggcgcuaucaacacuucucuccccuuccagaauauucacccuaucacaaucgguaaguguccaaaguacguaaaauccaccaagcugcgccuugccacugggcugagaaacgugcccucaauucagaguaggggauuguuuggcgcgauagccggcuucaucgaagggggauggacagguauggucgacggcugguauggguaccaucaccagaaugaacaaggaagcggcuaugcagcugaucucaaauccacccagaacgccauugacgagaucacgaauaaggugaacucuguuauagagaaaaugaauacccaguuuacagcuguggguaaggaguucaaccaccuggauaagcggauugagaauuuaaacaaaaagaucgacgauggguuccuggacaucuggacuuacaaugccgaacuccuuguccuguuggagaacgaacgcacccuagauuaccaugacagcaaugugaaaaaccuguaugagaagguacgaucacagcucaaaaacaaugcaaaggagauuggcaacggaugcuuugaguucuaccacaagugugauaauacaugcauggagaguguuaaaaacggcacuuaugacuacccuaaguauuccgaagaggccaaacugaauagagaagagaucgauggggugaaacuugagagcaccaggauuuaccaaauacuggcuaucuauucuacagucgcgucaaguuuggugcucgucgugagccugggagcaauuuccuuuuggaugugcucuaacgguucguuacagugucggaucugcaucuga

SEQ ID NO: 132172 - RNA, 1701 nt, Artificial Sequence
  derived and/or modified CDS sequence (opt3) from hemagglutinin__InfluenzaA__ADD14111
augaaggccauccuggugguccuccuuuacaccuucgcuacagcaaacgccgacacucugugcauuggcuaucacgcgaauaacagcacggauaccguugacacaguguuggagaaaaauguaacugugacccauuccgucaacuuacuggaagauaagcacaaugggaaacuauguaagcucagaggaguggcuccccugcaucuugguaaaugcaacauagccggcuggauccuggggaauccugagugugaaucuuugucaacagcaaguagcugguccuacauuguugagaucucuucgucagacaacggaaccugcuauccaggcgauuuuauugacuacgaggagcucagggagcagcugagcaguguguccucuuucgaacgguuugagaucuucccgaagacuagcuccuggcccaaucacgauucaaacaagggugucacagccgcuuguccucaugcaggggccaaaaguuuuuauaagaaucugauauggcucgugaaaaagggaaacagcuacccaaaauuaucuaaguccuauaucaaugacaagggcaaagaaguacugguucuuuggggcauucaccaccccucaaccagcgcugaucaacagaguuuguaccagaacgccgacgcguacguguucgucgggacgucucgcuauuccaagaaauuuaagccugagaucgcaauucgaccaaaagugcgugaucaggagggaagaaugaauuacuauuggacucugguggaacccggugacaagaucaccuucgaggccacaggcaaccuagucguuccuagguacgcuuuugccauggaacggaacgcagggagcggaauaauuaucucggauacuccagugcaugacugcaauaccacaugucaaaccccgaaaggcgcuauuaacacgucucuccccuuccagaauauccacccuaucacuauugguaagugcccaaaguauguaaaauccacaaagcugcgccuugccaccgggcugagaaacgugcccucaauacagaguaggggauuguuuggcgcgaucgccggcuucauugaagggggauggacugguauggucgacggcugguacggguaucaucaccagaaugaacaaggaagcggcuacgcagcugaucucaaauccacacagaacgccaucgacgagauaaccaauaaggugaacucuguuauugagaaaaugaauacgcaguuuaccgcuguggguaaggaguucaaccaccuggaaaagcggaucgaaaauuuaaacaaaaaggucgaugacggguuccuggauaucuggacauacaaugccgagcuccuugugcuguuggaaaacgagcgcacucuagacuaucaugauagcaauguaaagaaccuguacgagaagguucgaucacagcucaaaaacaaugcaaaggaaauuggcaacggauguuuugaguucuaucacaagugcgacaauaccuguauggaaagugugaaaaacggcacauacgauuauccuaaguacuccgaggaagccaaacugaauagagaggagaucgacggggucaaacuugaaagcacuaggauuuaucaaauacuggcuaucuacucuaccguggcgucaaguuugguccucgugguuagccugggagcaauuuccuuuuggaugugcucuaacgguucguuacagugccggaucuguaucuga

SEQ ID NO: 132173 - RNA, 1701 nt, Artificial Sequence; identical to SEQ ID NO: 130717
  derived and/or modified CDS sequence (opt3) from hemagglutinin__InfluenzaA__ADD14115

SEQ ID NO: 132174 - RNA, 1701 nt, Artificial Sequence; identical to SEQ ID NO: 130717
  derived and/or modified CDS sequence (opt3) from hemagglutinin__InfluenzaA__ADD14117

SEQ ID NO: 132175 - RNA, 1701 nt, Artificial Sequence; identical to SEQ ID NO: 130717
  derived and/or modified CDS sequence (opt3) from hemagglutinin__InfluenzaA__ADD14119

SEQ ID NO: 132176 - RNA, 1701 nt, Artificial Sequence; identical to SEQ ID NO: 130717
  derived and/or modified CDS sequence (opt3) from hemagglutinin__InfluenzaA__ADD14121

SEQ ID NO: 132177 - RNA, 1701 nt, Artificial Sequence; identical to SEQ ID NO: 130717
  derived and/or modified CDS sequence (opt3) from hemagglutinin__InfluenzaA__ADD14123

SEQ ID NO: 132178 - RNA, 1701 nt, Artificial Sequence; identical to SEQ ID NO: 130717
  derived and/or modified CDS sequence (opt3) from hemagglutinin__InfluenzaA__ADD14127

SEQ ID NO: 132179 - RNA, 1701 nt, Artificial Sequence
  derived and/or modified CDS sequence (opt3) from hemagglutinin__InfluenzaA__ADD14129
augaaggccauccuggugguccuccuuuacaccuucgcuacagcaaacgccgacacucugugcauuggcuaucacgcgaauaacagcacggauaccguugacacaguguuggagaaaaauguaacugugacccauuccgucaacuuacuggaagauaagcacaaugggaaacuauguaagcucagaggaguggcuucucugcaucuugguaaaugcaacauagccggcuggauccuggggaaucccgagugugaaucauugaguacagcaagcuccuggucuuacauuguugagaccucgucaagcgacaacggaacuugcuauccuggcgauuuuaucgacuacgaggagcucagggagcagcugaguuccgugucuagcuucgaacgguuugagauuuucccaaagacauccucauggccgaaucacgauaguaacaagggugucaccgccgcuuguccccaugcaggggccaagagcuuuuauaagaaucugaucuggcucgugaaaaagggaaacucuuacccuaaauuauccaagucauauauaaaugacaagggcaaagaaguacugguucuuuggggcauccaccacccaagcacgagugcugaucaacagucuuuguaccagaacgccgacgcguacguguucgucgggacuucccgcuauagcaagaaauuuaagcccgagauugcaauccgaccuaaagugcgugaucaggagggaagaaugaauuacuauuggacccugguggaaccaggugacaagauuacauucgaggccacuggcaaccuagucguucccagguacgcuuuugccauggaacggaacgcagggucgggaaucauaauuucugauaccccugugcaugacugcaauacaaccugucaaacgccaaaaggcgcuaucaacacuucccucccguuccagaauauucaccccaucacaaucgguaagugcccuaaguauguaaaaucaaccaagcugcgccuugccacugggcugagaaacgugccaaguauucagagcaggggauuguuuggcgcgauagccggcuucaucgaagggggauggacagguauggucgacggcugguacggguaucaucaccagaaugaacaaggauccggcuacgcagcugaucucaaaucuacccagaacgccauugacgagaucacgaauaaggugaacagcguuauagagaaaaugaauacccaguuuacagcuguggguaaggaguucaaccaccuggaaaagcggauugaaaauuuaaacaaaaaggucgaugacggguuccuggauaucuggacuuacaaugccgagcuccuugugcuguuggaaaacgagcgcacccuagacuaucaugauucaaauguuaaaaaccuguacgagaagguacgaagucagcucaaaaacaaugcaaaggaaaucggcaacggauguuuugaguucuaucacaagugcgacaauacauguauggaauccgugaaaaacggcacuuacgauuaucccaaguacagcgaggaagccaaacugaauagagaggagauugacggggucaaacuugaaucuaccaggaucuaucaaauucuggcuauauacucaacaguggcgaguagcuugguccucgugguuucccugggagcaaucucuuuuuggaugugcucgaacgguagcuuacagugccggauuuguaucuga

SEQ ID NO: 132180 - RNA, 1701 nt, Artificial Sequence
  derived and/or modified CDS sequence (opt3) from hemagglutinin__InfluenzaA__ADD14133
augaaggccauccuggugguccuccuuuacaccuucgcuacagcaaacgccgacacucugugcauuggcuaucacgcgaauaacagcacggauaccguugacacaguguuggagaagaauguaacugugacccauuccgucaacuuacuggaagauaagcacaaugggaaacuauguaagcucagaggaguggcuccccugcaucuugguaaaugcaacauagccggcuggauccuggggaauccugagugugaaucuuugucaacagcaaguagcugguccuacauuguugagaccucuucgucagacaacggaacuugcuauccaggcgauuuuaucgacuacgaggagcucagggagcagcugagcaguguguccucuuucgaacgguuugagauuuucccgaagacaagcuccuggcccaaucacgauucaaacaagggugucaccgccgcuuguccucaugcaggggccaaaaguuuuuauaagaaucugaucuggcucgugaaaaagggaaacagcuacccaaaauuaucuaaguccuauauaaaugacaagggcaaagaaguacugguucuuuggggcauccaccaccccucaacgagcgcugaucaacagaguuuguaccagaacguggacgccuacgucuucguggggacuucucgcuauuccaagaaauuuaagccugagauugcgauccgaccaaaagugcgugaucaggagggaagaaugaauuacuauuggacccuggucgaacccggugacaagauuacauucgaggcaacuggcaaccuaguugugccuagguacgccuuugcuauggaacggaacgccggguucggaaucauaauuagcgauaccccaguacaugacugcaauacaaccugucaaacgccgaaaggcgcaaucaacacuucgcuccccuuucagaauauucacccuaucacaaucgguaagugcccaaaguaugugaaaucuaccaagcugcgccuugcuacugggcugagaaacguccccuccauucagucaaggggauuguucggcgccauagcgggcuuuaucgaagggggauggacagguaugguggacggcugguacggguaucaucaccagaaugaacaaggaaguggcuacgccgcagaucucaaaagcacccagaacgcuauugacgagaucacgaauaagguuaacuccgugauagagaaaaugaauacccaguucacagccgucgguaaggaguucaaccaccuggaaaagcggauugaaaauuuaaacaaaaagguggaugacggguuucuggauaucuggacuuacaaugcugagcuccuuguacuguuggaaaacgagcgcacccuagacuaucaugauucuaauguuaaaaaccuguacgagaaggugcgaagccagcucaaaaacaaugccaaggaaaucggcaacggauguuucgaguuuuaucacaagugcgacaauacauguauggaaucagucaaaaacggcacuuacgauuauccuaaguacagugaggaagcaaaacugaauagagaggagauugacggggugaaacuugaauccaccaggaucuaucaaauucuggccauauacagcacagucgcuucuucauuggugcucguugugagucugggagcgaucagcuucuggaugugcuccaacgguucuuuacagugccggauuuguaucuga

SEQ ID NO: 132181 - RNA, 1701 nt, Artificial Sequence; identical to SEQ ID NO: 130808
  derived and/or modified CDS sequence (opt3) from hemagglutinin__InfluenzaA__ADD14135

SEQ ID NO: 132182 - RNA, 1701 nt, Artificial Sequence; identical to SEQ ID NO: 130717
  derived and/or modified CDS sequence (opt3) from hemagglutinin__InfluenzaA__ADD14137

SEQ ID NO: 132183 - RNA, 1701 nt, Artificial Sequence; identical to SEQ ID NO: 131465
  derived and/or modified CDS sequence (opt3) from hemagglutinin__InfluenzaA__ADD14139

SEQ ID NO: 132184 - RNA, 1701 nt, Artificial Sequence; identical to SEQ ID NO: 130717
  derived and/or modified CDS sequence (opt3) from hemagglutinin__InfluenzaA__ADD14143

SEQ ID NO: 132185 - RNA, 1701 nt, Artificial Sequence; identical to SEQ ID NO: 130717
  derived and/or modified CDS sequence (opt3) from hemagglutinin__InfluenzaA__ADD14145

SEQ ID NO: 132186 - RNA, 1701 nt, Artificial Sequence; identical to SEQ ID NO: 130717
  derived and/or modified CDS sequence (opt3) from hemagglutinin__InfluenzaA__ADD14147

SEQ ID NO: 132187 - RNA, 1701 nt, Artificial Sequence
  derived and/or modified CDS sequence (opt3) from hemagglutinin__InfluenzaA__ADD14151
augaaggccauccuggugguccuccuuuacaccuucgcuacagcaaacgccgacacucugugcauuggcuaucacgcgaauaacagcacggauaccguugacacaguguuggagaaaaauguaacugugacccauuccgucaacuuacuggaagauaagcacaaugggaaacuauguaagcucagaggaguggcuccccugcaucuugguaaaugcaacauagccggcuggauccuggggaauccugagugugaaucuuugucaacagcaaguagcugguccuacauuguugagaccucuucgucagacaacggaacuugcuauccaggcgauuuuaucgacuacgaggagcucagggagcagcugagcaguguguccucuuucgaacgguuugagauuuucccgaagacaagcuccuggcccaaucacgauucaaacaagggugucaccgccgcuuguccucgcgcaggggccaaaaguuuuuauaagaaucugaucuggcucgugaaaaagggaaacagcuacccaaaauuaucuaaguccuauauaaaugacaagggcaaagaaguacugguucuuuggggcauccaucaccccucaacgagcgcugaucaacagaguuuguaccagaacgccgacgcguacguguucgucgggacuucucgauauuccaagaaauuuaagccugagauugcaauccguccaaaagugagagaucaggagggaaggaugaauuacuauuggacccugguggaacccggugacaagauuacauucgaggccacuggcaaccuagucguuccucgguacgcuuuugccauggaacgcaacgcagggagcggaaucauaauuucggauaccccagugcacgacugcaauacaaccugucaaacgccgaaaggcgcuaucaacacuucucuccccuuccagaauauucauccuaucacaaucgguaagugcccaaaguauguaaaauccaccaagcugagacuugccacugggcugaggaacgugcccucaauucagagucggggauuguuuggcgcgauagccggcuucaucgaagggggauggacagguauggucgacggcugguacggguaucaccaucagaaugaacaaggaagcggcuacgcagcugaucucaaauccacccagaacgccauugacaagaucacgaauaaagugaacucuguuauagagaagaugaauacccaguuuacagcuguggguaaggaguucaaccaccuggaaaaacgcauugagaauuuaaacaagaaagucgaugacggguuccuggauaucuggacuuacaaugccgaacuccuugugcuguuggagaacgaacgaacccuagacuaucacgauagcaauguaaagaaccuguacgagaaaguuagaucacagcucaagaacaaugcaaaggagaucggcaacggauguuuugaguucuaucauaaaugcgacaauacauguauggaaagugugaagaacggcacuuacgauuauccuaaauacuccgaagaggccaagcugaauagggaagagauugacggggucaaacuugagagcacccggaucuaucaaauucuggcuauauacucuacaguggcgucaaguuugguccucgugguuagccugggagcaaucuccuuuuggaugugcucuaacgguucguuacagugccguauuuguaucuga

SEQ ID NO: 132188 - RNA, 1701 nt, Artificial Sequence; identical to SEQ ID NO: 130717
  derived and/or modified CDS sequence (opt3) from hemagglutinin__InfluenzaA__ADD14153

SEQ ID NO: 132189 - RNA, 1701 nt, Artificial Sequence; identical to SEQ ID NO: 130717
  derived and/or modified CDS sequence (opt3) from hemagglutinin__InfluenzaA__ADD14155

SEQ ID NO: 132190 - RNA, 1701 nt, Artificial Sequence; identical to SEQ ID NO: 130717
  derived and/or modified CDS sequence (opt3) from hemagglutinin__InfluenzaA__ADD14157

SEQ ID NO: 132191 - RNA, 1701 nt, Artificial Sequence; identical to SEQ ID NO: 130717
  derived and/or modified CDS sequence (opt3) from hemagglutinin__InfluenzaA__ADD14162

SEQ ID NO: 132192 - RNA, 1701 nt, Artificial Sequence; identical to SEQ ID NO: 130717
  derived and/or modified CDS sequence (opt3) from hemagglutinin__InfluenzaA__ADD14172

SEQ ID NO: 132193 - RNA, 1701 nt, Artificial Sequence; identical to SEQ ID NO: 130717
  derived and/or modified CDS sequence (opt3) from hemagglutinin__InfluenzaA__ADD14182

SEQ ID NO: 132194 - RNA, 1701 nt, Artificial Sequence; identical to SEQ ID NO: 130717
  derived and/or modified CDS sequence (opt3) from hemagglutinin__InfluenzaA__ADD14192

SEQ ID NO: 132195 - RNA, 1701 nt, Artificial Sequence; identical to SEQ ID NO: 130717
  derived and/or modified CDS sequence (opt3) from hemagglutinin__InfluenzaA__ADD14202

SEQ ID NO: 132196 - RNA, 1701 nt, Artificial Sequence
  derived and/or modified CDS sequence (opt3) from hemagglutinin__InfluenzaA__ADD21447
augaaggccauccugguguuccuccuuuacaccuuugcuacagcaaacgccgacacucugugcauuggcuaucacgcgaauaacagcacggauaccgucgacacaguuuuggagaaaaaugugacuguaacccauuccgugaacuuacuggaagauagacacaaugggaagcuauguaaacucaggggagucgcuccccugcaucuugguaagugcaacauagccggcuggcuguuggggaauccugagugugaacuccuguucacagcaucuucauggaguuacaucguggagaccagcaacuccgacaauggaacuugcuauccaggcgauuuuauuaacuacgaggagcugcgggagcagcucucuucgguuagcucauucgaacgcuuugagauguucccgaaaaguuccucuuggcccaaucacgaaacaaaccgaggugugaccgccgcuuguccuuaugcaggggccaauagcuuuuaccguaacuuaaucuggcuggucaagaaggaaaauuccuauccaaaacuuucaaagaguuacauuaacaacaaagagaaggaaguguugguacuguggggaauccaucaucccccuacgagcgcugaccaacagucucuauaccagaaugccgaugcguauguuuucgugggcuccucaaaauacaacaagaaguuuagaccagagauagcagccaggcccaaaguccggggccagacugggcgcaugaauuauuacuggacccucguggaaccuggagacacaaucacuuucgaggcuaccgaaaaccugguggucccaagauaugccuuugcaaugaagagggguagcggcagugggauuaucauuucugauacaccgguucacgacugcaauaccacgugucaaacucccaaaggagcuaucaacacaucccuuccuuuccagaauauacacccagugaccauuggcgagugccccaaguacguaaaaagcacuaaccugcggauggccacagguuugcgcaauaucccuucgauucagucucgagggcucuuuggagcgaucgccggcuucaucgagggcggguggaccggaaugauugaugguugguauggcuaccaccaucagaacgaacaaggguccggauacgcagcugacagaaagucaacgcagaaugccauagauggcaucaccaacaaagugaauagugucauugagaagaugaacacacaguucacugcuguggguaaggaauuuaaucaccuggagaaaaggaucgaaaacuuaaacaagaaaguugacgacgggcugcucgauguguggaccuauaaugccgagcuucuggucuugcuagagaacgaacggacacuggacuaccacgauagcaaugugaagaaccucuaugagaaaguacguucccagcugaagaauaacgcaaaggaaauaggcaauggauguuucgaguuuuaccauaaaugcgacgauacuuguauggaaucuguucgcaacggcgccuaugacuacccaaaguauagcgaggaggcuaaacuuaauagagaagagauugauggggugaagcuggaaucaaccaggaucuaccaaaucuuggcgauuuacaguacagucgcauccagccucgugcuguuagucucucugggagccaucucauucuggaugugcaguaacgguagccuacagugccggauuuguauauga

SEQ ID NO: 132197 - RNA, 1701 nt, Artificial Sequence
  derived and/or modified CDS sequence (opt3) from hemagglutinin__InfluenzaA__ADD21457
augaaggccauccugguguuccuccuuuacaccuuugcuacagcaaacgccgacacucugugcauuggcuaucacgcgaauaacagcacggauaccgucgacacaguuuuggagaaaaaugugacuguaacccauuccgugaacuuacuggaagauagacacaaugggaagcuauguaaacucaggggagucgcuccccugcaucuugguaagugcaacauagccggcuggcuguuggggaauccugagugugaacuccuguucacagcaucuucauggaguuacaucguggagaccagcaacuccgacaauggaacuugcuauccaggcgauuuuauuaacuacgaggagcugcgggagcagcucucuucgguuagcucauucgaacgcuuugagauguucccgaaaaguuccucuuggcccaaucacgaaacaaaccgaggugugaccgccgcuuguccuuaugcaggggccaauagcuuuuaccguaacuuaaucuggcuggucaagaaggaaaauuccuauccaaaacuuucaaagaguuacauuaacaacaaagagaaggaaguguugguacuguggggaauccaucaucccccuacgagcgcugaccaacagucucuauaccagaaugccgaugcguauguuuucgugggcuccucaaaauacaacaagaaguuuagaccagagauagcagccaggcccaaaguccggggccagacugggcgcaugaauuauuacuggacccucguggaaccuggagacacaaucacuuucgaggcuaccgguaaccugguggucccaagauaugccuuugcaaugaagaggggcagcgggaguggaauuaucauuucugauacaccgguucacgacugcaauaccacgugucaaacucccaaaggcgcugugaacacaucccuuccuuuccagaauauccacccaguaaccauaggugaaugccccaaguacgugaaaagcacuaaccugcggauggccacaggguugcgcaauauuccuucgauccagucucgaggacucuuuggcgcgauugccggcuucaucgaagggggauggaccgguaugaucgauggcugguauggguaccaccaucagaacgagcaaggauccggcuacgcagcugacagaaagucaacgcagaaugccauugaugguauaaccaacaaagucaauagugugaucgaaaagaugaacacacaguucacugcuguugggaaggaguuuaaucaccuggagaaaaggauugagaacuuaaacaagaaaguggacgacggccugcucgaugucuggaccuauaaugccgaacuucugguguugcuagagaacgagcggacacuggacuaccacgauagcaauguaaagaaccucuaugaaaaaguucguucccagcugaagaauaacgcaaaggagaucggaaauggcuguuucgaauuuuaccauaaaugcgacgauacuuguauggagucugugcgcaacgggaccuaugacuacccaaaguauagcgaagaggccaaacuuaauagagaggaaauagauggagucaagcuggagucaacaaggauuuaccaaaucuuggcuaucuacaguaccguggcguccagccucguccuguuagugucucugggugcaauuucauucuggaugugcaguaacggcagccuacagugccggaucuguauuuga

SEQ ID NO: 132198 - RNA, 1698 nt, Artificial Sequence
  derived and/or modified CDS sequence (opt3) from hemagglutinin__InfluenzaA__ADD21467
augaaggccaaacugcucgugcuucugugcaccuucacagcuacuuacgcagacacgaucuguauuggcuaucacgccaacaauagcaccgauacagucgacacuguuuuggagaagaacgugaccguaacacauuccgugaauuuacuggaagauucucacaacgggaaacuaugccuccugaagggaauagcgccccuucagcuggguaauuguucagucgcuggcuggaucuuggggaacccugagugcgaacuccugauuaguaaagagagcugguccuacaucguggaaaccccaaauccggagaacggaacuuguuaucccggcuacuuugccgacuaugaggaacugagagagcaacucucuucgguuagcucauucgaaagguuugagauuuucccuaaggagaguuccuggccaaaucauacagugaccggugucucugcaagcugcucccacaacgggaagucaaguuuuuaccggaauuuacuguggcuuacgggcaaaaacggauuguaucccaaucugagcaagucuuacgccaacaauaaagaaaaggaggugcuaguacucuggggcguucaucacccuccaaacauccgcgaucagcgagcucuguaccacacugaaaacgcauauguguccgucgugucaagccauuacagucguagauucacccccgagauagccaaaaggccuaaggugcgggggcaggaaggacgcaucaauuauuacuggacacuucuggagccaggugacacuauuaucuuugaggcuaacggcaauuugauugccccgugguaugcguucgcacucucuagaggguuuggauccggcaucauaaccagcaacgcccccauggaugaaugugacgcuaagugccagacaccucaaggugccauuaauucgucucugccauuccagaacguccaccccguuaccaucggggaguguccuaaauacgcaagguccgcuaaguuacggauggugacgggacugcgcaauauuccaucaauccagagucgaggccucuuuggcgccaucgcgggguucauugaaggagguuggacuggcaugguagaugggugguauggauaccaucaccagaacgagcaaggcagcgguuacgccgcagaccagaaauccacacagaaugcuauaaacgggaucaccaauaaggugaacucugucauugaaaagaugaauacucaguuuacagccgugggcaaagaguucaacaaacuugagagaaggauggaaaaucugaacaagaagguugaugacggauucuuggauaucuggaccuauaacgcugagcuacuggugcuccuggaaaaugagcggacgcuugacuuucacgacagcaacgucaaaaaucuguacgaaaaggugaaaucacaauugaagaacaaugccaaagagauaggcaacgggugcuucgaguuuuaucauaaguguaauaacgaaugcauggagaguguaaagaauggaaccuacgauuaucccaaauacuccgaagagagcaagcucaaccgugagaaaauugacgguguuaagcuggaaucuaugggcguguaucagaucuuagcaaucuacucaacagucgccaguagccuggugcuacucgucucccugggggcuauuucuuucuggaugugcucgaauggaagccuucagugucgcaucugcauuuga

SEQ ID NO: 132199 - RNA, 1701 nt, Artificial Sequence
  derived and/or modified CDS sequence (opt3) from hemagglutinin__InfluenzaA__ADD21560
augaagaccaucauugccuucagccacauacugugccucaucuacgcucagaaacuucccggcuccgacaacucuauggcaacacuguguuuggggcaucacgccgugccuaauggaacuuuagucaagacgauuaccgaugaccaaaucgagguuacaaacgcgacugaacuggugcagucaaguagcaccgguagaauuugcaauuccccacaucacauccuagauggcaaaaacuguacacucauagacgcucugcuuggggauccgcauugcgacgauuuucagaauaaggagugggaccuguucguagaaaggucuaccgccuauucgaacuguuaccccuauuacgugccugauuaugcaucauugcggagccucgucgccaguuccggaacucuggaguuuacacaggaaucuuucaauuggaccggcgugacgcaagacgguagcuccuacacuugccgccgaaaaucaguuaacaguuucuucagccgucugaauuggcuccacaacuuagauuauaaguacccagcucugaaugugaccaugcccaacaaugacaaguuugauaaacuuuacaucuggggaguccaccauccugggacagacagagaccagacuaacuuguaugugcaggcaucuggcaggguaaccguuuccacaaagcggucacagcaaaccgugauuccaaauaucggcagccgccccugggucagaggggugaguucuauuaucuccauauacuggacgauugugaaaccuggagauauccugcuaauuaacagcacugguaaccucaucgccccaaggggcuauuucaagauccagucggggaaaucuuccauuaugcggucagacgcuccgauaggaaauuguaacagugagugcaucacacccaauggcagcauuccuaacgauaagccauuucagaaugucaaccgcaucaccuacggugccuguccccgauauguuaagcagaauacucugaaacuugcgacagggaugagaaacgugccugagaagcaaaccaggggaauauucggcgcaauugccggcuuuaucgaaaaugggugggagggaaugguagacgguugguacggcuuccggcaccagaacuccgaagggacgggacaggcugccgaucugaaaucuacccaagcagcuaucaaucagauuacaggcaaguugaaccgugugaucaaaaagacuaaugagaaauuucaucagauugagaaggaauuuagcgaggucgaaggucgcauacaggaccucgagaaguauguggaagauaccaaaaucgaccuguggucauacaacgccgaguuacugguugcgcucgagaaucaacacacaauugaucuuacugacagugaaaugaacaagcuguucgagagaaccaggaaacaguugcgggaaaacgccgaggauauggggaauggcugcuuuaagaucuaccacaaaugugacaacgcaugcaucggauccauucgaaauggcacauaugaccaugauguguaccgcgacgaagcucuaaacaauagauuccagauaaagagcguccagcugaagucuggguauaaagauuggauccucuggauuucauuugccaugaguugcuuccugcuuugugugguacuguugggauuuaucauguggaccugccaaaaggguaacauuaaauguaauaucugcauauga

SEQ ID NO: 132200 - RNA, 1701 nt, Artificial Sequence; identical to SEQ ID NO: 130704
  derived and/or modified CDS sequence (opt3) from hemagglutinin__InfluenzaA__ADD21734

SEQ ID NO: 132201 - RNA, 1701 nt, Artificial Sequence; identical to SEQ ID NO: 130717
  derived and/or modified CDS sequence (opt3) from hemagglutinin__InfluenzaA__ADD21744

SEQ ID NO: 132202 - RNA, 1701 nt, Artificial Sequence
  derived and/or modified CDS sequence (opt3) from hemagglutinin__InfluenzaA__ADD21764
augaaggccauccuggugguccuccuuuacaccuucgcuacagcaaacgccgacacucugugcauuggcuaucacgcgaauaacagcacggauaccguugacacaguguuggagaaaaauguaacugugacccauuccgucaacuuacuggaagauaagcacaaugggaaacuauguaagcucagaggaguggcuccccugcaucuugguaaaugcaacauagccggcuggauccuggggaauccugagugugaaucuuugucaacagcaaguagcugguccuacauuguugagaccucuucgucagacaacggaacuugcuauccaggcgauuuuaucgacuacgaagaacucagggagcagcugagcaguguguccucuuucgaacgguuugagauuuucccgaagacaagcuccuggcccaaucacgauucaaacaagggugucaccgccgcuuguccucaugcaggggccaaaaguuuuuauaagaaucugaucuggcucgugaaaaagggaaacagcuacccaaaauuaucuaaguccuauauaaaugacaagggcaaagaaguacugguucuuuggggcauccaccaccccucaacgagcgcugaucaacagaguuuguaccagaacgccgacgcguacguguucgucgggacuucucgcuauuccaagaaauuuaagccugagauugcaauccgaccaaaagugcgugaucaggagggaagaaugaauuacuauuggacccugguggaacccggugacaagauuacauucgaggccacuggcaaccuagucguuccuagguacgcuuuugccauggaacggaacgcagagagcgggaucauaauuucggauaccccagugcaugacugcaauacaaccugucaaacgccgaaaggagcuaucaacacuucucuccccuuccagaauauucacccuaucacaaucggcaagugcccaaaguauguaaaauccaccaagcugcgccuugccacuggucugagaaacgugcccucaauucagaguaggggguuguuuggagcgauagccggcuucaucgaaggcggguggacaggaauggucgacgguugguacggcuaucaucaccagaaugagcaagggagcggauacgcagcugaucucaaauccacccagaacgccauugacgagaucacgaauaaggugaacucuguuauagaaaagaugaauacccaguuuacagcugugggcaaggaguucaaccaccuggaaaagcggauugagaauuuaaacaaaaaggucgaugacgguuuccuggauaucuggacuuacaaugccgaacuccuugugcuguuggagaacgagcgcacccuagacuaucaugauagcaauguuaaaaaccuguacgaaaagguacgaucacagcucaaaaacaaugcaaaggagaucgggaacggcuguuuugaguucuaucacaagugcgacaauacauguauggagagugugaaaaacggaacuuacgauuauccuaaguacuccgaagaggccaaacugaauagagaggaaauugacggcgucaaacuugagagcaccaggaucuaucaaauucuggcuauauacucuacaguggcgucaaguuugguccucgugguuagccugggggcaaucuccuuuuggaugugcucuaacggaucguuacagugccggauuuguaucuga

SEQ ID NO: 132203 - RNA, 1701 nt, Artificial Sequence
  derived and/or modified CDS sequence (opt3) from hemagglutinin__InfluenzaA__ADD21774
augaaggccauccuggugguccuccuuuacaccuucgcuacagcaaacgccgacacucugugcauuggcuaucacgcgaauaacagcacggauaccguugacacaguguuggagaagaauguaacugugacccauuccgucaacuuacuggaagauaagcacaaugggaaacuauguaagcucagaggaguggcuccccugcaucuugguaaaugcaacauagccggcuggauccuggggaauccugagugugaaucuuugucaacagcaaguagcugguccuacauuguugagaccucuucgucagacaacggaacuugcuauccaggcgauuuuaucgacuacgaggagcucagggagcagcugagcaguguguccucuuucgaacgguuugagauuuucccgaagacaagcuccuggcccaaucacgauucaaacaagggugucaccgccgcuuguccucaugcaggggccaaaaguuuuuauaagaaucugaucuggcucgugaaaaagggaaacagcuacccaaaauuaucuaaguccuauauaaaugacaagggcaaagaaguacugguucuuuggggcauccaccaccccucaacgagcgcugaucaacagaguuuguaccagaacgccgacgcguacguguucgucgggucuucccgcuauagcaagaaauuuaagccugagauugcaauccgaccaaaagugcgugaucaggagggaagaaugaauuacuauuggacucugguggaacccggugacaagauuaccuucgaggccacaggcaaccuagucguuccuagguacgcuuuugccauggaacggaacgcagggucgggaaucauaauuucugauacuccagugcaugacugcaauaccacaugucaaaccccgaaaggcgcuaucaacacgucccuccccuuccagaauauucacccuaucacuaucgguaagugcccaaaguauguaaaaucaacaaagcugcgccuugccaccgggcugagaaacgugcccaguguccagagcaggggauuguuuggcgcgauugccggcuucauagaagggggauggacugguaugguggacggcugguacggguaucaucaccagaaugaacaaggauccggcuacgcagcugaucucaaaucuacacagaacgccaucgacgagauuaccaauaagguuaacagcgugaucgagaaaaugaauacgcaguuuaccgcugucgguaaggaguucaaccaccuggaaaagcggauagaaaauuuaaacaaaaagguggaugacggguuccuggauauuuggacauacaaugccgagcuccuuguacuguuggaaaacgagcgcacucuagacuaucaugauucaaauguuaaaaaccuguacgagaaggugcgaagucagcucaaaaacaaugcaaaggaaaucggcaacggauguuuugaguucuaucacaagugcgacaauaccuguauggaauccgucaaaaacggcacauacgauuauccuaaguacagcgaggaagccaaacugaauagagaggagaucgacggggugaaacuugaaucuacuaggauuuaucaaauccuggcuauuuacucaaccgucgcgaguagcuuggugcucguugugucccugggagcaauaucuuuuuggaugugcucgaacgguagcuuacagugccggaucuguauuuga

SEQ ID NO: 132204 - RNA, 1701 nt, Artificial Sequence; identical to SEQ ID NO: 130717
  derived and/or modified CDS sequence (opt3) from hemagglutinin__InfluenzaA__ADD21784

SEQ ID NO: 132205 - RNA, 1701 nt, Artificial Sequence; identical to SEQ ID NO: 131877
  derived and/or modified CDS sequence (opt3) from hemagglutinin__InfluenzaA__ADD21794

SEQ ID NO: 132206 - RNA, 1701 nt, Artificial Sequence; identical to SEQ ID NO: 130717
  derived and/or modified CDS sequence (opt3) from hemagglutinin__InfluenzaA__ADD21804

SEQ ID NO: 132207 - RNA, 1701 nt, Artificial Sequence
  derived and/or modified CDS sequence (opt3) from hemagglutinin__InfluenzaA__ADD21814
augaaggccauccuggugguccuccuuuacaccuucgcuacagcaaacgccgacacucugugcauuggcuaucacgcgaauaacagcacggauaccguugacacaguguuggagaaaaauguaacugugacccauuccgucaacuuacuggaagauaagcacaaugggaaacuauguaagcucagaggaguggcuccccugcaucuugguaaaugcaacauagccucuuggauccugggcaauccugagugugaaucauugaguacagcaagcuccuggucuuacauuguugagaccucgucaagcgacaacgggacuugcuauccaggagauuuuaucgacuacgaagaacucagggagcagcugaguuccgugucuagcuucgaacgguuugagauuuucccgaagacauccucauggcccaaucacgauaguaacaagggcgucaccgccgcuuguccucaugcaggagccaagagcuuuuauaagaaucugaucuggcucgugaaaaaggggaacucuuacccaaaauuauccaagucauauauaaaugacaagggaaaagaaguacugguucuuuggggcauccaccaccccagcacgagugcugaucaacagucuuuguaccagaacgccgacgcguacguguucgucggcacuucccgcuauagcaagaaauuuaagccugagauugcaauccgaccaaaagugcgugaucaggaggggagaaugaauuacuauuggacccugguggaacccggagacaagauuacauucgaggccacugguaaccuagucguuccuagguacgcuuuugccauggaacggaacgcaggcucggggaucauaauuucugauaccccagugcaugacugcaauacaaccugucaaacgccgaaaggagcuaucaacacuucccuccccuuccagaauauucacccuaucacaaucggcaagugcccaaaguauguaaaaucaaccaagcugcgccuugccacuggucugagaaacgugcccaguauucagagcaggggguuguuuggagcgauagccggcuucaucgagggcggguggacaggaauggucgacgguugguacggcuaucaucaccagaaugaacaaggguccggauacgcagcugaucucaaaucuacccagaacgccauugacgagaucacgaauaaggugaacagcguuauagagaaaaugaauacccaguuuacagcugugggcaaggaguucaaccaccuggagaagcggauugaaaauuuaaacaaaaaggucgaugacgguuuccuggauaucuggacuuacaaugccgagcuccuugugcuguuggaaaacgagcgcacccuagacuaucaugauucaaauguuaaaaaccuguacgagaagguacgaagucagcucaaaaacaaugcaaaggaaaucgggaacggcuguuuugaguucuaucacaagugcgacaauacauguauggaauccgugaaaaacggaacuuacgauuauccuaaguacagcgaggaagccaaacugaauagagaggagauugacggcgucaaacuugaaucuaccaggaucuaucaaauucuggcuauauacucaacaguggcgaguagcuugguccucgugguuucccugggggcaaucucuuuuuggaugugcucgaacgguagcuuacagugccggauuuguaucuga

SEQ ID NO: 132208 - RNA, 1701 nt, Artificial Sequence; identical to SEQ ID NO: 131877
  derived and/or modified CDS sequence (opt3) from hemagglutinin__InfluenzaA__ADD21824

SEQ ID NO: 132209 - RNA, 1701 nt, Artificial Sequence; identical to SEQ ID NO: 131877
  derived and/or modified CDS sequence (opt3) from hemagglutinin__InfluenzaA__ADD21834

SEQ ID NO: 132210 - RNA, 1701 nt, Artificial Sequence; identical to SEQ ID NO: 131881
  derived and/or modified CDS sequence (opt3) from hemagglutinin__InfluenzaA__ADD21844

SEQ ID NO: 132211 - RNA, 1701 nt, Artificial Sequence; identical to SEQ ID NO: 131881
  derived and/or modified CDS sequence (opt3) from hemagglutinin__InfluenzaA__ADD21854

SEQ ID NO: 132212 - RNA, 1701 nt, Artificial Sequence; identical to SEQ ID NO: 131819
  derived and/or modified CDS sequence (opt3) from hemagglutinin__InfluenzaA__ADD21864

SEQ ID NO: 132213 - RNA, 1701 nt, Artificial Sequence
  derived and/or modified CDS sequence (opt3) from hemagglutinin__InfluenzaA__ADD21884
augaaggccauccuggugguccuccuuuacaccuucgcuacagcaaacgccgacacucugugcauuggcuaucacgcgaauaacagcacggauaccguugacacaguguuggagaaaaauguaacugugacccauuccgucaacuuacuggaagauaagcacaaugggaaacuauguaagcucagaggaguggcuccccugcaucuugguaaaugcaacauagccggcuggauccuggggaauccugagugugaaucuuugucaacagcaaguagcugguccuacauuguugagaccucuucgucaggaaacggcacuugcuauccaggugacuuuaucgauuacgaagaacucagggagcagcugagcaguguguccucuuucgaacgguuugagauuuucccgaagacaagcuccuggcccaaucacgacucaaacaagggggucaccgccgcuuguccucaugcaggagccaaaaguuuuuauaagaaucugaucuggcucgugaaaaagggcaacagcuacccaaaauuaucuaaguccuauauaaaugauaagggcaaagaaguacugguucuuugggggauccaccaccccucaacgagcgcugaccaacagaguuuguaccagaacgccgaugcguacguguucgucggaacuucucgcuauuccaagaaauuuaagccugagauugcaauccgaccaaaagugcgugaccaggaggguagaaugaauuacuauuggacccugguggaacccggcgauaagauuacauucgaggccacugggaaccuagucguuccuagguacgcuuuugccauggaacggaacgcaggaagcggcaucauaauuucggacaccccagugcaugauugcaauacaaccugucaaacgccgaaaggugcuaucaacacuucucuccccuuccagaauauucacccuaucacaaucgggaagugcccaaaguauguaaaauccaccaagcugcgccuugccacuggacugagaaacgugcccucaauucagaguaggggcuuguuuggcgcgauagccggguucaucgagggagguuggacaggcauggucgacgggugguacggauaucaucaccagaaugaacaaggcagcgguuacgcagcugaccucaaauccacccagaacgccauugaugagaucacgaauaaggugaacucuguuauagagaaaaugaauacccaguuuacagcuguggggaaggaguucaaccaccuggagaagcggauugaaaauuuaaacaaaaaggucgacgauggcuuccuggacaucuggacuuacaaugccgagcuccuugugcuguuggaaaacgagcgcacccuagauuaucaugacagcaauguaaagaaccuguacgagaagguucgaucacagcucaaaaacaaugcaaaggaaaucggaaacggcuguuuugaguucuaucacaagugcgauaauacauguauggggagugugaaaaacggaacuuacgacuauccuaaguacuccgaagaggccaaacugaauagagaagagauugauggugucaaacuugagagcaccaggaucuaucaaauucuggcuauauacucuacaguggcgucaaguuugguccucgugguuagccugggcgcaaucuccuuuuggaugugcucuaacgggucguuacagugccggauuuguaucuga

SEQ ID NO: 132214 - RNA, 1701 nt, Artificial Sequence; identical to SEQ ID NO: 131819
  derived and/or modified CDS sequence (opt3) from hemagglutinin__InfluenzaA__ADD21894

SEQ ID NO: 132215 - RNA, 1701 nt, Artificial Sequence
  derived and/or modified CDS sequence (opt3) from hemagglutinin__InfluenzaA__ADD22501
augaaggccauccuggugguccuccuuuacaccuucgcuacagcaaacgccgacacucugugcauuggcuaucacgcgaauaacagcacggauaccguugacacaguguuggagaaaaauguaacugugacccauuccgucaacuuacuggaagauaagcacaaugggaaacuauguaagcucagaggaguggcuccccugcaucuugguaaaugcaacauagccggcuggauccuggggaauccugagugugaaucuuugucaacagcaaguagcugguccuacauuguugagaccucuucgucagacaacggaacuugcuauccaggcgauuuuaucgacuacgaggagcucagggagcagcugagcaguguguccucuuucgaacgguuugagauuuucccgaagacaagcuccuggcccaaucacgauucaaacaagggugucaccgccgcuuguccucaugcaggggccaaaaguuuuuauaagaaucugaucuggcucgugaaaaagggaaacagcuacccaaaauuaucuaaguccuauauaaaugacaagggcaaagaaguacugguucuuuggggcauccaccaccccucaacgagcgcugaucaacagaguuuguaccagaacgccgacgcguacguguucgucgggacuucuaaguauuccaaaaaguuuaaaccugagauugcaauccgcccaaaggugcgagaucaggagggacguaugaauuacuauuggacccugguggaacccggugacaaaauuacauucgaggccacuggcaaccuagucguuccuagauacgcuuuugccauggaaaggaacgcagggagcggaaucauaauuucggauaccccagugcaugacugcaauacaaccugucaaacgccgaagggcgcuaucaacacuucucuccccuuccagaauauucacccuaucacaaucgguaagugcccaaaauauguaaaguccaccaaacugcggcuugccacugggcugcgcaacgugcccucaauucagaguagaggauuguuuggcgcgauagccggcuucaucgaagggggauggacagguauggucgacggcugguacggguaucaucaccagaaugaacaaggaagcggcuacgcagcugaucucaaguccacccagaacgccauugacgagaucacgaauaaagugaacucuguuauagagaagaugaauacccaguuuacagcuguggguaaggaauuuaaccaccuggagaaaaggauugaaaauuuaaacaagaaaaucgaugacggguuccuggauaucuggacuuacaaugccgagcuccuuguccuguuggaaaacgagcggacccuagacuaucaugauagcaaugugaagaaccuguacgagaaaguacgcauucagcucaagaacaaugcaaaggaaaucggcaacggauguuucgaguucuaucacaaaugcgacaauacauguauggaaucaguuaagaacggcacuuacgauuauccuaaauacagugaggaagccaagcugaaucgagaggagauugacggggugaaacuugaauccaccagaauauaucaaauccuggcuauuuacagcacagucgcgucuucauuggugcucgucgugagucugggagcaaucagcuuuuggaugugcuccaacgguucuuuacagugcaggaucuguauuuga

SEQ ID NO: 132216 - RNA, 1701 nt, Artificial Sequence; identical to SEQ ID NO: 131819
  derived and/or modified CDS sequence (opt3) from hemagglutinin__InfluenzaA__ADD22511

SEQ ID NO: 132217 - RNA, 1701 nt, Artificial Sequence
  derived and/or modified CDS sequence (opt3) from hemagglutinin__InfluenzaA__ADD22521
augaaggccauccuggugguccuccuuuacaccuucgcuacagcaaacgccgacacucugugcauuggcuaucacgcgaauaacagcacggauaccguugacacaguguuggagaagaauguaacugugacccauuccgucaacuuacuggaagauaagcacaaugggaaacuauguaagcucagaggaguggcuccccugcaucuugguaaaugcaacauagccggcuggauccuggggaauccugagugugaaucuuugucaacagcaaguagcugguccuacauuguugagaccucuucgucagacaacggaacuugcuauccaggcgauuuuaucgacuacgaggagcucagggagcagcugagcaguguguccucuuucgaacgguuugagauuuucccgaagacaagcuccuggcccaaucacgauucaaacaagggugucaccgccgcuuguccucaugcaggggccaaaaguuuuuauaagaaucugaucuggcucgugaaaaagggaaacagcuacccaaaauuaucuaaguccuauauaaaugacaagggcaaagaaguacugguucuuuggggcauccaccaccccucaacgagcgcugaucaacagaguuuguaccagaacgccgacacuuacguguucgucgggaccucucgcuauuccaagaaauuuaagccugagauugcgauccgaccaaaagugcgugaucaggagggaagaaugaauuacuauuggacacugguggaacccggugacaagauuacuuucgaggcaaccggcaaccuagucguuccuagguacgccuuugcuauggaacggaacgccgggagcggaaucauaauuucggauacaccagugcaugacugcaauaccacgugucaaacuccgaaaggcgcaaucaacacaucucuccccuuccagaauauucacccuaucaccaucgguaagugcccaaaguauguaaaauccacuaagcugcgccuugcuacagggcugagaaacgugcccucaauucagaguaggggauuguuuggcgccauagcgggcuucaucgaagggggauggaccgguauggucgacggcugguacggguaucaucaccagaaugaacaaggaagcggcuacgccgcagaucucaaauccacgcagaacgcuauugacgagaucaccaauaaggugaacucuguuauagagaaaaugaauacacaguuuacugccguggguaaggaguucaaccaccuggaaaagcggauugaaaauuuaaacaaaaagaucgaugacggguuccuggauaucuggaccuacaaugcugagcuccuuguccuguuggaaaacgagcgcacacuagacuaucaugauagcaaugugaaaaaccuguacgagaagguacgaucacagcucaaaaacaaugccaaggaaauuggcaacggauguuuugaguucuaucacaagugcgacaauacuuguauggaaaguguuaaaaacggcaccuacgauuauccuaaguacuccgaggaagcaaaacugaauagagaggagaucgacggggugaaacuugaaagcacaaggauuuaucaaauacuggccaucuacucuaccgucgcuucaaguuuggugcucgucgugagccugggagcgauuuccuuuuggaugugcucuaacgguucguuacagugccggaucuguaucuga

SEQ ID NO: 132218 - RNA, 1701 nt, Artificial Sequence; identical to SEQ ID NO: 130717
  derived and/or modified CDS sequence (opt3) from hemagglutinin__InfluenzaA__ADD22531

SEQ ID NO: 132219 - RNA, 1701 nt, Artificial Sequence
  derived and/or modified CDS sequence (opt3) from hemagglutinin__InfluenzaA__ADD22541
augaaggccauccuggugguccuccuuuacaccuucgcuacagcaaacgccgacacucugugcauuggcuaucacgcgaauaacagcacggauaccguugacacaguguuggagaaaaauguaacugugacccauuccgucaacuuacuggaagauaagcacaaugggaaacuauguaagcucagaggaguggcuccccugcaucuugguaaaugcaacauagccggcuggauccuggggaauccugagugugaaucuuugucaacagcaaguagcugguccuacauuguugagaccucuucgucaggaaacggcacuugcuauccaggugacuuuaucgauuacgaagaacucagggagcagcugagcaguguguccucuuucgaacgguuugagauuuucccgaagacaagcuccuggcccaaucacgacucaaacaagggggucaccgccgcuuguccucaugcaggagccaaaaguuuuuauaagaaucugaucuggcucgugaaaaagggcaacagcuacccaaaauuaucuaaguccuauauaaaugauaagggcaaagaaguacugguucuuugggggauccaccaccccucaacgagcgcugaccaacagaguuuguaccagaacgccgaugcguacguguucgucggaacuucuaaguauuccaaaaaguuuaaaccugagauugcaauccgcccaaaggugcgagaccaggagggucguaugaauuacuauuggacccugguggaacccggcgauaaaauuacauucgaggccacugggaaccuagucguuccuagauacgcuuuugccauggaaaggaacgcaggaagcggcaucauaauuucggacaccccagugcaugauugcaauacaaccugucaaacgccgaagggugcuaucaacacuucucuccccuuccagaauauucacccuaucacaaucgggaagugcccaaaauauguaaaguccaccaaacugcggcuugccacuggacugcgcaacgugcccucaauucagaguagaggcuuguuuggcgcgauagccggguucaucgagggagguuggacaggcauggucgacgggugguacggauaucaucaccagaaugaacaaggcagcgguuacgcagcugaccucaaguccacccagaacgccauugaugagaucacgaauaaagugaacucuguuauagagaagaugaauacccaguuuacagcuguggggaaggaguucaaccaccuggagaaaaggauugaaaauuuaaacaagaaagucgacgauggcuuccuggacaucuggacuuacaaugccgagcuccuugugcuguuggaaaacgagcggacccuagauuaucaugacagcaauguaaagaaccuguacgagaaaguucgcucacagcucaagaacaaugcaaaggaaaucggaaacggcuguuuugaguucuaucacaaaugcgauaauacauguauggaaagugugaagaacgggacuuacgacuauccuaaauacuccgaggaagccaagcugaaucgagaggagauugauggagucaaacuugaaagcaccagaaucuaucaaauucuggcuauauacucuacaguggcgucaaguuugguccucgugguuagccugggugcaaucuccuuuuggaugugcucuaacggcucguuacagugcaggauuuguaucuga

SEQ ID NO: 132220 - RNA, 1701 nt, Artificial Sequence; identical to SEQ ID NO: 131819
  derived and/or modified CDS sequence (opt3) from hemagglutinin__InfluenzaA__ADD22554

SEQ ID NO: 132221 - RNA, 1701 nt, Artificial Sequence; identical to SEQ ID NO: 131819
  derived and/or modified CDS sequence (opt3) from hemagglutinin__InfluenzaA__ADD22564

SEQ ID NO: 132222 - RNA, 1701 nt, Artificial Sequence
  derived and/or modified CDS sequence (opt3) from hemagglutinin__InfluenzaA__ADD22574
augaaggccauccuggugguccuccuuuacaccuucgcuacagcaaacgccgacacucugugcauuggcuaucacgcgaauaacagcacggauaccguugacacaguguuggagaaaaauguaacugugacccauuccgucaacuuacuggaagauaagcacaaugggaaacuauguaagcucagaggaguggcuccccugcaucuugguaaaugcaacauagccggcuggauccuggggaauccugagugugaaucuuugucaacagcaaguagcugguccuacauuguugagaccucuucgucagacaacggaacuugcuauccaggcgauuuuaucgacuacgaggagcucagggagcagcugagcaguguguccucuuucgaacgguuugagauuuucccgaagacaagcuccuggcccaaucacgauucaaacaagggugucaccgccgcuuguccucaugcaggggccaaaaguuuuuauaagaaucugaucuggcucgugaaaaagggaaacagcuacccaaaauuaucuaaguccuauauaaaugacaagggcaaagaaguacugguucuuuggggcauccaccaccccucaacgagcgcugaucaacagaguuuguaccagaacgccgacacuuacguguucgucgggaccucucgcuauuccaagaaauuuaagccugagauugcgauccgaccaaaagugcgugaucaggagggaagaaugaauuacuauuggacacugguggaacccggugacaagauuacuuucgaggcaaccggcaaccuagucguuccuagguacgccuuugcuauggaacggaacgccgggagcggaaucauaauuucggauacaccagugcaugacugcaauaccacgugucaaacucucaaaggcgcaaucaacacaucucugccguuccagaauauucaccccaucaccaucgguaagugcccuaaguauguaaaauccacuaaacuucgccuggcuacaggguugagaaacgugccaucaauucagaguaggggacucuuuggcgccauagcgggcuucaucgaagggggauggaccgguauggucgacggcugguacggguaucaucaccagaaugaacaaggaagcggcuacgccgcagaucugaaguccacgcagaacgcuauugacgagaucaccaauaaggugaacucuguuauagagaaaaugaauacacaguuuacugccguggguaaggaguucaaccacuuagaaaagcggauugaaaaucugaacaaaaagaucgaugacggguuccucgauaucuggaccuacaaugcugagcuucuggucuugcuagaaaacgagcgcacacuggacuaucaugauagcaaugugaaaaaccucuacgagaagguacgaucacagcugaaaaacaaugccaaggaaauuggcaacggauguuuugaguucuaucacaagugcgacaauacuuguauggaaaguguuaaaaacggcaccuacgauuaucccaaguacuccgaggaagcaaaacuuaauagagaggagaucgacggggugaagcuggaaagcacaaggauuuaucaaauauuggccaucuacucuaccgucgcuucaagucucgugcuggucgugagcuuaggagcgauuuccuuuuggaugugcucuaacgguucgcugcagugccggaucuguaucuga

SEQ ID NO: 132223 - RNA, 1701 nt, Artificial Sequence; identical to SEQ ID NO: 131819
  derived and/or modified CDS sequence (opt3) from hemagglutinin__InfluenzaA__ADD22584

SEQ ID NO: 132224 - RNA, 1701 nt, Artificial Sequence; identical to SEQ ID NO: 130717
  derived and/or modified CDS sequence (opt3) from hemagglutinin__InfluenzaA__ADD22594

SEQ ID NO: 132225 - RNA, 1701 nt, Artificial Sequence; identical to SEQ ID NO: 131819
  derived and/or modified CDS sequence (opt3) from hemagglutinin__InfluenzaA__ADD22604

SEQ ID NO: 132226 - RNA, 1701 nt, Artificial Sequence; identical to SEQ ID NO: 131819
  derived and/or modified CDS sequence (opt3) from hemagglutinin__InfluenzaA__ADD22614

SEQ ID NO: 132227 - RNA, 1701 nt, Artificial Sequence; identical to SEQ ID NO: 131819
  derived and/or modified CDS sequence (opt3) from hemagglutinin__InfluenzaA__ADD22624

SEQ ID NO: 132228 - RNA, 1701 nt, Artificial Sequence
  derived and/or modified CDS sequence (opt3) from hemagglutinin__InfluenzaA__ADD22634
augaaggccauccuggugguccuccuuugcaccuucgcuacagcaaacgccgacacucuguguauuggcuaccacgcgaauaacagcacggauaccguugacacaguguuggagaagaauguaacugugacccauuccgucaacuuacuggaagauaagcacaaugggaaacuaugcaagcucagaggaguggcuccccugcaucuugguaaauguaacauagccggcuggauccuggggaauccugagugcgaaucuuugucaacagcaaguagcugguccuauauuguugagaccucuucgucagacaacggaacuuguuacccaggcgauuuuaucgacuaugaggagcucagggagcagcugagcaguguguccucuuucgaacgguuugagauuuucccgaagacaagcuccuggcccaaucacgauucaaacaagggugucaccgccgcuugcccucaugcaggggccaaaaguuuuuacaagaaucugaucuggcucgugaaaaagggaaacagcuauccaaaauuaucuaaguccuacauaaaugacaagggcaaagaaguacugguucuuuggggcauccaccaccccucaacgagcgcugaucaacagaguuuguaucagaacgccgacgcguacguguucgucgggacuucucgcuacuccaagaaauuuaagccugagauugcaauccgaccaaaagugcgugaucaggagggaagaaugaauuauuacuggacccugguggaacccggugacaagauuacauucgaggccacuggcaaccuagucguuccuagguaugcuuuugccauggaacggaacgcagggagcggaaucauaauuucggauaccccagugcaugacuguaauacaaccugccaaacgccgaaaggcgcuaucaacacuucucuccccuuccagaauauucacccuaucacaaucgguaaguguccaaaguacguaaaauccaccaagcugcgccuugccacugggcugagaaacgugcccucaauucagaguaggggauuguuuggcgcgauagccggcuucaucgaagggggauggacagguauggucgacggcugguauggguaccaucaccagaaugaacaaggaagcggcuaugcagcugaucucaaauccacccagaacgccauugacgagaucacgaauaaggugaacucuguuauagagaaaaugaauacccaguuuacagcuguggguaaggaguucaaccaccuggaaaagcggauugaaaauuuaaacaaaaagaucgaugacggguuccuggauaucuggacuuacaaugccgagcuccuuguccuguuggaaaacgagcgcacccuagacuaccaugauagcaaugugaaaaaccuguaugagaagguacgaucacagcucaaaaacaaugcaaaggaaauuggcaacggaugcuuugaguucuaccacaagugugacaauacaugcauggaaaguguuaaaaacggcacuuaugauuacccuaaguauuccgaggaagccaaacugaauagagaggagaucgacggggugaaacuugaaagcaccaggauuuaccaaauacuggcuaucuauucuacagucgcgucaaguuuggugcucgucgugagccugggagcaauuuccuuuuggaugugcucuaacgguucguuacagugucggaucugcaucuga

SEQ ID NO: 132229 - RNA, 1701 nt, Artificial Sequence
  derived and/or modified CDS sequence (opt3) from hemagglutinin__InfluenzaA__ADD22645
augaaggccauccuggugguccuccuuuacaccuucgcuacagcaaacgccgacacucugugcauuggcuaucacgcgaauaacagcacggauaccguugacacaguguuggagaaaaauguaacugugacccauuccgucaacuuacuggaagauaagcacaaugggaaacuauguaagcucagaggaguggcuccccugcaucuugguaaaugcaacauagccggcuggauccuggggaauccugagugugaaucuuugucaacagcaaguagcugguccuacauuguugagaccucuucgucaggaaacggcacuugcuauccaggugacuuuaucgauuacgaagaacucagggagcagcugagcaguguguccucuuucgaacgguuugagauuuucccgaagacaagcuccuggcccaaucacgacucaaacaagggggucaccgccgcuuguccucaugcaggagccaaaaguuuuuauaagaaucugaucuggcucgugaaaaagggcaacagcuacccaaaauuaucuaaguccuauauaaaugauaagggcaaagaaguacugguucuuugggggauccaccaccccucaacgagcgcugaccaacagaguuuguaccagaacgccgaugcguacguguucgucggaacuucucgcuauuccaagaaauuuaagccugagauugcaauccgaccaaaagugcgugaccaggaggguagaaugaauuacuauuggacccugguggaacccggcgauaagauuacauucgaggccacugggaaccuagucguuccuagguacgcuuuugccauggaacggaacgcaggaagcggcaucauaauuucggacaccccagugcaugauugcaauacaaccugucaaacgccgaaaggugcuaucaacacuucucuccccuuccagaauauucacccuaucacaaucgggaagugcccaaaguauguaaaauccaccaagcugcgccuugccacuggacugagaaacgugcccucaauucagaguaggggcuuguuuggcgcgauagccggguucaucgagggagguuggacaggcauggucgacgggugguacggauaucaucaccagaaugaacaaggcagcgguuacgcagcugaccucaaauccacccagaacgccauugaugagaucacgaauaaggugaacucuguuauagagaaaaugaauacccaguuuacagcuguggggaaggaguucaaccaccuggagaagcggauugaaaauuuaaacaaaaaggucgacgauggcuuccuggacaucuggacuuacaaugccgagcuccuugugcuguuggaaaacgagcgcacccuagauuaucaugacagcaauguaaagaaccuguacgagaagguucgaucacagcucaaaaacaaugcaaaggaaaucggaaacggcuguuuugaguucuaucacaagugcgauaauacauguauggaaagugugaaaaacgggacuuacgacuauccuaaguacuccgaggaagccaaacugaauagagaggagauugaaggagucaaacuugagagcaccaggaucuaucaaauucuggcuauauacucuacaguggcgucaaguuugguccucgugguuagccugggugcaaucuccuuuuggaugugcucuaacggcucguuacagugccggauuuguaucuga

SEQ ID NO: 132230 - RNA, 1701 nt, Artificial Sequence
  derived and/or modified CDS sequence (opt3) from hemagglutinin__InfluenzaA__ADD22665
augaaggccauccuggugguccuccuuuacaccuucgcuacagcaaacgccgacacucugugcauuggcuaucacgcgaauaacagcacggauaccguugacacaguguuggagaaaaauguaacugugacccauuccgucaacuuacuggaagauaagcacaaugggaaacuauguaagcucagaggaguggcuccccugcaucuugguaaaugcaacauagccggcuggauccuggggaauccugagugugaaucuuugucaacagcaaguagcugguccuacauuguugagaccucuucgucaggaaacggcacuugcuauccaggugacuuuaucgauuacgaggagcucagggagcagcugagcaguguguccucuuucgaacgguuugagauuuucccgaagacaagcuccuggcccaaucacgacucaaacaagggggucaccgccgcuuguccucaugcaggagccaaaaguuuuuauaagaaucugaucuggcucgugaaaaagggcaacagcuacccaaaauuaucuaaguccuauauaaaugauaagcgcaaagaaguacugguucuuuggggcauccaccaccccucaacgagcgcugaccaacagaguuuguaccagaacgccgaugcguacguguucgucgggacuucuaaguauuccaaaaaguuuaaaccugagauugcaauccgaccaaaggugcgugaccaggagggaagaaugaauuacuauuggacccugguggaacccggugauaaaauuacauucgaggccacuggcaaccuagucguuccuagguacgcuuuugccauggaacggaacgcagggagcggaaucauaauuucggacaccccagugcaugauugcaauacaaccugucaaacgccgaagggcgcuaucaacacuucucuccccuuccagaauauucacccuaucacaaucgguaagugcccaaaauauguaaaguccaccaaacugcgccuugccacugggcugagaaacgugcccucaauucagaguaggggauuguuuggcgcgauagccggcuucaucgaagggggauggacagguauggucgacggcugguacggguaucaucaccagaaugaacaaggaagcggcuacgcagcugaccucaaguccacccagaacgccauugaugagaucacgaauaaagugaacucuguuauagagaagaugaauacccaguuuacagcuguggguaaggaguucaaccaccuggaaaaacggauugaaaauuuaaacaagaaagucgacgauggguuccuggacaucuggacuuacaaugccgagcuccuugugcuguuggaaaacgagcgcacccuagauuaucaugacagcaauguaaagaaccuguacgagaaaguucgaucacagcucaagaacaaugcaaaggaaaucggcaacggauguuuugaguucuaucacaaaugcgauaauacauguauggaaagugugaagaacggcacuuacgacuauccuaaauacuccgaggaagccaagcugaauagagaggagauugauggggucaaacuugaaagcaccaggaucuaucaaauucuggcuauauacucuacaguggcgucaaguuugguccucgugguuagccugggagcaaucuccuuuuggaugugcucuaacgguucguuacagugccggauuuguaucuga

SEQ ID NO: 132231 - RNA, 1701 nt, Artificial Sequence; identical to SEQ ID NO: 131819
  derived and/or modified CDS sequence (opt3) from hemagglutinin__InfluenzaA__ADD22675

SEQ ID NO: 132232 - RNA, 1701 nt, Artificial Sequence; identical to SEQ ID NO: 131819
  derived and/or modified CDS sequence (opt3) from hemagglutinin__InfluenzaA__ADD22685

SEQ ID NO: 132233 - RNA, 1701 nt, Artificial Sequence; identical to SEQ ID NO: 131819
  derived and/or modified CDS sequence (opt3) from hemagglutinin__InfluenzaA__ADD22695

SEQ ID NO: 132234 - RNA, 1701 nt, Artificial Sequence
  derived and/or modified CDS sequence (opt3) from hemagglutinin__InfluenzaA__ADD22722
augaaggccauccuggugguccuccuuuacaccuucgcuacagcaaacgccgacacucugugcauuggcuaucacgcgaauaacagcacggauaccguugacacaguguuggagaaaaauguaacugugacccauuccgucaacuuacuggaagauagacacaaugggaagcuauguaaacucaggggaguggcuccccugcaucuugguaagugcaacauagccggcuggauccuggggaauccugagugugaaucuuugucaacagcaaguagcugguccuacauuguugagaccucuucgucaggaaacggcacuugcuauccaggugacuuuaucgauuacgaagaacuccgggagcagcugagcaguguguccucuuucgaacgcuuugagauuuucccgaaaacaagcuccuggcccaaucacgacucaaacaagggggucaccgccgcuuguccucaugcaggagccaagaguuuuuauaaaaaucugaucuggcucgugaagaaaggcaacagcuacccaaaguuaucuaaauccuauauaaaugauaagggcaaggaaguacugguucuuugggggauccaccaccccucaacgagcgcugaccaacagaguuuguaccagaacgccgaugcguacguguucgucggaacuucuuccuauagcaaaaaguuuaaaccugagauugcaauccgaccaaaggugcgugaccaggaggguagaaugaauuacuauuggacccugguggaacccggcgauaaaauuacauucgaggccacugggaaccuagucguuccuagguacgcuuuugccauggaacggaacgcaggaucgggcaucauaauuucugacaccccagugcaugauugcaauacaaccugucaaacgccgaagggugcuaucaacacuucccuccccuuccagaauauucacccuaucacaaucgggaaaugcccaaaguauguaaagucaaccaaacugcgccuugccacuggacugagaaacgugcccaguauucagagcaggggcuuguuuggcgcgauagccggguucaucgagggagguuggacaggcauggucgacgggugguacggauaucaucaccagaaugaacaaggcuccgguuacgcagcugaccucaagucuacccagaacgccauugaugagaucacgaauaaagugaacagcguuauagagaagaugaauacccaguuuacagcuguggggaaagaguucaaccaccuggagaagcggauugaaaauuuaaacaagaaagucgacgauggcuuccuggacaucuggacuuacaaugccgagcuccuugugcuguuggaaaacgagcgcacccuagauuaucaugacucaaauguaaagaaccuguacgagaaaguucgaagucagcucaagaacaaugcaaaagaaaucggaaacggcuguuuugaguucuaucacaagugcgauaauacauguauggaauccgugaagaacgggacuuacgacuauccuaaauacagcgaggaagccaagcugaauagagaggagauugauggagucaaacuugaaucuaccaggaucuaucaaauucuggcuauauacucaacaguggcgaguagcuugguccucgugguuucccugggugcaaucucuuuuuggaugugcucgaacggcagcuuacagugccggauuuguaucuga

SEQ ID NO: 132235 - RNA, 1701 nt, Artificial Sequence; identical to SEQ ID NO: 132217
  derived and/or modified CDS sequence (opt3) from hemagglutinin__InfluenzaA__ADD22732

SEQ ID NO: 132236 - RNA, 1701 nt, Artificial Sequence
  derived and/or modified CDS sequence (opt3) from hemagglutinin__InfluenzaA__ADD22742
augaaggccauccuggugguccuccuuuacaccuucgcuacagcaaacgccgacacucugugcauuggcuaucacgcgaauaacagcacggauaccguugacacaguguuggagaaaaauguaacugugacccauuccgucaacuuacuggaagauaagcacaaugggaaacuauguaagcucagaggaguggcuccccugcaucuugguaaaugcaacauagccggcuggauccuggggaauccugagugugaaucuuugucaacagcaaguagcugguccuacauuguugagaccucuucgucaggaaacggcacuugcuauccaggugacuuuaucgauuacgaagaacucagggagcagcugagcaguguguccucuuucgaacgguuugagauuuucccgaagacaagcuccuggcccaaucacgacucaaacaagggggucaccgccgcuuguccucaugcaggagccaaaaguuuuuauaagaaucugaucuggcucgugaaaaagggcaacagcuacccaaaauuaucuaaguccuauauaaaugauaagggcaaagaaguacugguucuuugggggauccaccaccccucaacgagcgcugaccaacagaguuuguaccagaacgccgaugcguacguguucgucggaacuucuuccuauagcaagaaauuuaagccugagauugcaauccgcccaaaagugcgagaccaggagggucguaugaauuacuauuggacccugguggaacccggcgauaagauuacauucgaggccacugggaaccuagucguuccuagauacgcuuuugccauggaaaggaacgcaggaucgggcaucauaauuucugacaccccagugcaugauugcaauacaaccugucaaacgccgaaaggugcuaucaacacuucccuccccuuccagaauauucacccuaucacaaucgggaagugcccaaaguauguaaaaucaaccaagcugcggcuugccacuggacugcgcaacgugcccaguauucagagcagaggcuuguuuggcgcgauagccggguucaucgagggagguuggacaggcauggucgacgggugguacggauaucaucaccagaaugaacaaggcuccgguuacgcagcugaccucaaaucuacccagaacgccauugaugagaucacgaauaaggugaacagcguuauagagaaaaugaauacccaguuuacagcuguggggaaggaguucaaccaccuggagaagaggauugaaaauuuaaacaaaaaggucgacgauggcuuccuggacaucuggacuuacaaugccgagcuccuugugcuguuggaaaacgagcggacccuagauuaucaugacucaaauguaaagaaccuguacgagaagguucgcagucagcucaaaaacaaugcaaaggaaaucggaaacggcuguuuugaguucuaucacaagugcgauaauacauguauggaauccgugaaaaacgggacuuacgacuauccuaaguacagcgaggaagccaaacugaaucgagaggagauugauggagucaaacuugaaucuaccagaaucuaucaaauucuggcuauauacucaacaguggcgaguagcuugguccucgugguuucccugggugcaaucucuuuuuggaugugcucgaacggcagcuuacagugcaggauuuguaucuga

SEQ ID NO: 132237 - RNA, 1701 nt, Artificial Sequence; identical to SEQ ID NO: 130717
  derived and/or modified CDS sequence (opt3) from hemagglutinin__InfluenzaA__ADD22752

SEQ ID NO: 132238 - RNA, 1701 nt, Artificial Sequence; identical to SEQ ID NO: 130808
  derived and/or modified CDS sequence (opt3) from hemagglutinin__InfluenzaA__ADD22762

SEQ ID NO: 132239 - RNA, 1701 nt, Artificial Sequence; identical to SEQ ID NO: 131819
  derived and/or modified CDS sequence (opt3) from hemagglutinin__InfluenzaA__ADD22772

SEQ ID NO: 132240 - RNA, 1701 nt, Artificial Sequence; identical to SEQ ID NO: 131819
  derived and/or modified CDS sequence (opt3) from hemagglutinin__InfluenzaA__ADD22782

SEQ ID NO: 132241 - RNA, 1701 nt, Artificial Sequence
  derived and/or modified CDS sequence (opt3) from hemagglutinin__InfluenzaA__ADD22792
augaaggccauccuggugguccuccuuuacaccuucgcuacagcaaacgccgacacucugugcauuggcuaucacgcgaauaacagcacggauaccguugacacaguguuggagaagaauguaacugugacccauuccgucaacuuacuggaagauaagcacaaugggaaacuauguaagcucagaggaguggcuccccugcaucuugguaaaugcaacauagccggcuggauccuggggaauccugagugugaaucuuugucaacagcaaguagcugguccuacauuguugagaccucuucgucaggaaacggcacuugcuauccaggugacuuuaucaauuacgaagaacucagggagcagcugagcaguguguccucuuucgaacgguuugagauuuucccgaagacaagcuccuggcccaaccacgauucaaauaagggggucaccgccgcuuguccucaugcaggagccaaaaguuuuuauaagaaccugaucuggcucgugaaaaagggcaauagcuacccaaaauuaucuaaguccuauauaaacgacaagggcaaagaaguacugguucuuugggggauccaccaccccucaacgagcgcugaucaacagaguuuguaccagaaugccgacgcguacguguucgucggaacuucucgcuauuccaagaaauuuaagccugagauugcaauccgaccaaaagugcgugaucaggaggguagaaugaacuacuauuggacccugguggaacccggcgacaagauuacauucgaggccacugggaaccuagucguuccuagguacgcuuuugccauggaacggaaugcaggaagcggcaucauaauuucggauaccccagugcaugacugcaacacaaccugucaaacgccgaaaggugcuaucaauacuucucuccccuuccagaacauucacccuaucacaaucgggaagugcccaaaguauguaaaauccaccaagcugcgccuugccacuggacugagaaaugugcccucaauucagaguaggggcuuguuuggcgcgauagccggguucaucgagggagguuggacaggcauggucgaugggugguacggauaucaucaccagaacgaacaaggcagcgguuacgcagcugaccucaaauccacccagaaugccauugacgagaucacgaacaagguaaauucuguuauagagaaaaugaacacccaguuuacagcuguggggaaggaguucaaucaccuggagaagcggauugaaaacuuaaauaaaaaggucgaugacggcuuccuggauaucuggacuuacaacgccgagcuccuugugcuguuggaaaaugagcgcacccuagacuaucaugauagcaacgugaaaaaccuguacgagaagguucgaucacagcucaaaaauaacgcaaaggaaaucggaaauggcuguuuugaguucuaucacaagugcgacaacacauguauggaaagugugaaaaaugggacuuacgauuauccuaaguacuccgaggaagccaaacugaacagagaggagauugacggagucaaacuugaaagcaccaggaucuaucaaauucuggcuauauacucuacaguggcgucaaguuugguccucgugguuagccugggugcaaucuccuuuuggaugugcucuaauggcucguuacagugccggauuuguaucuga

SEQ ID NO: 132242 - RNA, 1701 nt, Artificial Sequence; identical to SEQ ID NO: 132217
  derived and/or modified CDS sequence (opt3) from hemagglutinin__InfluenzaA__ADD22802

SEQ ID NO: 132243 - RNA, 1701 nt, Artificial Sequence; identical to SEQ ID NO: 131819
  derived and/or modified CDS sequence (opt3) from hemagglutinin__InfluenzaA__ADD22812

SEQ ID NO: 132244 - RNA, 1701 nt, Artificial Sequence
  derived and/or modified CDS sequence (opt3) from hemagglutinin__InfluenzaA__ADD22822
augaaggccauccuggugguccuccuuuacaccuucgcuacagcaaacgccgacacucugugcauuggcuaucacgcgaauaacagcacggauaccguugacacaguguuggagaaaaauguaacugugacccauuccgucaacuuacuggaagauaagcacaaugggaaacuauguaagcucagaggaguggcuccccugcaucuugguaaaugcaacauagccggcuggauccuggggaauccugagugugaaucuuugucaacagcaaguagcugguccuacauuguugagaccucuucggccgacaacggaacuugcuauccaggcgauuuuaucgacuacgaggagcucagggagcagcugucaagcgugaguuccuucgaacgguuugagauuuucccgaagacaucuagcuggcccaaucacgauuccaacaagggugucaccgcugcauguccucaugccggggcuaaaucauuuuauaagaaucugaucuggcucgugaaaaagggaaacaguuacccaaaauuaagcaagucuuauauaaaugacaagggcaaagaaguacugguucuuuggggcauccaccaccccuccacgucagccgaucaacagagcuuguaccagaacgcggacgcauacguguucgucgggaccaguaaguauucuaaaaaguuuaaaccugagauugccauccgcccaaaggugcgagaucaggagggacguaugaauuacuauuggacucugguggaacccggugacaaaauuacauucgaggcuacuggcaaccuagucguuccuagauacgccuuugcaauggaaaggaacgcuggguccggaaucauaauuagcgauaccccagugcaugacugcaauacaaccugucaaacgccgaagggcgccaucaacacuucgcuccccuuccagaauauucacccuaucacaaucgguaagugcccaaaauauguaaagucuaccaaacugcggcuugcgacugggcugcgcaacgugcccuccauucagucaagaggauuguuuggcgccauagcaggcuucaucgaagggggauggacagguauggucgacggcugguacggguaucaucaccagaaugaacaaggaaguggcuacgcugccgaucucaagagcacccagaacgcuauugacgagaucacgaauaaagugaacuccguuauagagaagaugaauacccaguuuacagccguggguaaggaauuuaaccaccuggagaaaaggauugaaaauuuaaacaagaaaaucgaugacggguuccuggauaucuggacuuacaaugcagagcuccuuguccuguuggaaaacgagcggacccuagacuaucaugauucuaaugugaagaaccuguacgagaaaguacgcagccagcucaagaacaaugccaaggaaauuggcaacggauguuucgaguucuaucacaaaugcgacaauauguguauggaaucaguuaagaacggcacauacgauuauccuaaauacagugaggaagcuaagcugaaucgagaggagaucgacggggugaaacuugaauccacuagaauuuaucaaauacuggcgaucuacagcaccgucgcaucuucauuggugcucgucgugagucugggagccauuagcuuuuggaugugcuccaacgguucuuuacagugcaggaucuguaucuga

SEQ ID NO: 132245 - RNA, 1701 nt, Artificial Sequence; identical to SEQ ID NO: 131819
  derived and/or modified CDS sequence (opt3) from hemagglutinin__InfluenzaA__ADD22832

SEQ ID NO: 132246 - RNA, 1701 nt, Artificial Sequence; identical to SEQ ID NO: 131819
  derived and/or modified CDS sequence (opt3) from hemagglutinin__InfluenzaA__ADD22842

SEQ ID NO: 132247 - RNA, 1701 nt, Artificial Sequence
  derived and/or modified CDS sequence (opt3) from hemagglutinin__InfluenzaA__ADD22852
augaaggccauccuggugguccuccuuuacaccuucgcuacagcaaacgccgacacucugugcauuggcuaucacgcgaauaacagcacggauaccguugacacaguguuggagaagaauguaacugugacccauuccgucaacuuacuggaagauaagcacaaugggaaacuauguaagcucagaggaguggcuccccugcaucuugguaaaugcaacauagccggcuggauccuggggaauccugagugugaaucuuugucaacagcaaguagcugguccuacauuguugagaccucuucgucagacaacggaacuugcuauccaggcgauuuuaucgacuacgaggagcucagggagcagcugagcaguguguccucuuucgaacgguuugagauuuucccgaagacaagcuccuggcccaaucacgauucaaacaagggugucaccgccgcuuguccucaugcaggggccaaaaguuuuuauaagaaucugaucuggcucgugaaaaagggaaacagcuacccaaaauuaucuaaguccuauauaaaugacaagggcaaagaaguacugguucuuuggggcauccaccaccccucaacgagcgcugaucaacagaguuuguaccagaacgccgacgcguacguguucgucgggacuucucgcuauuccaagaaauuuaagccugagauugcaauccgaccaaaagugcgugaucaggagggaagaaugaauuacuauuggacccugguggaacccggugacaagauuacauucgaggccacuggcaaccuagucguuccuagguacgcuuuugccauggaacggaacgcagggagcggaaucgugauaucggauaccccaguacaugacugcaauacaaccugucaaacgccgaaaggcgcuauuaacacuucucuccccuuccagaauauccacccuauuacaaucgguaagugcccaaaguaugugaaauccaccaagcugcgccuugccacugggcugagaaacguccccucaauccagaguaggggauuguuuggcgcgauugccggcuucauagaagggggauggacagguaugguggacggcugguacggguaucaucaccagaaugaacaaggaagcggcuacgcagcugaucucaaauccacccagaacgccaucgacgagauuacgaauaagguuaacucugugaucgagaaaaugaauacccaguuuacagcugucgguaaggaguucaaccaccuggaaaagcggauagaaaauuuaaacaaaaagguggaugacggguuccuggauauuuggacuuacaaugccgagcuccuuguacuguuggaaaacgagcgcacccuagacuaucaugauagcaauguuaaaaaccuguacgagaaggugcgaucacagcucaaaaacaaugcaaaggaaaucggcaacggauguuuugaguucuaucacaagugcgacaauacauguauggaaagugucaaaaacggcacuuacgauuauccuaaguacuccgaggaagccaaacugaauagagaggagaucgacggggugaaacuugaaagcaccaggauuuaucaaauccuggcuauuuacucuacagucgcgucaaguuuggugcucguugugagccugggagcaauauccuuuuggaugugcucuaacgguucguuacagugccggaucuguauuuga

SEQ ID NO: 132248 - RNA, 1701 nt, Artificial Sequence
  derived and/or modified CDS sequence (opt3) from hemagglutinin__InfluenzaA__ADD22941
augaaggccauccuggugguccuccuuuacaccuucgcuacagcaaacgccgacacucugugcauuggcuaucacgcgaauaacagcacggauaccguugacacaguguuggagaaaaauguaacugugacccauuccgucaacuuacuggaagauaagcacaaugggaaacuauguaagcucagaggaguggcuccccugcaucuugguaaaugcaacauagccggcuggauccuggggaauccugagugugaaucuuugucaacagcaauuaguuggagcuacaucguugagaccuccucuucgggaaacggcacuugcuauccaggugacuuuauugauuacgaagaacucagggagcagcugucaagcgugaguuccuucgaacgguuugagaucuucccgaagacaucuagcuggcccaaucacgacuccaacaagggggucaccgccgcuuguccucaugcaggagccaaaucauuuuauaagaaucugauauggcucgugaaaaagggcaacaguuacccaaaauuaagcaagucuuauaucaaugauaagggcaaagaaguacugguucuuugggggauucaccaccccuccacgucagcugaccaacagagcuuguaccagaacgccgaugcguacguguucgucggaaccagucgcuauucuaagaaauuuaagccugagaucgcaauucgaccaaaagugcgugaccaggaggguagaaugaauuacuauuggacucugguggaacccggcgauaagaucacauucgaggccacugggaaccuagucguuccuagguacgcuuuugccauggaacggaacgcaggauccggcauaauuaucagcgacaccccagugcaugauugcaauacaaccugucaaacgccgaaaggugcuauuaacacuucgcuccccuuccagaauauccacccuaucacaauugggaagugcccaaaguauguaaaaucuaccaagcugcgccuugccacuggacugagaaacgugcccuccauacagucaaggggcuuguuuggcgcgaucgccggguucauugagggagguuggacaggcauggucgacgggugguacggauaucaucaccagaaugaacaaggcagugguuacgcagcugaccucaaaagcacccagaacgccaucgaugagauaacgaauaaggugaacuccguuauugagaaaaugaauacccaguuuacagcuguggggaaggaguucaaccaccuggagaagcggaucgaaaauuuaaacaaaaaggucgacgauggcuuccuggacaucuggacuuacaaugccgagcuccuugugcuguuggaaaacgagcgcacccuagauuaucaugacucuaauguaaagaaccuguacgagaagguucgaagccagcucaaaaacaaugcaaaggaaauuggaaacggcuguuuugaguucuaucacaagugcgauaauacauguauggaaucagugaaaaacgggacuuacgacuauccuaaguacagugaggaagccaaacugaauagagaggagaucgauggagucaaacuugaauccaccaggauuuaucaaauacuggcuaucuacagcacaguggcgucuucauugguccucgugguuagucugggugcaauuagcuuuuggaugugcuccaacggcucuuuacagugccggaucuguaucuga

SEQ ID NO: 132249 - RNA, 1701 nt, Artificial Sequence; identical to SEQ ID NO: 131819
  derived and/or modified CDS sequence (opt3) from hemagglutinin__InfluenzaA__ADD22951

SEQ ID NO: 132250 - RNA, 1701 nt, Artificial Sequence; identical to SEQ ID NO: 131819
  derived and/or modified CDS sequence (opt3) from hemagglutinin__InfluenzaA__ADD22961

SEQ ID NO: 132251 - RNA, 1701 nt, Artificial Sequence; identical to SEQ ID NO: 131819
  derived and/or modified CDS sequence (opt3) from hemagglutinin__InfluenzaA__ADD22971

SEQ ID NO: 132252 - RNA, 1701 nt, Artificial Sequence; identical to SEQ ID NO: 131819
  derived and/or modified CDS sequence (opt3) from hemagglutinin__InfluenzaA__ADD23072

SEQ ID NO: 132253 - RNA, 1701 nt, Artificial Sequence
  derived and/or modified CDS sequence (opt3) from hemagglutinin__InfluenzaA__ADD23082
augaaggccauccuggugguccuccuuuacaccuucgcuacagcaaacgccgacacucugugcauuggcuaucacgcgaauaacagcacggauaccguugacacaguguuggagaaaaauguaacugugacccauuccgucaacuuacuggaagauaagcacaaugggaaacuauguaagcucagaggaguggcuccccugcaucuugguaaaugcaacauagccggcuggauccuggggaauccugagugugaaucuuugucaacagcaaguagcugguccuacauuguugagaccucuucgucaggaaacggcacuugcuauccaggugacuuuaucgauuacgaagaacucagggagcagcugagcaguguguccucuuucgaacgguuugagauuuucccgaagacaagcuccuggcccaaucacgacucaaacaagggggucaccgccgcuuguccucaugcaggagccaaaaguuuuuauaagaaucugaucuggcucgugaaaaagggcaacagcuacccaaaauuaucuaaguccuauauaaaugauaagggcaaagaaguacugguucuuugggggauccaccaccccucaacgagcgcugaccaacagaguuuguaccagaacgccgauacuuacguguucgucggaaccucucgcuauuccaagaaauuuaagccugagauugcgauccgaccaaaagugcgugaccaggaggguagaaugaauuacuauuggacacugguggaacccggcgauaagauuacuuucgaggcaaccgggaaccuagucguuccuagguacgccuuugcuauggaacggaacgccggaagcggcaucauaauuucggacacaccagugcaugauugcaauaccacgugucaaacuccgaaaggugcaaucaacacaucucuccccuuccagaauauucacccuaucaccaucgggaagugcccaaaguauguaaaauccacuaagcugcgccuugcuacaggacugagaaacgugcccucaauucagaguaggggcuuguuuggcgccauagcgggguucaucgagggagguuggaccggcauggucgacgggugguacggauaucaucaccagaaugaacaaggcagcgguuacgccgcagaccucaaauccacgcagaacgcuauugaugagaucaccaauaaggugaacucuguuauagagaaaaugaauacacaguuuacugccguggggaaggaguucaaccaccuggagaagcggauugaaaauuuaaacaaaaaggucgacgauggcuuccuggacaucuggaccuacaaugcugagcuccuugugcuguuggaaaacgagcgcacacuagauuaucaugacagcaauguaaagaaccuguacgagaagguucgaucacagcucaaaaacaaugccaaggaaaucggaaacggcuguuuugaguucuaucacaagugcgauaauacuuguauggaaagugugaaaaacgggaccuacgacuauccuaaguacuccgaggaagcaaaacugaauagagaggagauugauggagucaaacuugaaagcacaaggaucuaucaaauucuggccauauacucuaccguggcuucaaguuugguccucgugguuagccugggugcgaucuccuuuuggaugugcucuaacggcucguuacagugccggauuuguaucuga

SEQ ID NO: 132254 - RNA, 1701 nt, Artificial Sequence
  derived and/or modified CDS sequence (opt3) from hemagglutinin__InfluenzaA__ADD23102
augaaggccauccuggugguccuccuuuacaccuucgcuacagcaaacgccgacacucugugcauuggcuaucacgcgaauaacagcacggauaccguugacacaguguuggagaaaaauguaacugugacccauuccgucaacuuacuggaagauaagcacaaugggaaacuauguaagcucagaggaguggcuccccugcaucuugguaaaugcaacauagccggcuggauccuggggaauccugagugugaaucuuugucaacagcaaguagcugguccuacauuguugagaccucuucgucaggaaacggcacuugcuauccaggugacuuuaucgauuacgaagaacucagggagcagcugagcaguguguccucuuucgaaaaguuugagauuuucccgaagacaagcuccuggcccaaucacgacucaaacaaaggggucaccgccgcuuguccucaugcaggagccaagaguuuuuauaaaaaucugaucuggcucgugaagaaaggcaacagcuacccaaaguuaucuaaguccuauauaaaugauaaaggcaaggaaguacugguucuuugggggauccaccaccccucaacgagcgcugaccaacagaguuuguaccagaacgccgaugcguacguguucgucggaacuucucgguauuccaaaaaguuuaaaccugagauugcaauccgcccaaaggugcgagaccaggagggucguaugaauuacuauuggacccugguggaacccggcgauaaaauuacauucgaggccacugggaaccuagucguuccuagauacgcuuuugccauggaaaggaacgcaggaagcggcaucauaauuucggacaccccagugcaugauugcaauacaaccugucaaacgccgaagggugcuaucaacacuucucuccccuuccagaauauucacccuaucacaaucgggaagugcccaaaauauguaaaguccaccaaacugcggcuugccacuggacugcgcaacgugcccucaauucagaguagaggcuuguuuggcgcgauagccggguucaucgagggagguuggacaggcauggucgacgggugguacggauaucaucaccagaaugaacaaggcagcgguuacgcagcugaccucaaguccacccagaacgccauugaugagaucacgaauaaagugaacucuguuauagagaagaugaauacccaguuuacagcuguggggaaggaguucaaccaccuggagaaaaggauugaaaauuuaaacaagaaagucgacgauggcuuccuggacaucuggacuuacaaugccgagcuccuugugcuguuggaaaacgagcggacccuagauuaucaugacagcaauguaaagaaccuguacgagaaaguucgcucacagcucaagaacaaugcaaaggaaaucggaaacggcuguuuugaguucuaucacaaaugcgauaauacauguauggaaagugugaagaacgggacuuacgacuauccuaaauacuccgaggaagccaagcugaaucgagaggagauugauggagucaaacuugaaagcaccagaaucuaucaaauucuggcuauauacucuacaguggcgucaaguuugguccucgugguuagccugggugcaaucuccuuuuggaugugcucuaacggcucguuacagugcaggauuuguaucuga

SEQ ID NO: 132255 - RNA, 1701 nt, Artificial Sequence; identical to SEQ ID NO: 131819
  derived and/or modified CDS sequence (opt3) from hemagglutinin__InfluenzaA__ADD23112

SEQ ID NO: 132256 - RNA, 1701 nt, Artificial Sequence; identical to SEQ ID NO: 131819
  derived and/or modified CDS sequence (opt3) from hemagglutinin__InfluenzaA__ADD23122

SEQ ID NO: 132257 - RNA, 1701 nt, Artificial Sequence; identical to SEQ ID NO: 130717
  derived and/or modified CDS sequence (opt3) from hemagglutinin__InfluenzaA__ADD23132

SEQ ID NO: 132258 - RNA, 1701 nt, Artificial Sequence; identical to SEQ ID NO: 131881
  derived and/or modified CDS sequence (opt3) from hemagglutinin__InfluenzaA__ADD23142

SEQ ID NO: 132259 - RNA, 1701 nt, Artificial Sequence
  derived and/or modified CDS sequence (opt3) from hemagglutinin__InfluenzaA__ADD23162
augaaggccauccuggugguccuccuuuacaccuucgcuacagcaaacgccgacacucugugcauuggcuaucacgcgaauaacagcacggauaccguugacacaguguuggagaaaaauguaacugugacccauuccgucaacuuacuggaagauaagcacaaugggaaacuauguaagcucagaggaguggcuccccugcaucuugguaaaugcaacauagccggcuggauccuggggaauccugagugugaaucuuugucaacagcaaguagcugguccuacauuguugagaccucuucgucagacaacggaacuugcuauccaggcgauuuuaucgacuacgaagaacucagggagcagcugagcaguguguccucuuucgaacgguuugagauuuucccgaagacaagcuccuggcccaaucacgauucaaacaagggugucaccgccgcuuguccucaugcaggggccaaaaguuuuuauaagaaucugaucuggcucgugaaaaagggaaacagcuacccaaaauuaucuaaguccuauauaaaugacaagggcaaagaaguacugguucuuuggggcauccaccaccccucaacgagcgcugaucaacagggguuguaccagaacgccgacgcguacguguucgucggaaccagucgcuauucuaagaaauuuaagccugagauugcaauccgaccaaaagugcgugaucaggaggguagaaugaauuacuauuggacucugguggaacccggcgacaagauuacauucgaggccacugggaaccuagucguuccuagguacgcuuuugccauggaacggaacgcaggauccggcaucauaauuagcgauaccccagugcaugacugcaauacaaccugucaaacgccgaaaggugcuaucaacacuucgcuccccuuccagaauauucacccuaucacaaucgggaagugcccaaaguauguaaaaucuaccaagcugcgccuugccacuggacugagaaacgugcccuccauucagucaaggggcuuguuuggcgcgauagccggguucaucgagggagguuggacaggcauggucgacgggugguacggauaucaucaccagaaugaacaaggcagugguuacgcagcugaucucaaaagcacccagaacgccauugacaagaucacgaauaaagugaacuccguuauagagaagaugaauacccaguuuacagcuguggggaaggaguucaaccaccuggaaaaacggauugagaauuuaaacaagaaagucgaugacggcuuccuggauaucuggacuuacaaugccgaacuccuugugcuguuggagaacgaacgcacccuagacuaucaugauucuaauguaaagaaccuguacgagaaaguucgaagccagcucaagaacaaugcaaaggagaucggaaacggcuguuuugaguucuaucacaaaugcgacaauacauguauggagucagugaagaacgggacuuacgauuauccuaaauacagugaagaggccaagcugaauagagaagagauugacggagucaaacuugaguccaccaggaucuaucaaauucuggcuauauacagcacaguggcgucuucauugguccucgugguuagucugggugcaaucagcuuuuggaugugcuccaacggcucuuuacagugccggauuuguaucuga

SEQ ID NO: 132260 - RNA, 1701 nt, Artificial Sequence; identical to SEQ ID NO: 131881
  derived and/or modified CDS sequence (opt3) from hemagglutinin__InfluenzaA__ADD23172

SEQ ID NO: 132261 - RNA, 1701 nt, Artificial Sequence; identical to SEQ ID NO: 131881
  derived and/or modified CDS sequence (opt3) from hemagglutinin__InfluenzaA__ADD23182

SEQ ID NO: 132262 - RNA, 1701 nt, Artificial Sequence; identical to SEQ ID NO: 131881
  derived and/or modified CDS sequence (opt3) from hemagglutinin__InfluenzaA__ADD23192

SEQ ID NO: 132263 - RNA, 1701 nt, Artificial Sequence; identical to SEQ ID NO: 131881
  derived and/or modified CDS sequence (opt3) from hemagglutinin__InfluenzaA__ADD23202

SEQ ID NO: 132264 - RNA, 1701 nt, Artificial Sequence; identical to SEQ ID NO: 131881
  derived and/or modified CDS sequence (opt3) from hemagglutinin__InfluenzaA__ADD23220

SEQ ID NO: 132265 - RNA, 1701 nt, Artificial Sequence; identical to SEQ ID NO: 131877
  derived and/or modified CDS sequence (opt3) from hemagglutinin__InfluenzaA__ADD23230

SEQ ID NO: 132266 - RNA, 1701 nt, Artificial Sequence; identical to SEQ ID NO: 131881
  derived and/or modified CDS sequence (opt3) from hemagglutinin__InfluenzaA__ADD23240

SEQ ID NO: 132267 - RNA, 1701 nt, Artificial Sequence
  derived and/or modified CDS sequence (opt3) from hemagglutinin__InfluenzaA__ADD23260
augaaggccauccuggugguccuccuuuacaccuucgcuacagcaaacgccgacacucugugcauuggcuaucacgcgaauaacagcacggauaccguugacacaguguuggagaaaaauguaacugugacccauuccgucaacuuacuggaagauaagcacaaugggaaacuauguaagcucagaggaguggcuccccugcaucuugguaaaugcaacauagccggcuggauccuggggaauccugagugugaaucuuugucaacagcaaguagcugguccuacauuguugagaccucuucgucagacaacggaacuugcuauccaggcgauuuuaucgacuacgaagaacucagggagcagcugagcaguguguccucuuucgaacgguuugagauuuucccgaagacaagcuccuggcccaaucacgauucaaacaagggugucaccgccgcuuguccucaugcaggggccaaaaguuuuuauaagaaucugaucuggcucgugaaaaagggaaacagcuacccaaaauuaucuaaguccuauauaaaugacaagggcaaagaaguacugguucuuuggggcauccaccaccccucaacgagcgcugaucaacagaguuuguaccagaacgccgacgcguacguguucgucgggacuucucgcuauuccaagaaauuuaagccugagauugcaauccgaccaaaagugcgugaucaggagggaagaaugaauuacuauuggacccugguggaacccggugacaagauuacauucgaggccacuggcaaccuagucguuccuagguacgcuuuugccauggaacggaacgcagggagcggaaucauaauuucggauaccccagugcaugacugcaauacaaccugucaaacgccggagggcgcuaucaacacuucucuccccuuccagaauauucacccuaucacaaucgguaaaugcccaaaguauguaaaguccaccaaacugcgccuugccacugggcugagaaacgugcccucaauucagaguaggggauuguuuggcgcgauagccggcuucaucgaagggggauggacagguauggucgacggcugguacggguaucaucaccagaaugagcaaggaagcggcuacgcagcugaucucaaguccacccagaacgccauugacaaaaucacgaauaaggugaacucuguuauagagaaaaugaauacccaguuuacagcuguggguaaggaguucaaccaccuggagaagcggauugaaaauuuaaacaaaaaggucgaugacggguuccuggauaucuggacuuacaaugccgagcuccuugugcuguuggaaaacgagcgcacccuagacuaucaugauagcaauguaaagaaccuguacgagaagguucgaucacagcucaaaaacaaugcaaaggaaaucggcaacggauguuuugaguucuaucacaagugcgacaauacauguauggaaagugugaaaaacggcacuuacgauuauccuaaguacuccgaggaagccaaacugaauagagaggagauugacggggucaaacuugaaagcaccaggaucuaucaaauucuggcuauauacucuacaguggcgucaaguuugguccucgugguuagccugggagcaaucuccuuuuggaugugcucuaacgguucguuacagugccggauuuguaucuga

SEQ ID NO: 132268 - RNA, 1701 nt, Artificial Sequence; identical to SEQ ID NO: 131070
  derived and/or modified CDS sequence (opt3) from hemagglutinin__InfluenzaA__ADD23280

SEQ ID NO: 132269 - RNA, 1701 nt, Artificial Sequence
  derived and/or modified CDS sequence (opt3) from hemagglutinin__InfluenzaA__ADD23290
augaaggccauccuggugguccuccuuuacaccuucgcuacagcaaacgccgacacucugugcauuggcuaucacgcgaauaacagcacggauaccguugacacaguguuggagaaaaauguaacugugacccauuccgucaacuuacuggaagauaagcacaaugggaaacuauguaagcucagaggaguggcuccccugcaucuugguaaaugcaacauagccggcuggauccuggggaauccugagugugaaucuuugucaacagcaaguagcugguccuacauuguugagaccucuucgucagacaacggaacuugcuauccaggcgauuuuaucaauuacgaggagcucagggagcagcugagcaguguguccucuuucgaacgguuugagauuuucccgaagacaagcuccuggcccaaccacgacucaaauaagggugucaccgccgcuuguccucaugcaggggccaaaaguuuuuauaagaaccugaucuggcucgugaaaaagggaaauagcuacccaaaauuaucuaaguccuauauaaacgauaagggcaaagaaguacugguucuuuggggcauccaccaccccucaacgagcgcugaccaacagaguuuguaccagaaugccgaugcguacguguucgucgggacuucucgcuauuccaagaaauuuaagccugagauugcaauccgaccaaaagugcgugaccaggagggaagaaugaacuacuauuggacccugguggaacccggugauaagauuacauucgaggccacuggcaaccuagucguuccuagguacgcuuuugccauggaacggaaugcagggagcggaaucauaauuucggacaccccagugcaugauugcaacacaaccugucaaacgccgaaaggcgcuaucaauacuucucuccccuuccagaacauucacccuaucacaaucgguaagugcccaaaguauguaaaauccaccaagcugcgccuugccacugggcugagaaaugugcccucaauucagaguaggggauuguuuggcgcgauagccggcuucaucgaagggggauggacagguauggucgacggcugguacggguaucaucaccagaacgaacaaggaagcggcuacgcagcugaccucaaauccacccagaaugccauugauaagaucacgaacaaaguuaauucugugauagagaagaugaacacccaguuuacagcuguggguaaggaguucaaucaccuggaaaaacggauugagaacuuaaauaagaaagucgacgauggguuccuggacaucuggacuuacaacgccgaacuccuugugcuguuggagaaugaacgcacccuagauuaucaugacagcaacguaaagaaccuguacgagaaaguucgaucacagcucaagaauaacgcaaaggagaucggcaauggauguuuugaguucuaucacaaaugcgauaacacauguauggaaagugugaagaauggcacuuacgacuauccuaaauacuccgaagaggccaagcugaacagagaagagauugauggggucaaacuugagagcaccaggaucuaucaaauucuggcuauauacucuacaguggcgucaaguuugguccucgugguuagccugggagcaaucuccuuuuggaugugcucuaaugguucguuacagugccggauuuguaucuga

SEQ ID NO: 132270 - RNA, 1701 nt, Artificial Sequence; identical to SEQ ID NO: 131881
  derived and/or modified CDS sequence (opt3) from hemagglutinin__InfluenzaA__ADD23300

SEQ ID NO: 132271 - RNA, 1701 nt, Artificial Sequence; identical to SEQ ID NO: 132269
  derived and/or modified CDS sequence (opt3) from hemagglutinin__InfluenzaA__ADD23310

SEQ ID NO: 132272 - RNA, 1701 nt, Artificial Sequence; identical to SEQ ID NO: 131881
  derived and/or modified CDS sequence (opt3) from hemagglutinin__InfluenzaA__ADD23320

SEQ ID NO: 132273 - RNA, 1701 nt, Artificial Sequence
  derived and/or modified CDS sequence (opt3) from hemagglutinin__InfluenzaA__ADD23330
augaaggccauccuggugguccuccuuuacaccuucgcuacagcaaacgccgacacucugugcauuggcuaucacgcgaauaacagcacggauaccguugacacaguguuggagaaaaauguaacugugacccauuccgucaacuuacuggaagauaagcacaaugggaaacuauguaagcucagaggaguggcuccccugcaucuugguaaaugcaacauagccggcuggauccuggggaauccugagugugaaucuuugucaacagcaaguagcugguccuacauuguugagaccucuucgucagacaacggaacuugcuauccaggcgauuuuaucaauuacgaggagcucagggagcagcugagcaguguguccucuuucgaacgguuugagauuuucccgaagacaagcuccuggcccaaccacgacucaaauaagggugucaccgccgcuuguccucaugcaggggccaaaaguuuuuauaagaaccugaucuggcucgugaaaaagggaaauagcuacccaaaauuaucuaaguccuauauaaacgauaagggcaaagaaguacugguucuuuggggcauccaccaccccucaacgagcgcugaccaacagaguuuguaccagaaugccgaugcguacguguucgucgggacuucucgcuauuccaagaaauuuaagccugagauugcaauccgaccaaaagugcgugaccaggagggaagaaugaacuacuauuggacccugguggaacccggugauaagauuacauucgaggccacuggcaaccuagucguuccuagguacgcuuuugccauggaacggaaugcagggagcggaaucauaauuucggacaccccagugcaugauugcaacacaaccugucaaacgccgaaaggcgcuaucaauacuucucuccccuuccagaacauucacccuaucacaaucgguaagugcccaaaguauguaaaauccaccaagcugcgccuugccacugggcugagaaaugugcccucaauucagaguaggggauuguuuggcgcgauagccggcuucaucgaagggggauggacagguauggucgacggcugguacggguaucaucaccagaacgaacaaggaagcggcuacgcagcugaccucaaauccacccagaaugccauugauaagaucacgaacaaaguuaauucugugauagagaagaugaacacccaguuuacagcuguggguaaggaguucaaucaccuggaaaaacggauugagaacuuaaauaagaaagucgacgauggguuccuggacaucuggacuuacaacgccgaacuccuugugcuguuggagaaugaacgcacccuagauuaucaugacagcaacguaaagaaccuguacgagaaaguucgaucacagcucaagacaaaugcaaaggagaucggcaacggauguuuugaguucuaucacaaaugcgauaauacuuguauggaaagugugaagaacggcaccuacgacuauccuaaauacuccgaagaggccaagcugaauagagaagagauugauggggucaaacuugagagcacaaggaucuaucaaauucuggcuauauacucuaccguggcgucaaguuugguccucgugguuagccugggagcaaucuccuuuuggaugugcucuaacgguucguuacagugccggauuuguaucuga

SEQ ID NO: 132274 - RNA, 1701 nt, Artificial Sequence
  derived and/or modified CDS sequence (opt3) from hemagglutinin__InfluenzaA__ADD23355
augaaggccauccuggugguccuccuuuacaccuucgcuacagcaaacgccgacacucugugcauuggcuaucacgcgaauaacagcacggauaccguugacacaguguuggagaaaaauguaacugugacccauuccgucaacuuacuggaagauaagcacaaugggaaacuauguaagcucagaggaguggcuccccugcaucuugguaaaugcaacauagccggcuggauccuggggaauccugagugugaaucuuugucaacagcaaguagcugguccuacauuguugagaccucuucgucagacaacggaacuugcuauccaggcgauuuuaucaauuacgaagaacucagggagcagcugagcaguguguccucuuucgaaauguuugagauuuucccgaagacaagcuccuggcccaaccacgacucaaauaagggugucaccgccgcuuguccucaugcaggggccaaaaguuuuuauaagaaccugaucuggcucgugaaaaagggaaauagcuacccaaaauuaucuaaguccuauauaaacgauaagggcaaagaaguacugguucuuuggggcauccaccaccccucaacgagcgcugaccaacagaguuuguaccagaaugccgaugcguacguguucgucgggacuucucgguauuccaagaaauuuaagccugagauugcaauccgcccaaaagugcgagaccaggagggacguaugaacuacuauuggacccugguggaacccggugauaagauuacauucgaggccacuggcaaccuagucguuccuagauacgcuuuugccauggaaaggaaugcagggagcggaaucauaauuucggacaccccagugcaugauugcaacacaaccugucaaacgccgaaaggcgcuaucaauacuucucuccccuuccagaacauucacccuaucacaaucgguaagugcccaaaguauguaaaauccaccaagcugcggcuugccacugggcugcgcaaugugcccucaauucagaguagaggauuguuuggcgcgauagccggcuucaucgaagggggauggacagguauggucgacggcugguacggguaucaucaccagaacgaacaaggaagcggcuacgcagcugaccucaaauccacccagaaugccauugauaagaucacgaacaaaguuaauucugugauagagaagaugaacacccaguuuacagcuguggguaaggaguucaaucaccuggagaaaaggauugagaacuuaaauaagaaagucgacgauggguuccuggacaucuggacuuacaacgccgaacuccuugugcuguuggagaaugaacggacccuagauuaucaugacagcaacguaaagaaccuguacgagaaaguucgcucacagcucaagaauaacgcaaaggagaucggcaauggauguuuugaguucuaucacaaaugcgauaacacauguauggagagugugaagaauggcacuuacgacuauccuaaauacuccgaagaggccaagcugaaccgagaagagauugauggggucaaacuugagagcaccagaaucuaucaaauucuggcuauauacucuacaguggcgucaaguuugguccucgugguuagccugggagcaaucuccuuuuggaugugcucuaaugguucguuacagugcaggauuuguaucuga

SEQ ID NO: 132275 - RNA, 1701 nt, Artificial Sequence; identical to SEQ ID NO: 132269
  derived and/or modified CDS sequence (opt3) from hemagglutinin__InfluenzaA__ADD23375

SEQ ID NO: 132276 - RNA, 1701 nt, Artificial Sequence; identical to SEQ ID NO: 131881
  derived and/or modified CDS sequence (opt3) from hemagglutinin__InfluenzaA__ADD23385

SEQ ID NO: 132277 - RNA, 1701 nt, Artificial Sequence
  derived and/or modified CDS sequence (opt3) from hemagglutinin__InfluenzaA__ADD23405
augaaggccauccuggugguccuccuuuacaccuucgcuacagcaaacgccgacacucugugcauuggcuaucacgcgaauaacagcacggauaccguugacacaguguuggagaaaaauguaacugugacccauuccgucaacuuacuggaagauaagcacaaugggaaacuauguaagcucagaggaguggcuccccugcaucuugguaaaugcaacauagccggcuggauccuggggaauccugagugugaaucuuugucaacagcaaguagcugguccuacauuguugagaccucuucgucagacaacggaacuugcuauccaggcgauuuuaucaauuacgaggagcucagggagcagcugagcaguguguccucuuucgaacgguuugagauuuucccgaagacaagcuccuggcccaaccacgacucaaauaagggugucaccgccgcuuguccucaugcaggggccaaaaguuuuuauaagaaccugaucuggcucgugaaaaagggaaauagcuacccaaaauuaucuaaguccuauauaaacgauaagggcaaagaaguacugguucuuuggggcauccaccaccccucaacgagcgcugaccaacagaguuuguaccagaaugccgaugcguacguguucgucgggacuucucgcuauuccaagaaauuuaagccugagauugcaauccgaccaaaagugcgugaccaggagggaagaaugaacuacuauuggacccugguggaacccggugauaagauuacauucgaggccacuggcaaccuagucguuccuagguacgcuuuugccauggaacggaaugcagggagcggaaucauaauuucggacaccccagugcaugauugcaacacaaccugucaaacgccgaaaggcgcuaucaauacuucucuccccuuccagaacauucacccuaucacaguagguaagugcccaaaguaugugaaauccaccaagcugcgccuugccacugggcugagaaauguccccucaauccagaguaggggauuguuuggcgcgauugccggcuucauagaagggggauggacagguaugguggacggcugguacggguaucaucaccagaacgaacaaggaagcggcuacgcagcugaccucaaauccacccagaaugccaucgauaagauuacgaacaaaguuaauucugugaucgagaagaugaacacccaguuuacagcugucgguaaggaguucaaucaccuggaaaaacggauagagaacuuaaauaagaaaguggacgauggguuccuggacauuuggacuuacaacgccgaacuccuuguacuguuggagaaugaacgcacccuagauuaucaugacagcaacguuaagaaccuguacgagaaagugcgaucacagcucaagaauaacgcaaaggagaucggcaauggauguuuugaguucuaucacaaaugcgauaacacauguauggaaagugucaagaauggcacuuacgacuauccuaaauacuccgaagaggccaagcugaacagagaagagaucgauggggugaaacuugagagcaccaggauuuaucaaauccuggcuauuuacucuacagucgcgucaaguuuggugcucguugugagccugggagcaauauccuuuuggaugugcucuaaugguucguuacagugccggaucuguauuuga

SEQ ID NO: 132278 - RNA, 1701 nt, Artificial Sequence
  derived and/or modified CDS sequence (opt3) from hemagglutinin__InfluenzaA__ADD23415
augaaggccauccuggugguccuccuuuacaccuucgcuacagcaaacgccgacacucugugcauuggcuaucacgcgaauaacagcacggauaccguugacacaguguuggagaaaaauguaacugugacccauuccgucaacuuacuggaagauaagcacaaugggaaacuauguaagcucagaggaguggcuccccugcaucuugguaaaugcaacauagccggcuggauccuggggaauccugagugugaaucuuugucaacagcaaguagcugguccuacauuguugagaccucuucgucagacaacggaacuugcuauccaggcgauuuuaucaauuacgaagaacucagggagcagcugagcaguguguccucuuucgaacgguuugagauuuucccgaagacaagcuccuggcccaaccacgacucaaauaagggugucaccgccgcuuguccucaugcaggggccaaaaguuuuuauaagaaccugaucuggcucgugaaaaagggaaauagcuacccaaaauuaucuaaguccuauauaaacgauaagggcaaagaaguacugguucuuuggggcauccaccaccccucaacgagcgcugaccaacagaguuuguaccagaaugccgaugcguacguguucgucgggacuucucgcuauuccaagaaauuuaagccugagauugcaauccgaccaaaagugcgugaccaggagggaagaaugaacuacuauuggacccugguggaacccggugauaagauuacauucgaggccacuggcaaccuagucguuccuagguacgcuuuugccauggaacggaaugcagagagcgggaucauaauuucggacaccccagugcaugauugcaacacaaccugucaaacgccgaaaggagcuaucaauacuucucuccccuuccagaacauucacccuaucacaaucggcaagugcccaaaguauguaaaauccaccaagcugcgccuugccacuggucugagaaaugugcccucaauucagaguaggggguuguuuggagcgauagccggcuucaucgaaggcggguggacaggaauggucgacgguugguacggcuaucaucaccagaacgagcaagggagcggauacgcagcugaccucaaauccacccagaaugccauugauaagaucacgaacaaaguuaauucugugauagagaagaugaacacccaguuuacagcugugggcaaggaguucaaucaccuggagaaacggauugaaaacuuaaauaagaaagucgacgaugguuuccuggacaucuggacuuacaacgccgagcuccuugugcuguuggaaaaugagcgcacccuagauuaucaugacagcaacguaaagaaccuguacgagaaaguucgaucacagcucaagaauaacgcaaaggaaaucgggaauggcuguuuugaguucuaucacaaaugcgauaacacauguauggaaagugugaagaauggaacuuacgacuauccuaaauacuccgaggaagccaagcugaacagagaggagauugauggcgucaaacuugaaagcaccaggaucuaucaaauucuggcuauauacucuacaguggcgucaaguuugguccucgugguuagccugggggcaaucuccuuuuggaugugcucuaauggaucguuacagugccggauuuguaucuga

SEQ ID NO: 132279 - RNA, 1701 nt, Artificial Sequence; identical to SEQ ID NO: 131881
  derived and/or modified CDS sequence (opt3) from hemagglutinin__InfluenzaA__ADD23435

SEQ ID NO: 132280 - RNA, 1701 nt, Artificial Sequence
  derived and/or modified CDS sequence (opt3) from hemagglutinin__InfluenzaA__ADD23465
augaaggccauccuggcugugcuccuuuacaccuucgcaacagccaacgcggacacucugugcauuggcuaucacgcuaauaacagcacggauaccgucgacacaguuuuggagaaaaaugugacuguaacccauuccgugaacuuacuggaagauaagcacaaugggaaacuauguaagcucagaggagucgcaccccugcaucuugguaaaugcaacauagccggcuggauccuggggaauccugagugugaaucuuugucaacagccaguagcugguccuacauuguggagaccucuucgucagacaacggaacuugcuauccaggcgauuuuaucgacuacgaggagcucagggagcagcugagcaguguuuccucuuucgaacgguuugagauuuucccgaagacaagcuccuggcccaaucacgauucaaacaagggugugaccgcugcauguccucaugccggggcuaaaaguuuuuauaagaaucugaucuggcucgucaaaaagggaaacagcuacccaaaauuaucuaaguccuauauaaaugacaagggcaaagaagugcugguacuuuggggcauccaccaccccucaacgagcgccgaucaacagaguuuguaccagaacgcggacgcauacguuuucguggggacuucucgcuauuccaagaaauuuaagccugagauugccauccgaccaaaaguccgugaucaggagggaagaaugaauuacuauuggacccugguggaacccggugacaagauuacauucgaggcuacuggcaaccuaguggucccuagguacgccuuugcaauggaacggaacgcugggagcggaaucauaauuucggauaccccaguucaugacugcaauacaaccugucaaacgccgaaaggcgccaucaacacuucucuccccuuccagaauauucacccuaucacaaucgguaagugcccaaaguaugugaaauccaccaagcugcgccuugcgacugggcugagaaacguacccucaauucagaguaggggauuguuuggcgccauagcaggcuucaucgaagggggauggacagguaugguggacggcugguacggguaucaucaccagaaugaacaaggaagcggcuacgcugccgaucucaaauccacccagaacgcuauugacaagaucacgaauaaagucaacucugugauagagaagaugaauacccaguuuacagccguugguaaggaguucaaccaccuggaaaaacggauugagaauuuaaacaagaaaguggaugacggguuccuggauaucuggacuuacaaugcagaacuccuuguccuguuggagaacgaacgcacccuagacuaucaugauagcaaugugaagaaccuguacgagaaaguacgaucacagcucaagaacaaugccaaggagaucggcaacggauguuuugaguucuaucacaaaugcgacaauacauguauggaaaguguuaagaacggcacuuacgauuauccuaaauacuccgaagaggcuaagcugaauagagaagagauugacggggugaaacuugagagcaccaggaucuaucaaauucuggcgauauacucuacagucgcaucaaguuuggugcucgucgugagccugggagccaucuccuuuuggaugugcucuaacgguucguuacagugccggauuuguaucuga

SEQ ID NO: 132281 - RNA, 1701 nt, Artificial Sequence; identical to SEQ ID NO: 131881
  derived and/or modified CDS sequence (opt3) from hemagglutinin__InfluenzaA__ADD23475

SEQ ID NO: 132282 - RNA, 1701 nt, Artificial Sequence; identical to SEQ ID NO: 131881
  derived and/or modified CDS sequence (opt3) from hemagglutinin__InfluenzaA__ADD23485

SEQ ID NO: 132283 - RNA, 1701 nt, Artificial Sequence
  derived and/or modified CDS sequence (opt3) from hemagglutinin__InfluenzaA__ADD23495
augaaggccauccuggugguccuccuuuacaccuucgcuacagcaaacgccgacacucugugcauuggcuaucacgcgaauaacagcacggauaccguugacacaguguuggagaaaaauguaacugugacccauuccgucaacuuacuggaagauaagcacaaugggaaacuauguaagcucagaggaguggcuccccugcaucuugguaaaugcaacauagccggcuggauccuggggaauccugagugugaaucuuugucaacagcaaguagcugguccuacauuguugagaccucuucgucagacaacggaacuugcuauccaggcgauuuuaucgacuacgaggagcucagggagcagcugagcaguguguccucuuucgaacgguuugagauuuucccgaagacaagcuccuggcccaaucacgauucaaacaagggugucaccgccgcuuguccucaugcaggggcccgcaguuuuuauaaaaaucugaucuggcucgugaagaaaggaaacagcuacccaaaguuaucuaaauccuauauaaaugacaagggcaaggaaguacugguucuuuggggcauccaccaccccucaacgagcgcugaucaacagaguuuguaccagaacgccgacgcguacguguucgucgggacuucucgauauuccaaaaaguuuaaaccugagauugcaauccguccaaaggugagagaucaggagggaaggaugaauuacuauuggacccugguggaacccggugacaaaauuacauucgaggccacuggcaaccuagucguuccucgguacgcuuuugccauggaacgcaacgcagggagcggaaucauaauuucggauaccccagugcaugacugcaauacaaccugucaaacgccgaagggcgcuaucaacacuucucuccccuuccagaauauucacccuaucacaaucgguaaaugcccaaaguauguaaaguccaccaaacugagacuugccacugggcugaggaacgugcccucaauucagagucggggauuguuuggcgcgauagccggcuucaucgaagggggauggacagguauggucgacggcugguacggguaucaucaccagaaugaacaaggaagcggcuacgcagcugaucucaaguccacccagaacgccauugacgagaucacgaauaaagugaacucuguuauagagaagaugaauacccaguuuacagcuguggguaaagaguucaaccaccuggaaaagcgcauugaaaauuuaaacaagaaagucgaugacggguuccuggauaucuggacuuacaaugccgagcuccuugugcuguuggaaaacgagcgaacccuagacuaucaugauagcaauguaaagaaccuguacgagaaaguuagaucacagcucaagaacaaugcaaaagaaaucggcaacggauguuuugaguucuaucacaagugcgacaauacauguauggaaagugugaagaacggcacuuacgauuauccuaaauacuccgaggaagccaagcugaauagggaggagauugacggggucaaacuugaaagcacccggaucuaucaaauucuggcuauauacucuacaguggcgucaaguuugguccucgugguuagccugggagcaaucuccuuuuggaugugcucuaacgguucguuacagugccguauuuguaucuga

SEQ ID NO: 132284 - RNA, 1701 nt, Artificial Sequence
  derived and/or modified CDS sequence (opt3) from hemagglutinin__InfluenzaA__ADD23505
augaaggccauccuggugguccuccuuuacaccuucgcuacagcaaacgccgacacucugugcauuggcuaucacgcgaauaacagcacggauaccguugacacaguguuggagaaaaauguaacugugacccauuccgucaacuuacuggaagauaagcacaaugggaaacuauguaagcucagaggaguggcuccccugcaucuugguaaaugcaacauagccggcuggauccuggggaauccugagugugaaucuuugucaacagcaaguagcugguccuacauuguugagaccucuucgucagacaacggaacuugcuauccaggcgauuuuaucgacuacgaggagcucagggagcagcugagcaguguguccucuuucgaacgguuugagauuuucccgaagacaagcuccuggcccaaucacgauucaaacaagggugucaccgccgcuuguccucaugcaggggccaaaaguuuuuauaagaaucugaucuggcucgugaaaaagggaaacagcuacccaaaauuaucuaaguccuauauaaaugacaagggcaaagaaguacugguucuuuggggcauccaccaccccucaacgagcgcugaucaacagaguuuguaccagaacgccgacgcguacguguucgucgggacuucucgcuauuccaagaaauuuaagccugagauugcaauccgaccaaaagugcgugaucaggagggaagaaugaauuacuauuggacccugauugaacccggugacaagaucacauucgaggccacuggcaaccuaguggucccuagguacgcuuuugccauggaacggaacgcagggagcggaauaauuaucucggauaccccagcucaugacugcaauacaaccugucaaacgccgaaaggcgccauuaacacuucucuccccuuccagaauauccacccuaucacaauugguaagugcccaaaguauguuaaauccaccaagcugcgccuugcgacugggcugagaaacgugcccucaauacagaguaggggauuguuuggcgccaucgcaggcuucauugaagggggauggacagguaugguagacggcugguacggguaucaucaccagaaugaacaaggaagcggcuacgcugccgaucucaaauccacccagaacgcuaucgacaagauaacgaauaaagugaacucugucauugagaagaugaauacccaguuuacagccguggguaaggaguucaaccaccuggaaaaacggaucgagaauuuaaacaagaaaguugaugacggguuccuggauaucuggacuuacaaugcagaacuccuugugcuguuggagaacgaacgcacccuagacuaucaugauagcaaugucaagaaccuguacgagaaagugcgaucacagcucaagaacaaugccaaggagauuggcaacggauguuuugaguucuaucacaaaugcgacaauacauguauggaaaguguaaagaacggcacuuacgauuauccuaaauacuccgaagaggcuaagcugaauagagaagagaucgacgggguuaaacuugagagcaccaggauuuaucaaauacuggcgaucuacucuacaguggcaucaaguuugguccucguggucagccugggagccauuuccuuuuggaugugcucuaacgguucguuacagugccggaucuguaucuga

SEQ ID NO: 132285 - RNA, 1701 nt, Artificial Sequence; identical to SEQ ID NO: 131881
  derived and/or modified CDS sequence (opt3) from hemagglutinin__InfluenzaA__ADD23515

SEQ ID NO: 132286 - RNA, 1701 nt, Artificial Sequence; identical to SEQ ID NO: 131881
  derived and/or modified CDS sequence (opt3) from hemagglutinin__InfluenzaA__ADD23994

SEQ ID NO: 132287 - RNA, 1701 nt, Artificial Sequence
  derived and/or modified CDS sequence (opt3) from hemagglutinin__InfluenzaA__ADD24004
augaaggccauccuggugguccuccuuuacaccuucgcuacagcaaacgccgacacucugugcauuggcuaucacgcgaauaacagcacggauaccguugacacaguguuggagaaaaauguaacugugacccauuccgucaacuuacuggaagauaagcacaaugggaaacuauguaagcucagaggaguggcuccccugcaucuugguaaaugcaacauagccggcuggauccuggggaauccugagugugaaucuuugucaacagcaaguagcugguccuacauuguugagaccucuucgucagacaacggaacuugcuauccaggcgauuuuaucgacuacgaggagcucagggagcagcugagcaguguguccucuuucgaacgguuugagauuuucccgaagacaagcuccuggcccaaucacgauucaaacaagggugucaccgccgcuuguccucaugcaggggccaaaaguuuuuauaagaaucugaucuggcucgugaaaaagggaaacagcuacccaaaauuaucuaaguccuauauaaaugacaagggcaaagaaguacugguucuuuggggcauccaccaccccucaacgagcgcugaucaacagaguuuguaccagaacgccgacgcguacguguucgucgggacuucucgcuauuccaagaaauuuaagccugagauugcaauccgaccaaaagugcgugaucaggagggaagaaugaauuacuauuggacccugguggaacccggugacaagauuacauucgaggccacuggcaaccuagucguuccuagguacgcuuuugccauggaacggaacgcagggagcggaaucauaauuucggauaccccagugcaugacugcaauacaaccugucaaacgccgaacggcgcuaucaauacuucucuccccuuccagaacauucacccuaucacaaucgguaaaugcccaaaguauguaaaguccaccaaacugcgccuugccacugggcugagaaaugugcccucaauucagaguaggggauuguuuggcgcgauagccggcuucaucgaagggggauggacagguauggucgacggcugguacggguaucaucaccagaacgaacaaggaagcggcuacgcagcugaucucaaguccacccagaaugccauugacgagaucacgaacaaaguuaauucugugauagagaagaugaacacccaguuuacagcuguggguaaagaguucaaucaccuggaaaagcggauugaaaacuuaaauaagaaaaucgaugacggguuccuggauaucuggacuuacaacgccgagcuccuuguccuguuggaaaaugagcgcacccuagacuaucaugauagcaacgugaagaaccuguacgagaaaguacgaucacagcucaagaauaacgcaaaagaaauuggcaauggauguuuugaguucuaucacaagugcgacaacacauguauggaaaguguuaagaauggcacuuacgauuauccuaaauacuccgaggaagccaagcugaacagagaggagaucgacggggugaaacuugaaagcaccaggauuuaucaaauacuggcuaucuacucuacagucgcgucaaguuuggugcucgucgugagccugggagcaauuuccuuuuggaugugcucuaaugguucguuacagugccggaucuguaucuga

SEQ ID NO: 132288 - RNA, 1701 nt, Artificial Sequence; identical to SEQ ID NO: 131819
  derived and/or modified CDS sequence (opt3) from hemagglutinin__InfluenzaA__ADD24014

SEQ ID NO: 132289 - RNA, 1701 nt, Artificial Sequence
  derived and/or modified CDS sequence (opt3) from hemagglutinin__InfluenzaA__ADD52537
augaaggccauccuggugguccuccuuuacaccuucgcuacagcaaacgccgacacucugugcauuggcuaucacgcgaauaacagcacggauaccguugacacaguguuggagaaaaauguaacugugacccauuccgucaacuuacuggaagauaagcacaaugggaaacuauguaagcucagaggaguggcuccccugcaucuugguaaaugcaacauagccggcuggauccuggggaauccugagugugaaucuuugucaacagcaaguagcugguccuacauuguugagaccucuucgucagacaacggaacuugcuauccaggcgauuuuaucgacuacgaggagcucagggagcagcugagcaguguguccucuuucgaacgguuugagauuuucccgaagacaagcuccuggcccaaucacgauucaaacaagggugucaccgccgcuuguccucaugcaggggccaaaaguuuuuauaagaaucugaucuggcucgugaaaaagggaaacagcuacccaaaauuaucuaaguccuauauaaaugacaagggcaaagaaguacugguucuuuggggcauccaccaccccucaacgagcgcugaucaacagaguuuguaccagaacgccgacgcguacguguucgucgggucuucccgcuauagcaagaaauuuaagccugagauugcaauccgaccaaaagugcgugaucaggagggaagaaugaauuacuauuggacucugguggaacccggugacaagauuaccuucgaggccacaggcaaccuagucguuccuagguacgcuuuugccauggaacggaacgcagggucgggaaucauaauuucugauacuccagugcaugacugcaauaccacaugucaaaccccgaaaggcgcuaucaacacgucccuccccuuccagaauauucacccuaucacuaucgguaagugcccaaaguauguaaaaucaacaaagcugcgccuugccaccgggcugagaaacgugcccaguauucagagcaggggauuguuuggcgcgauagccggcuucaucgaagggggauggacugguauggucgacggcugguacggguaucaucaccagaaugaacaaggauccggcuacgcagcugaucucaaaucuacacagaacgccauugacgguaucaccaauaaggugaacagcguuauagagaaaaugaauacgcaguuuaccgcuguggggaaggaguucaaccaccuggaaaagcggauugagaauuuaaacaaaaaggucgaugacggcuuccuggauaucuggacauacaaugccgaacuccuugugcuguuggagaacgaacgcacucuagacuaucaugauucaaauguaaagaaccuguacgagaagguucgaagucagcucaaaaacaaugcaaaggagaucggaaacggcuguuuugaguucuaucacaagugcgacaauaccuguauggaauccgugaaaaacgggacauacgauuauccuaaguacagcgaagaggccaaacugaauagagaagagauugacggagucaaacuugagucuacuaggaucuaucaaauucuggcuauauacucaaccguggcgaguagcuugguccucgugguuucccugggugcaaucucuuuuuggaugugcucgaacggcagcuuacagugccggauuuguaucuga

SEQ ID NO: 132290 - RNA, 1701 nt, Artificial Sequence; identical to SEQ ID NO: 131881
  derived and/or modified CDS sequence (opt3) from hemagglutinin__InfluenzaA__ADD64203

SEQ ID NO: 132291 - RNA, 1701 nt, Artificial Sequence
  derived and/or modified CDS sequence (opt3) from hemagglutinin__InfluenzaA__ADD64204
augaaggccauccuggugguccuccuuuacaccuucgcuacagcaaacgccgacacucugugcauuggcuaucacgcgaauaacagcacggauaccguugacacaguguuggagaaaaauguaacugugacccauuccgucaacuuacuggaagauaagcacaaugggaaacuauguaagcucagaggaguggcuccccugcaucuugguaaaugcaacauagccggcuggauccuggggaauccugagugugaaucuuugucaacagcaaguagcugguccuacauuguugagaccucuucgucagacaacggaacuugcuauccaggcgauuuuaucgacuacgaagaacucagggagcagcugagcaguguguccucuuucgaacgguuugagauuuucccgaagacaagcuccuggcccaaucacgauccuaacaagggugucaccgccgcuuguccacaugcaggggccaaaucauuuuauaagaaucugaucuggcucgugaaaaagggaaacaguuaccccaaauuaagcaagucuuauauaaaugacaagggcaaagaaguacugguucuuuggggcauccaccacccuuccacgucagcugaucaacagagcuuguaccagaacgccgacgcguacguguucgucgggaccagucgcuauucuaagaaauuuaagccagagauugcaauccgacccaaagugcgugaucaggagggaagaaugaauuacuauuggacucugauugaaccuggugagaagaucacauucgaagccacuggcaaccuaguggucccaagguacgcuuuugccauggagcggaacgcaggguccggaauaauuaucagcgacaccccgguucaugauugcaauacaaccugucaaacgcccaaaggcgcuauuaacacuucgcucccuuuccagaauauccacccaaucacaauugguaagugccccaaguaugugaaaucuaccaagcugcgccuugccacugggcugagaaacguaccuuccauacagucaaggggauuguuuggcgcgaucgccggcuucauugaagggggauggacagguaugguggacggcugguacggguaucaucaccagaaugagcaaggaaguggcuacgcagcugaccucaaaagcacccagaacgccaucgaugagauaacgaauaaggucaacuccgugauugagaaaaugaauacccaguuuacagcuguugguaaggaguucaaccaccuggaaaagcggaucgagaauuuaaacaaaaagguggacgauggguuccuggacaucuggacuuacaaugccgaacuccuuguccuguuggagaacgagcgcacccuagauuaucaugacucuaaugugaaaaaccuguacgaaaagguacgaagccagcucaaaaacaaugcaagagagauuggcaacggauguuuugaguucuaucacaagugcgauaauacauguauggaaucaguuaagaacggcacuuacgacuauccaaaauacagugaagaggccaagcugaauagggaggaaaucgauggggugaaacuugaguccacccggauuuaucaaauacuggcuaucuacagcacagucgcgucuucauuggugcucgucgugagucugggagcaauuagcuuuuggaugugcuccaacgguucuuuacagugccguaucuguaucuga

SEQ ID NO: 132292 - RNA, 1701 nt, Artificial Sequence; identical to SEQ ID NO: 130717
  derived and/or modified CDS sequence (opt3) from hemagglutinin__InfluenzaA__ADD64205

SEQ ID NO: 132293 - RNA, 1701 nt, Artificial Sequence; identical to SEQ ID NO: 130717
  derived and/or modified CDS sequence (opt3) from hemagglutinin__InfluenzaA__ADD64206

SEQ ID NO: 132294 - RNA, 1701 nt, Artificial Sequence; identical to SEQ ID NO: 131515
  derived and/or modified CDS sequence (opt3) from hemagglutinin__InfluenzaA__ADD64207

SEQ ID NO: 132295 - RNA, 1701 nt, Artificial Sequence
  derived and/or modified CDS sequence (opt3) from hemagglutinin__InfluenzaA__ADD64208
augaaggccauccuggugguccuccuuuacaccuucgcuacagcaaacgccgacacucugugcauuggcuaucacgcgaauaacagcacggauaccguugacacaguguuggagaaaaauguaacugugacccauuccgucaacuuacuggaagauaagcacaaugggaaacuauguaagcucagaggaguggcuccccugcaucuugguaaaugcaacauagccggcuggauccuggggaauccugagugugaaucuuugucaacagcaaguagcugguccuacauuguugagaccucuucgucagacaacggaacuugcuauccaggcgauuuuaucgacuacgaggagcucagggagcagcugagcaguguguccucuuucgaacgguuugagauuuucccgaagacaagcuccuggcccaaucacgauccuaacaagggugucaccgccgcuuguccacaugcaggggccaaaucauuuuauaagaaucugaucuggcucgugaaaaagggaaacaguuaccccaaauuaagcaagucuuauauaaaugacaagggcaaagaaguacugguucuuuggggcauccaccacccuuccacgucagcugaucaacagagcuuguaccagaacgccgacgcguacguguucgucgggaccagucgcuauucuaagaaauuuaagccagagauugcaauccgacccaaagugcgugaucaggagggaagaaugaauuacuauuggacucugguggaaccuggugacaagauuacauucgaggccacuggcaaccuagucguuccaagguacgcuuuugccauggaacggaacgcaggguccggaaucauaauuagcgauaccccggugcaugacugcaauacaaccugucaaacgcccaaaggcgcuaucaacacuucgcucccuuuccagaauauucacccaaucacaaucgguaagugccccaaguauguaaaaucuaccaagcugcgccuugccacugggcugagaaacgugccuuccauucagucaaggggauuguuuggcgcgauagccggcuucaucgaagggggauggacagguauggucgacggcugguacggguaucaucaccagaaugaacaaggaaguggcuacgcagcugaucucaaaagcacccagaacgccauugacgagaucacgaauaaggugaacuccguuauagagaaaaugaauacccaguuuacagcuguggguaaggaguucaaccaccuggaaaagcggauugaaaauuuaaacaaaaaggucgaugacggguuccuggauaucuggacuuacaaugccgagcuccuugugcuguuggaaaacgagcgcacccuagacuaucaugauccaaauguaaagaaccuguacgagaagguucgaucucagcucaaaaacaaugcaaaggaaaucggcaacggauguuuugaguucuaucacaagugcgacaauacauguauggaaagcgugaaaaacggcacuuacgauuaucccaaguacucagaggaagccaaacugaauagagaggagauugacggggucaaacuugaaaguaccaggaucuaucaaauucuggcuauauacuccacaguggcgagcucuuugguccucgugguuucacugggagcaaucaguuuuuggaugugcagcaacgguuccuuacagugccggauuuguaucuga

SEQ ID NO: 132296 - RNA, 1701 nt, Artificial Sequence; identical to SEQ ID NO: 131515
  derived and/or modified CDS sequence (opt3) from hemagglutinin__InfluenzaA__ADD64209

SEQ ID NO: 132297 - RNA, 1701 nt, Artificial Sequence; identical to SEQ ID NO: 130717
  derived and/or modified CDS sequence (opt3) from hemagglutinin__InfluenzaA__ADD64210

SEQ ID NO: 132298 - RNA, 1701 nt, Artificial Sequence; identical to SEQ ID NO: 131515
  derived and/or modified CDS sequence (opt3) from hemagglutinin__InfluenzaA__ADD64211

SEQ ID NO: 132299 - RNA, 1701 nt, Artificial Sequence; identical to SEQ ID NO: 130717
  derived and/or modified CDS sequence (opt3) from hemagglutinin__InfluenzaA__ADD64212

SEQ ID NO: 132300 - RNA, 1701 nt, Artificial Sequence; identical to SEQ ID NO: 131515
  derived and/or modified CDS sequence (opt3) from hemagglutinin__InfluenzaA__ADD64213

SEQ ID NO: 132301 - RNA, 1701 nt, Artificial Sequence
  derived and/or modified CDS sequence (opt3) from hemagglutinin__InfluenzaA__ADD64214
augaaggccauccuggugguccuccuuuacaccuucgcuacagcaaacgccgacacucugugcauuggcuaucacgcgaauaacagcacggauaccguugacacaguguuggagaaaaauguaacugugacccauuccgucaacuuacuggaaaauaagcacaacgggaaacuauguaagcucagaggaguggcuccccugcaucuugguaaaugcaauauagccggcuggauccuggggaacccugagugugaaucuuuuucaacaaguagcuccuggucuuacauuguugagaccucgucaagcgauaauggaacuugcuauccaggcgacuucaucgauuacgaagaguugagggagcagcucaguuccgugucuagcuuugaacgguucgagauuuuuccgaagacauccucauggcccaaccacgacaguaauaagggugucaccgcagccuguccucaugcuggggcaaagagcuucuauaaaaaccugaucuggcuggugaaaaagggaaauucuuacccaaaacucaacaaguccuauauaaaugauaagggcaaagaaguauuaguucuguggggcauccaccaccccucaacgagcgccgaccaacagagucuuuaccagaacgcugaugccuacguguuugucgggacuucucgcuauuccaagaaauucaagccugagauugcgauccgaccaaaagugcgugaccaggagggaagaaugaacuacuauuggaccuugguggaacccggugauaagauuacauuugaggcaacuggcaaucuggucguuccuagguacgccuucgcuauggaacggaacgccgggagcggaaucauaauuucggacaccccagugcaugauugcaauacaaccugucaaacgccgaaaggcgcaaucaacacuucucuacccuuucagaauauucacccuaucacaaucgguaagugcccaaaguauguaaaauccaccaagcuccgccuggcuacugggcuuagaaacgugcccucaauucagaguaggggacuguucggcgccauagcgggcuuuaucgaagggggauggacagguauggucgacggcugguacggguaucaucaccagaaugagcaaggaagcggcuacgccgcagacuugaaauccacccagaacgcuauugaugguaucacgaauaaggugaacucuguuauagagaaaaugaauacccaguucacagccguggggaaggaguucaaccaccucgaaaagcggauugagaaucugaacaaaaaggucgacgauggcuuuuuagacaucuggacuuacaaugcugaacugcucgugcuucuggagaacgaacgcaccuuggauuaucaugacagcaacguuaaaaaucuauacgagaagguacgaucacagcugaaaaacaaugccaaggagaucggaaacggcuguuucgaauuuuaucacaagugcgauaauacauguauggagagugugaaaaacgggacuuacgacuauccuaaguacuccgaagaggcaaaacucaauagagaagagauugauggagucaagcuggagagcaccaggaucuaucaaauucuugccauauacucuacaguggcuucaagucuggucuuggugguuagccucggugcgaucuccuucuggaugugcucuaacggcucgcugcagugccggauuuguaucuga

SEQ ID NO: 132302 - RNA, 1701 nt, Artificial Sequence; identical to SEQ ID NO: 130717
  derived and/or modified CDS sequence (opt3) from hemagglutinin__InfluenzaA__ADD64215

SEQ ID NO: 132303 - RNA, 1701 nt, Artificial Sequence; identical to SEQ ID NO: 131515
  derived and/or modified CDS sequence (opt3) from hemagglutinin__InfluenzaA__ADD64216

SEQ ID NO: 132304 - RNA, 1701 nt, Artificial Sequence; identical to SEQ ID NO: 131515
  derived and/or modified CDS sequence (opt3) from hemagglutinin__InfluenzaA__ADD64217

SEQ ID NO: 132305 - RNA, 1701 nt, Artificial Sequence
  derived and/or modified CDS sequence (opt3) from hemagglutinin__InfluenzaA__ADD74350
augaaggccauccuggugguccuccuuuacaccuucgcuacagcaaacgccgacacucugugcauuggcuaucacgcgaauaacagcacggauaccguugacacaguguuggagaaaaauguaacugugacccauuccgucaacauauuagaagauaagcacaaugggaaacuguguaagcuaagaggaguggcuccccuccaucuggguaaaugcaacaucgccggcuggauucuugggaauccugagugugaaucucugucaacagcaaguagcugguccuacaucguugagaccucuucgucagacaacggaacuugcuauccaggcgauuuuauugacuacgaagaguugagggagcagcucagcaguguguccucuuucgaacgguuugagaucuucccgaagacaagcuccuggcccaaucacgauucaaacaagggugucaccgccgcuuguagucaugcaggggccaagagcuuuuauaaaaaucugauauggcuggugaaaaagggaaacucuuacccuaaacucuccaagucauauaucaaugacaagggcaaagaaguauuaguucuguggggcauucaccacccaagcacgagugcugaucaacagucucuuuaccagaacgccgacgcguacguguucgucggguccagccgcuauucgaagaaauuuaagcccgagaucgcaauucgaccuaaagugcgugaucaggagggaagaaugaauuacuauuggacuuugguggaaccaggugacaagaucaccuucgaggccacaggcaaccuggucguucccagguacgcuuuugccauggaacggaacgcagggucuggaauaauuaucuccgauacuccugugcaugacugcaauaccacaugucaaaccccaaaaggcgcuauuaacacgucacuaccguuccagaauauccaccccaucacuauugguaagugcccuaaguauguaaaaaguacaaagcuccgccuggccaccgggcuuagaaacgugccaagcauacaguccaggggacuguuuggcgcgaucgccggcuucauugaagggggauggacugguauggucgacggcugguacggguaucaucaccagaaugaacaaggaucuggcuacgcagcugauuugaaaagcacacagaacgccaucgacgagauaaccaauaaggugaacucaguuauugagaaaaugaauacgcaguuuaccgcuguggguaaggaguucaaccaccucgagaagcggaucgaaaaucugaacaaaaaggucgaugacggguucuuagauaucuggacauacaaugccgagcugcucgugcuucuggaaaacgagcgcacuuuggacuaucaugauaguaauguuaaaaaccuauacgagaagguacgaucccagcugaaaaacaaugcaaaggaaauuggcaacggauguuuugaguucuaucacaagugcgacaauaccuguauggaaagcgugaaaaacggcacauacgauuaucccaaguacucugaggaagccaaacucaauagagaggagaucgacggggucaagcuggaaucaacuaggauuuaucaaauacuugcuaucuacaguaccguggcgagcucccuggucuuggugguuucucucggagcaauuucguuuuggaugugcagcaacgguucccugcagugccggaucuguaucuga

SEQ ID NO: 132306 - RNA, 1701 nt, Artificial Sequence
  derived and/or modified CDS sequence (opt3) from hemagglutinin__InfluenzaA__ADD74360
augaaggccauccuggugguccuccuuuacaccuucgcuacagcaaacgccgacacucugugcauuggcuaucacgcgaauaacagcacggauaccguugacacaguguuggagaaaaauguaacugugacccauuccgucaacuuacuggaagauaagcacaaugggaaacuauguaagcucagaggaguggcuccccugcaucuugguaaaugcaacauagccggcuggauccuggggaauccugagugugaaucuuugucaacagcaaguagcugguccuacauuguugagaccucuucgucagacaacggaacuugcuauccaggcgauuuuaucgacuacgaagaacucagggagcagcugagcaguguguccucuuucgaacgguuugagauuuucccgaagacaagcuccuggcccaaucacgauucaaacaagggugucaccgccgcuuguccucaugcaggggccaaaaguuuuuauaagaaucugaucuggcucgugaaaaagggaaacagcuacccaaaauuaucuaaguccuauauaaaugacaagcgcaaagaaguacugguucuuuggggcauccaccaccccucaacgagcgcugaucaacagaguuuguaccagaacgccgacgcguacguguucgucggcacuucucgauauuccaagaaauuuaagccugagauugcaauccguccaaaagugagagaucaggaggggaggaugaauuacuauuggacccugguggaacccggagacaagauuacauucgaggccacugguaaccuagucguuccucgguacgcuuuugccauggaacgcaacgcaggcagcgggaucauaauuucggauaccccagugcaugacugcaauacaaccugucaaacgccgaaaggagcuaucaacacuucucuccccuuccagaauauucacccuaucacaaucggcaagugcccaaaguauguaaaauccaccaagcugagacuugccacuggucugaggaacgugcccucaauucagagucggggguuguuuggagcgauagccggcuucaucgagggcggguggacaggaauggucgacgguugguacggcuaucaucaccagaaugaacaagggagcggauacgcagcugaucucaaauccacccagaacgccauugacgagaucacgaauaaggugaacucuguuauagagaaaaugaauacccaguuuacagcugugggcaaggaguucaaccaccuggagaagcgcauugaaaauuuaaacaaaaaggucgaugacgguuuccuggauaucuggacuuacaaugccgagcuccuugugcuguuggaaaacgagcgaacccuagacuaucaugauagcaauguaaagaaccuguacgagaagguuagaucacagcucaaaaacaaugcaaaggaaaucgggaacggcuguuuugaguucuaucacaagugcgacaauacauguauggaaagugugaaaaacggaacuuacgauuauccuaaguacuccgaggaagccaaacugaauagggaggagauugacggcgucaaacuugaaagcacccggaucuaucaaauucuggcuauauacucuacaguggcgucaaguuugguccucgugguuagccugggggcaaucuccuuuuggaugugcucuaacggaucguuacagugccguauuuguaucuga

SEQ ID NO: 132307 - RNA, 1701 nt, Artificial Sequence; identical to SEQ ID NO: 130717
  derived and/or modified CDS sequence (opt3) from hemagglutinin__InfluenzaA__ADD74370

SEQ ID NO: 132308 - RNA, 1701 nt, Artificial Sequence; identical to SEQ ID NO: 130717
  derived and/or modified CDS sequence (opt3) from hemagglutinin__InfluenzaA__ADD74398

SEQ ID NO: 132309 - RNA, 1701 nt, Artificial Sequence
  derived and/or modified CDS sequence (opt3) from hemagglutinin__InfluenzaA__ADD74428
augaaggccauccuggugguccuccuuuacaccuucgcuacagcaaacgccgacacucugugcauuggcuaucacgcgaauaacagcacggauaccguugacacaguguuggagaagaauguaacugugacccauuccgucaacuuacuggaagauaagcacaaugggaaacuauguaagcucagaggaguggcuccccugcaucuugguaaaugcaacauagccggcuggauccuggggaauccugagugugaaucuuugucaacagcaaguagcugguccuacauuguugagaccucuucgucagacaacggaacuugcuauccaggcgauuuuaucaauuacgaggaacucagggagcagcugagcaguguguccucuuucgaacgguuugagauuuucccgaagacaagcuccuggcccaaccacgacucaaauaagggugucaccgccgcuuguccucaugcaggggccaaaaguuuuuauaagaaccugaucuggcucgugaaaaagggaaauagcuacccaaaauuaucuaaguccuauauaaacgauaagggcaaagaaguacugguucuuuggggcauccaccaccccucaacgagcgcugaccaacagaguuuguaccagaaugccgaugcguacguguucgucgggacuucucgcuauuccaagaaauuuaagccugagauugcaauccgaccaaaagugcgugaccaggagggaagaaugaacuacuauuggacccuggugaagcccggugauaaaauuacauucgaagccacuggcaaccuagucguuccuagguacgcuuuugccauggagcggaaugcagggagcggaaucauaauuucggacaccccagugcaugauugcaacacaaccugucaaacgccgaagggcgcuaucaauacuucucuccccuuccagaacauucacccuaucacaaucgguaagugcccaaaauauguaaaguccaccaaacugcgccuugccacugggcugagaaaugugcccucaauucagaguaggggauuguuuggcgcgauagccggcuucaucgaagggggauggacagguauggucgacggcugguacggguaucaucaccagaacgagcaaggaagcggcuacgcagcugaccucaaguccacccagaaugccauugauaaaaucacgaacaagguaaauucuguuauagaaaagaugaacacccaguuuacagcuguggguaaagaguucaaucaccuggagaagcggauugaaaacuuaaauaaaaaggucgacgauggguuccuggacaucuggacuuacaacgccgagcuccuugugcuguuggaaaaugagcgcacccuagauuaucaugacagcaacgugaaaaaccuguacgaaaagguucgaucacagcucaagaauaacgcaaaagagaucggcaauggauguuuugaguucuaucacaagugcgauaacacauguauggaaagugugaaaaauggcacuuacgacuauccuaaguacuccgaggaagccaaacugaacagagaggaaauugauggggucaaacuugagagcaccaggaucuaucaaauucuggcuauauacucuacaguggcgucaaguuugguccucgugguuagccugggagcaaucuccuuuuggaugugcucuaaugguucguuacagugccggauuuguaucuga

SEQ ID NO: 132310 - RNA, 1701 nt, Artificial Sequence
  derived and/or modified CDS sequence (opt3) from hemagglutinin__InfluenzaA__ADD74438
augaaggccauccuggugguccuccuuuacaccuucgcuacagcaaacgccgacacucugugcauuggcuaucacgcgaauaacagcacggauaccguugacacaguguuggagaaaaauguaacugugacccauuccgucaacuuacuggaagauaagcacaaugggaaacuauguaagcucagaggaguggcuccccugcaucuugguaaaugcaacauagccggcuggauccuggggaauccugagugugaaucuuugucaacagcaaguagcugguccuacauuguugagaccucuucgucagacaacggaacuugcuauccaggcgauuuuaucgacuacgaggagcucagggagcagcugagcaguguguccucuuucgaacgguuugagauuuucccgaagacaagcuccuggcccaaucacgauucaaacaagggugucaccgccgcuuguccucaugcaggggccaaaaguuuuuauaagaaucugaucuggcucgugaaaaagggaaacagcuacccaaaauuaucuaaguccuauauaaaugacaagggcaaagaaguacugguucuuuggggcauccaccaccccucaacgagcgcugaucaacagaguuuguaccagaacgccgacgcguacguguucgucgggacuucucgcuauuccaagaaauuuaagccugagauugcaauccgaccaaaagugcgugaucaggagggaagaaugaauuacuauuggacccugguggaacccggugacaagauuacauucgaggccacuggcaaccuagucguuccuagguacgcuuuugccauggaacggaacgcagggagcggaaucauaauuucggauaccccagugcaugacugcaauacaaccugucaaacgccgaaaggcgcuaucaacacuucucuccccuuccagaauauucacccuaucacaaucgguaagugcccaaaguauguaaaauccaccaagcugcgccuugccacugggcugagaaacgugcccucaauucagaguaggggauuguuuggcgcgauagccggcuucaucgaagggggauggacagguauggucgacggcugguacggguaucaucaccagaaugaacaaggaagcggcuacgcagcugaucucaaauccacccagaacgccauugacgagaucacgaauaaggugaacucuguuauagagaaaaugaauacccaguuuacagcuguggguaaggaguucaaccaccuggaaaagcggauugaaaauuuaaacaaaaaggucgaugacggguuccuggauaucuggacuuacaaugccgagcuccuugugcuguuggaaaacgagcgcacccuagacuaucaugauagcaauguaaagaaccuguacgagaagguucgaucacagcucaaaaacaaugcaaaggaaaucggcaacggauguuuugaguucuaucacaagugcgacaauacauguauggaaagugugaaaaacggcacuuacgauuauccuaaguacuccgaggaagccaaacugaauagagaggagauugacggggucaaacuugaaccaaccaggaucuaucaaauucuggcuauauacagcacaguggcgucuucauugguccucgugguuagucugggagcaaucagcuuuuggaugugcuccaacgguucuuuacagugccggauuuguaucuga

SEQ ID NO: 132311 - RNA, 1701 nt, Artificial Sequence; identical to SEQ ID NO: 130717
  derived and/or modified CDS sequence (opt3) from hemagglutinin__InfluenzaA__ADD74448

SEQ ID NO: 132312 - RNA, 1701 nt, Artificial Sequence; identical to SEQ ID NO: 130717
  derived and/or modified CDS sequence (opt3) from hemagglutinin__InfluenzaA__ADD74458

SEQ ID NO: 132313 - RNA, 1701 nt, Artificial Sequence
  derived and/or modified CDS sequence (opt3) from hemagglutinin__InfluenzaA__ADD74468
augaaggccauccuggugguccuccuuuacaccuucgcuacagcaaacgccgacacucugugcauuggcuaucacgcgaauaacagcacggauaccguugacacaguguuggagaagaauguaacugugacccauuccgucgauuuacuggaagacaagcacaacgggaaacuauguaagcucagaggaguggcuccccugcaucuugguaaaugcaauauagccggcuggauccuggggaacccugagugugaaucuuugucaacagcaaguagcugguccuacauuguugagaccucuucgucagauaauggaacuugcuauccaggcgacuuuaucgauuacgaggagcucagggagcagcugagcaguguguccucuuucgaacgguuugagauuuucccgaagacaagcuccuggcccaaccacgacucaaauaagggugucaccgccgcuuguccucaugcaggggccaaaaguuuuuauaagaaccugaucuggcucgugaaaaagggaaauagcuacccaaaauuaucuaaguccuauauaaacgauaagggcaaagaaguacugguucuuuggggcauccaccaccccucaacgagcgcugaccaacagaguuuguaccagaaugccgaugcguacguguucgucgggacuucucgcuauuccaagaaauuuaagccugagauuaccauccgaccaaaagugcgugaccaggagggaagaaugaacuacuauuggacacugguggaacccggugauaagauuacuuucgaggcaaccggcaaucuagucguuccuagguacgccuuugcuauggaacggaacgccgggagcggaaucauaauuucggacacaccagugcaugacugcaacaccacgugucaaacuccgaaaggcgcaaucaauacaucucuccccuuccagaacauucacccuaucaccaucgguaagugcccaaaguauguaaaauccacuaagcugcgccuugcuacagggcugagaaaugugcccucaauucagaguaggggauuguuuggcgccauagcgggcuucaucgaagggggauggaccgguauggucgauggcugguacggguaucaucaccagaacgaacaaggaagcggcuacgccgcagaccucaaauccacgcagaaugcuauugaugagaucaccaacaagguaaauucuguuauagagaaaaugaacacacaguuuacugccguggguaaggaguucaaucaccuggaaaagcggauugaaaacuuaaauaaaaaggucgacgauggguuccuggacaucuggaccuacaacgcugagcuccuugugcuguuggaaaaugagcgcacacuagauuaucaugacagcaacgugaaaaaucuguacgagaagguucgaucacagcucaaaaacaacgccaaggaaaucggcaauggauguuuugaguucuaucacaagugcgauaacacuuguauggaaagugugaaaaauggcaccuacgacuauccuaaguacuccgaggaagcaaaacugaacagagaggagauugauggggucaaacuugaaagcacaaggaucuaucaaauucuggccauauacucuaccguggcuucaaguuugguccucgugguuagccugggagcgaucuccuuuuggaugugcucuaaugguucguuacagugccggauuuguaucuga

SEQ ID NO: 132314 - RNA, 1701 nt, Artificial Sequence
  derived and/or modified CDS sequence (opt3) from hemagglutinin__InfluenzaA__ADD74488
augaaggccauccuggugguccuccuuuacaccuucgcuacagcaaacgccgacacucugugcauuggcuaucacgcgaauaacagcacggauaccguugacacaguguuggagaaaaauguaacugugacccauuccgucaacauauuagaagauaagcacaaugggaaacuguguaagcuaagaggaguggcuccccuccaucuggguaaaugcaacaucgccggcuggauucuugggaauccugagugugaaucucugucaacagcaaguagcugguccuacaucguugagaccucuucgucagacaacggaacuugcuauccaggcgauuuuauugacuacgaagaguugagggagcagcucagcaguguguccucuuucgaacgguuugagaucuucccgaagacaagcuccuggcccaaucacgauucaaacaagggugucaccgccgcuuguccucaugcaggggccaaaaguuuuuauaagaaucugauauggcuggugaaaaagggaaacagcuacccaaaacucucuaaguccuauaucaaugacaagggcaaagaaguauuaguucuguggggcauucaccaccccucaacgagcgcugaucaacagagucuuuaccagaacgccgacgcguacguguucgucgggacuucucgcuauuccaagaaauuuaagccugagaucgcaauucgaccaaaagugcgugaucaggagggaagaaugaauuacuauuggaccuugguggaacccggugacaagaucacauucgaggccacuggcaaccuggucguuccuagguacgcuuuugccauggaacggaacgcagggagcggaauaauuaucucggauaccccagugcaugacugcaauacaaccugucaaacgccgaaaggcgcuauuaacacuucucuacccuuccagaauauccacccuaucacaauugguaagugcccaaaguauguaaaauccaccaagcuccgccuggccacugggcuuagaaacgugcccucaauacagaguaggggacuguuuggcgcgaucgccggcuucauugaagggggauggacagguauggucgacggcugguacggguaucaucaccagaaugaacaaggaagcggcuacgcagcugauuugaaauccacccagaacgccaucgacgagauaacgaauaaggugaacucuguuauugagaaaaugaauacccaguuuacagcuguggguaaggaguucaaccaccucgagaagcggaucgaaaaucugaacaaaaaggucgaugacggguucuuagauaucuggacuuacaaugccgagcugcucgugcuucuggaaaacgagcgcaccuuggacuaucaugauagcaauguuaaaaaccuauacgagaagguacgaucacagcugaaaaacaaugcaaaggaaauuggcaacggauguuuugaguucuaucacaagugcgacaauacauguauggaaagugugaaaaacggcacuuacgauuauccuaaguacuccgaggaagccaaacucaauagagaggagaucgacggggucaagcuggaaagcaccaggauuuaucaaauacuugcuaucuacucuacaguggcgucaagucuggucuuggugguuagccucggagcaauuuccuuuuggaugugcucuaacgguucgcugcagugccggaucuguaucuga

SEQ ID NO: 132315 - RNA, 1701 nt, Artificial Sequence; identical to SEQ ID NO: 130717
  derived and/or modified CDS sequence (opt3) from hemagglutinin__InfluenzaA__ADD74498

SEQ ID NO: 132316 - RNA, 1701 nt, Artificial Sequence
  derived and/or modified CDS sequence (opt3) from hemagglutinin__InfluenzaA__ADD74508
augaaggccauccuggugguccuccuuuacaccuucgcuacagcaaacgccgacacucugugcauuggcuaucacgcgaauaacagcacggauaccguugacacaguguuggagaaaaauguaacugugacccauuccgucgauuuacuggaagacaagcacaacgggaaacuauguaagcucagaggaguggcuccccugcaucuugguaaaugcaauauagccggcuggauccuggggaacccugagugugaaucuuugucaacagcaaguagcugguccuacauuguugagaccucuucgucagauaauggaacuugcuauccaggcgacuuuaucgauuacgaagaacucagggagcagcugagcaguguguccucuuucgaacgguuugagauuuucccgaagacaagcuccuggcccaaccacgacucaaauaagggugucaccgccgcuuguccucaugcagaagccaaaaguuuuuauaagaaccugaucuggcucgugaaaaaggggaauagcuacccaaaauuaucuaaguccuauauaaacgauaagggaaaagagguacugguucuuuggggcauccaccaccccucaacgagcgcugaccaacagaguuuguaccagaaugccgaugcguacguguucgucggcacuucucgcuauuccaagaaauuuaagccugagauugcaauccgaccaaaagugcgugaccaggaagggagaaugaacuacuauuggacccugguggagcccggagauaagauuacauucgaagccacugguaaucuagucguuccuagguacgcuuuugccauggagcggaacgcaggcagcgggaucauaauuucggacaccccagugcaugacugcaacacaaccugucaaacgccgaaaggagcuaucaauacuucucuccccuuccagaacauucacccuaucacaaucggcaagugcccaaaguauguaaaauccaccaagcugcgccuugccacuggucugagaaaugugcccucaauucagaguaggggguuguuuggagcgauagccggcuucaucgaaggcggguggacaggaauggucgaugguugguacggcuaucaucaccagaacgagcaagggagcggauacgcagcugaccucaaauccacccagaaugccauugaugagaucacgaacaagguaaauucuguuauagaaaagaugaacacccaguuuacagcugugggcaaggaguucaaucaccuggaaaagcggauugagaacuuaaauaaaaaggucgacgaugguuuccuggacaucuggacuuacaacgccgaacuccuugugcuguuggagaaugagcgcacccuagauuaucaugacagcaacgugaaaaaucuguacgaaaagguucgaucacagcucaaaaacaacgcaaaggagaucgggaauggcuguuuugaguucuaucacaagugcgauaacacauguauggagagugugaaaaauggaacuuacgacuauccuaaguacuccgaagaggccaaacugaacagagaggaaauugauggcgucaaacuugagagcaccaggaucuaucaaauucuggcuauauacucuacaguggcgucaaguuugguccucgugguuagccugggggcaaucuccuuuuggaugugcucuaauggaucguuacagugccggauuuguaucuga

SEQ ID NO: 132317 - RNA, 1701 nt, Artificial Sequence
  derived and/or modified CDS sequence (opt3) from hemagglutinin__InfluenzaA__ADD74518
augaaggccauccuggugguccuccuuuacaccuucgcuacagcaaacgccgacacucugugcauuggcuaucacgcgaauaacagcacggauaccguugacacaauauuggagaaaaaugugacuguaacccauuccgugaacuuacuggaagauaagcacaaugggaaacuauguaagcucagaggagucgcuccccugcaucuugguaaaugcaacaucgccggcuggauucuggggaauccugagugugaaucuuugucaacagcaaguagcugguccuacaucguggagaccucuucgucagacaacggaacuugcuauccaggcgauuuuauugacuacgaggagcucagggagcagcugagcaguguuuccucuuucgaacgguuugagaucuucccgaagacaagcuccuggcccaaucacgauucaaacaagggugugaccgccgcuuguccucaugcaggggccaaaaguuuuuauaagaaucugauauggcucgucaaaaagggaaacagcuacccaaaauuaucuaaguccuauaucaaugacaagggcaaagaaauucuggugcuuuggggcauccaccaccccucaacgagcgcugaucaacagaguuuguaccagaacgccgacgcguacguauucguugggacuucucgcuauuccaagaaauuuaagccugagauugcaauccgaccaaaagugcgugaucaggagggaagaaugaauuacuauuggacccuggucgaacccggugacaagauaacauucgaggccacuggcaaccuaguggugccuagguacgcuuuugccauggaacggaacaccgggagcggaauuaucauuucggauacaccaguccaugacugcaauaccacgugucaaacuccgaaaggcgcaaucaacacaucucuccccuuccagaauauccacccuauuaccauagguaagugcccaaaguauguuaaauccacuaagcugcgccuugcuacagggcugagaaacgugcccucaauccagaguaggggauuguuuggcgccauugcgggcuucaucgaagggggauggaccgguaugguagacggcugguacggguaucaucaccagaaugaacaaggaagcggcuacgccgcagaucucaaauccacgcagaacgcuauagacgagauuaccaauaaggugaacucugucaucgagaaaaugaauacacaguuuacugccguggguaaggaguucaaccaccuggaaaagcggaucgaaaauuuaaacaaaaagguugaugacggguuccuggauauuuggaccuacaaugcugagcuccuugugcuguuggaaaacgagcgcacacuagacuaucaugauagcaaugucaaaaaccuguacgagaaggugcgaucacagcucaaaaacaaugccaaggaaaucggcaacggauguuuugaguucuaucacaagugcgacaauacuuguauggaaaguguaaagaacggcaccuacgauuauccuaaguacuccgaggaagcaaaacugaauagagaggagauugacgggguuaaacuugaaagcacaaggauauaucaaauccuggccauuuacucuaccguggcuucaaguuugguccucguggucagccugggagcgaucuccuuuuggaugugcucuaacgguucguuacagugccggaucuguauuuga

SEQ ID NO: 132318 - RNA, 1701 nt, Artificial Sequence
  derived and/or modified CDS sequence (opt3) from hemagglutinin__InfluenzaA__ADD74528
augaaggccauccuggugguccuccuuuacaccuucgcuacagcaaacgccgacacucugugcauuggcuaucacgcgaauaacagcacggauaccguugacacaguguuggagaagaauguaacugugacccauuccgucaacuuacuggaagauaagcacaaugggaaacuauguaagcucagaggaguggcuccccugcaucuugguaaaugcaacauagccggcuggauccuggggaauccugagugugaaucuuugucaacagcaaguagcugguccuacauuguugagaccucuucgucagacaacggaacuugcuauccaggcgauuuuaucaauuacgaggagcucagggagcagcugagcaguguguccucuuucgaacgguuugagauuuucccgaagacaagcuccuggcccaaccacgacucaaauaagggugucaccgccgcuuguccucaugcaggggccaaaaguuuuuauaagaaccugaucuggcucgugaaaaagggaaauagcuacccaaaauuaucuaaguccuauauaaacgauaagggcaaagaaguacugguucuuuggggcauccaccaccccucaacgagcgcugaccaacagaguuuguaccagaaugccgaugcguacguguucgucgggacuucucgcuauuccaagaaauuucagccugagauugcaauccgaccaaaggugcgugaccaagagggaagaaugaacuacuauuggacccugguggaacccggugauaaaauuacauucgaggccacuggcaaccuagucguuccuagguacgcuuuugccauggaacggaaugcagggagcggaaucauaauuucggacaccccagugcaugauugcaacacaaccugucagacgccgaagggcgcuaucaauacuucucuccccuuccagaacauucacccuaucacaaucgguaaaugcccaaaguauguaaaguccaccaaacugcgccuugccacugggcugagaaaugugcccucaauucagaguaggggauuguuuggcgcgauagccggcuucaucgaagggggauggacagguauggucgacggcugguacggguaucaucaccaaaacgaacagggaagcggcuacgcagcugaccucaaguccacccagaaugccauugauaaaaucacgaacaagguaaauucuguuauagagaaaaugaacacccaguuuacagcuguggguaaggaguucaaucaccuggaaaagcggauugagaacuuaaauaaaaaggucgacgauggguuccuggacaucuggacuuacaacgccgaacuccuugugcuguuggagaaugaacgcacccuagauuaucaugacagcaacgugaaaaaccuguacgagaagguucgaucacaacucaaaaauaacgcaaaggagaucggcaauggauguuuugaguucuaucacaagugcgauaacacauguauggaaagugugaaaaauggcacuuacgacuauccuaaguacuccgaagaggccaaacugaacagagaagagauugauggggucaaacuugagagcaccaggaucuaucagauucuggcuauauacucuacaguggcgucaaguuugguccucgugguuagccugggagcaaucuccuuuuggaugugcucuaaugguucguuacagugccggauuuguaucuga

SEQ ID NO: 132319 - RNA, 1701 nt, Artificial Sequence
  derived and/or modified CDS sequence (opt3) from hemagglutinin__InfluenzaA__ADD74538
augaaggccauccuggugguccuccuuuacaccuucgcuacagcaaacgccgacacucugugcauuggcuaucacgcgaauaacagcacggauaccguugacacaguguuggagaaaaauguaacugugacccauuccgucaacuuacuggaagauaagcacaaugggaaacuauguagacucaggggaguggcuccccugcaucuugguaagugcaacauagccggcuggauccuggggaauccugagugugaaucuuugucaacagcaaguagcugguccuacauuguugagaccucuucgucagacaacggaacuugcuauccaggcgauuuuaucgacuacgaggagcuccgggagcagcugagcaguguguccucuuucgaacgcuuugagauuuucccgaaaacaagcuccuggcccaaucacgauucaaacaagggugucaccgccgcuuguccucaugcaggggccaagaguuuuuauaaaaaucugaucuggcucgugaagaaaggaaacagcuacccaaaguuaucuaaauccuauauaaaugacaagggcaaggaaguacugguucuuuggggcauccaccaccccucaacgagcgcugaucaacagaguuuguaccagaacgccgacgcguacguguucgucgggacuucucgauauuccaaaaaguuuaaaccugagauugcaauccguccaaaggugagagaucaggagggaaggaugaauuacuauuggacccugguggaacccggugacaaaauuacauucgaggccacuggcaaccuagucguuccucgguacgcuuuugccauggaacgcaacgcagggagcggaaucauaauuucggauaccccaguguaugacugcaauacaaccugucaaacgccgaagggcgcuaucaacacuucucuccccuuccagaauauucauccuaucacaaucgguaaaugcccaaaguacguaaaguccaccaaacugagacuugccacugggcugaggaacgugcccucaauucagagucggggauuguuuggcgcgauagccggcuucaucgaagggggauggacagguauggucgacggcugguauggguaccaccaucagaaugaacaaggaagcggcuacgcagcugaucucaaguccacccagaacgccauugacgagaucacgaauaaagugaacucuguuauagagaagaugaauacccaguuuacagcuguggguaaagaguucaaccaccuggaaaagcgcauugaaaauuuaaacaagaaagucgaugacggguuccuggauaucuggacuuauaaugccgagcuccuugugcuguuggaaaacgagcgaacccuagacuaccacgauagcaauguaaagaaccuguaugagaaaguuagaucacagcucaagaacaaugcaaaagaaaucggcaacggauguuuugaguucuaccauaagugcgacaauacauguauggaaagugugaagaacggcacuuaugauuacccuaaauauuccgaggaagccaagcugaauagggaggagauugacggggucaaacuugaaagcacccggaucuaccaaauucuggcuauauacucuacaguggcgucaaguuugguccucgugguuagccugggagcaaucuccuuuuggaugugcucuaacgguucguuacagugccguauuuguaucuga

SEQ ID NO: 132320 - RNA, 1701 nt, Artificial Sequence; identical to SEQ ID NO: 132314
  derived and/or modified CDS sequence (opt3) from hemagglutinin__InfluenzaA__ADD74548

SEQ ID NO: 132321 - RNA, 1701 nt, Artificial Sequence; identical to SEQ ID NO: 131881
  derived and/or modified CDS sequence (opt3) from hemagglutinin__InfluenzaA__ADD74558

SEQ ID NO: 132322 - RNA, 1701 nt, Artificial Sequence; identical to SEQ ID NO: 132269
  derived and/or modified CDS sequence (opt3) from hemagglutinin__InfluenzaA__ADD74568

SEQ ID NO: 132323 - RNA, 1701 nt, Artificial Sequence
  derived and/or modified CDS sequence (opt3) from hemagglutinin__InfluenzaA__ADD74578
augaaggccauccuggugguccuccuuuacaccuucgcuacagcaaacgccgacacucugugcauuggcuaucacgcgaauaacagcacggauaccguugacacaguguuggagaaaaauguaacugugacccauuccgucaacuuacuggaagauaagcacaaugggaaacuauguaagcucagaggaguggcuccccugcaucuugguaaaugcaacauagccggcuggauccuggggaauccugagugugaaucuuugucaacaaguagcuccuggucuuacauuguugagaccucgucaagcgacaacggaacuugcuauccaggcgauuuuaucgacuacgaggagcucagggagcagcugaguuccgugucuagcuucgaacgguuugagauuuucccgaagacauccucauggcccaaucacgauaguaacaagggugucaccgcagccuguccucaugcuggggcaaagagcuuuuauaagaaucugaucuggcucgugaaaaagggaaacucuuacccaaaauuauccaagucauauauaaaugacaagggcaaagaaguacugguucuuuggggcauccaccaccccagcacgaguacugaucaacagucuuuguaccagaacgccgacgcuuacguguucgucgggaccucccgcuauagcaagaaauuuaagccugagauugccauccgaccaaaagugcgugaucaggagggaagaaugaauuacuauuggacacugguggaacccggugacaagauuacuuucgaggcgaccggcaaccuagucguuccuagguacgcauuugccauggaacggaacgcugggucgggaaucauaauuucugauacaccagugcaugacugcaauaccacgugucaaacuccgaaaggcgccaucaacacaucccuccccuuccagaauauucacccuaucaccaucgguaagugcccaaaguauguaaaaucaacuaagcugcgccuugcaacagggcugagaaacgugcccaguauucagagcaggggauuguuuggcgcuauagccggcuucaucgaagggggauggaccgguauggucgacggcugguacggguaucaucaccagaaugaacaaggauccggcuacgcggccgaucucaaaucuacgcagaacgcaauugacgagaucaccaauaaggugaacagcguuauagagaaaaugaauacacaguuuacugcuguggguaaggaguucaaccaccuggaaaagcggauugaaaauuuaaacaaaaaggucgaugacggguuccuggauaucuggaccuacaaugccgagcuccuugugcuguuggaaaacgagcgcacacuagacuaucaugauucaaauguuaaaaaccuguacgagaagguacgaagucagcucaaaaacaaugcuaaggaaaucggcaacggauguuuugaguucuaucacaagugcgacaauacuuguauggaauccgugaaaaacggcaccuacgauuauccuaaguacagcgaggaagccaaacugaauagagaggagauugacggggucaaacuugaaucuacaaggaucuaucaaauucuggcaauauacucaaccguggccaguagcuugguccucgugguuucccugggagcuaucucuuuuuggaugugcucgaacgguagcuuacagugccggauuuguaucuga

SEQ ID NO: 132324 - RNA, 1701 nt, Artificial Sequence
  derived and/or modified CDS sequence (opt3) from hemagglutinin__InfluenzaA__ADD74588
augaaggccauccuggugguccuccuuuacaccuucgcuacagcaaacgccgacacucugugcauuggcuaucacgcgaauaacagcacggauaccguugacacaguguuggagaaaaauguaacugugacccauuccgucaacuuacuggaagauaagcacaaugggaaacuauguaagcucagaggaguggcuccccugcaucuugguaaaugcaacauagccggcuggauccuggggaauccugagugugaaucuuugucaacagcaaguagcugguccuacauuguugagaccucuucgucagacaacggaacuugcuauccaggcgauuuuaucgacuacgaagaacucagggagcagcugagcaguguguccucuuucgaacgguuugagauuuucccgaagacaagcuccuggcccaaucacgauucaaacaagggugucaccgccgcuuguccucaugcaggggccaaaaguuuuuauaagaaucugaucuggcucgugaaaaagggaaacagcuacccaaaauuaucuaaguccuauauaaaugacaagggcaaagaaguacugguucuuuggggcauccaccaccccucaacgagcgaugggcaacagaguuuguaccagaacgcugacgccuacguguucgucggaacuucucgcuauuccaagaaauuuaagccugagauugcgauccgaccaaaagugcgugaucaggaggguagaaugaauuacuauuggacccugguggaacccggcgacaagauuacauucgaggcaacugggaaccuagucguuccuagguacgccuuugcuauggaacggaacgccggaagcggcaucauaauuucggauaccccagugcaugacugcaauacaaccugucaaacgccgaaaggugcaaucaacacuucucuccccuuccagaauauucacccuaucacaaucgggaagugcccaaaguauguaaaauccaccaagcugcgccuugcuacuggacugagaaacgugcccucaauucagaguaggggcuuguuuggcgccauagcgggguucaucgagggagguuggacaggcauggucgacgggugguacggauaucaucaccagaaugaacaaggcagcgguuacgccgcagaucucaaauccacccagaacgcuauugacgagaucacgaauaaggugaacucuguuauagagaaaaugaauacccaguuuacagccguggggaaggaguucaaccaccuggagaagcggauugaaaauuuaaacaaaaaggucgaugacggcuuccuggauaucuggacuuacaaugcugagcuccuugugcuguuggaaaacgagcgcacccuagacuaucaugauagcaauguuaaaaaccuguacgagaagguacgaucacagcucaaaaacaaugccaaggaaaucggaaacggcuguuuugaguucuaucacaagugcgacaauacauguauggaaagugugaaaaacgggacuuacgauuauccuaaguacuccaaagaggcaaagcugaauagagaagagauugacggagucaaacuugagagcaccaggaucuaucaaauucuggccauauacucuacaguggcuucaaguuugguccucgugguuagccugggugcgaucuccuuuuggaugugcucuaacggcucguuacagugccggauuuguaucuga

SEQ ID NO: 132325 - RNA, 1701 nt, Artificial Sequence; identical to SEQ ID NO: 132269
  derived and/or modified CDS sequence (opt3) from hemagglutinin__InfluenzaA__ADD74598

SEQ ID NO: 132326 - RNA, 1701 nt, Artificial Sequence; identical to SEQ ID NO: 132269
  derived and/or modified CDS sequence (opt3) from hemagglutinin__InfluenzaA__ADD74608

SEQ ID NO: 132327 - RNA, 1701 nt, Artificial Sequence; identical to SEQ ID NO: 131881
  derived and/or modified CDS sequence (opt3) from hemagglutinin__InfluenzaA__ADD74618

SEQ ID NO: 132328 - RNA, 1701 nt, Artificial Sequence
  derived and/or modified CDS sequence (opt3) from hemagglutinin__InfluenzaA__ADD74628
augaaggccauccuggugguccuccuuuacaccuucgcuacagcaaacgccgacacucugugcauuggcuaucacgcgaauaacagcacggauaccguugacacaauauuggagaaaaaugugacuguaacccauuccgugaacuuacuggaagauaagcacaaugggaaacuauguaagcucagaggagucgcuccccugcaucuugguaaaugcaacaucgccggcuggauucuggggaauccugagugugaaucuuugucaacagcaaguagcugguccuacaucguggagaccucuucgucagacaacggaacuugcuauccaggcgauuuuauugacuacgaagaacucagggagcagcugagcaguguuuccucuuucgaacgguuugagaucuucccgaagacaagcuccuggcccaaucacgauucaaacaagggugugaccgccgcuuguccucaugcaggggccaaaaguuuuuauaagaaucugauauggcucgucaaaaagggaaacagcuacccaaaauuaucuaaguccuauaucaaugacaagggcaaagaaauucuggugcuuuggggcauccaccaccccucaacgagcgcugaucaacagaguuuguaccagaacgccgacgcguacguauucguugggacuucucgcuauuccaagaaauuuaagccugagauugcaauccgaccaaaagugcgugaucaggagggaagaaugaauuacuauuggacccuggucgaacccggugacaagauaacauucgaggccacuggcaaccuaguggugccuagguacgcuuuugccauggagaaaaacgcagggagcggaauuaucauuucggauaccccaguccaugacugcaauacaaccugucaaacgccgaagggcgcuaucaacacuucucuccccuuccagaauauccacccuauuacaauagguaagugcccaaaauauguuaaguccaccaaacugcggcuugccacugggcugcgcaacgugcccucaauccagaguagaggauuguuuggcgcgauugccggcuucaucgaagggggauggacagguaugguagacggcugguacggguaucaucaccagaaugaacaaggaagcggcuacgcagcugaucucaaguccacccagaacgccauagacgagauuacgaauaaagugaacucugucaucgagaagaugaauacccaguuuacagcuguggguaaggaguucaaccaccuggagaaaaggaucgaaaauuuaaacaagaaaguugaugacggguuccuggauauuuggacuuacaaugccgagcuccuugugcuguuggaaaacgagcggacccuagacuaucaugauagcaaugucaagaaccuguacgagaaagugcgcucacagcucaagaacaaugcaaaggaaaucggcaacggauguuuugaguucuaucacaaaugcgacaauacauguauggaaaguguaaagaacggcacuuacgauuauccuaaauacuccgaggaagccaagcugaaucgagaggagauugacgggguuaaacuugaaagcaccagaauauaucaaauccuggcuauuuacucuacaguggcgucaaguuugguccucguggucagccugggagcaaucuccuuuuggaugugcucuaacgguucguuacagugcaggaucuguauuuga

SEQ ID NO: 132329 - RNA, 1701 nt, Artificial Sequence; identical to SEQ ID NO: 131818
  derived and/or modified CDS sequence (opt3) from hemagglutinin__InfluenzaA__ADD74648

SEQ ID NO: 132330 - RNA, 1701 nt, Artificial Sequence
  derived and/or modified CDS sequence (opt3) from hemagglutinin__InfluenzaA__ADD74658
augaaggccauccuggugguccuccuuuacaccuucgcuacagcaaacgccgacacucugugcauuggcuaucacgcgaauaacagcacggauaccguugacacaguguuggagaaaaauguaacugugacccauuccgucaacuuacuggaagauaagcacaaugggaaacuauguaagcucagaggaguggcuccccugcaucuugguaaaugcaacauagccggcuggauccuggggaauccugagugugaaucuuugucaacagcaaguagcugguccuacauuguugagaccucuucgucagacaacggaacuugcuauccaggcgauuuuaucgacuacgaagaacucagggagcagcugagcaguguguccucuuucgaacgguuugagauuuucccgaagacaagcuccuggcccaaucacgauucaaacaagggugucaccgccgcuuguccucaugcaggggccaaaaguuuuuauaagaaucugaucuggcucgugaaaaagggaaacagcuacccaaaauuaucuaaguccuauauaaaugacaagggcaaagaaguacugguucuuuggggcauccaccaccccucaacgagcgcugaucaacagaguuuguaccagaacgccgacucuuacguguucgucgggacuucccgcuauagcaagaaauuuaagccugagauugcgauccgaccaaaagugcgugaucaggagggaagaaugaauuacuauuggacccugguggaacccggugacaagauuacauucgaggcaacuggcaaccuagucguuccuagguacgccuuugcuauggaacggaacgccgggucgggaaucauaauuucugauaccccagugcaugacugcaauacaaccugucaaacgccggagggcgcaaucaacacuucccuccccuuccagaauauucacccuaucacaaucgguaaaugcccaaaguauguaaagucaaccaaacugcgccuugcuacugggcugagaaacgugcccaguauucagagcaggggauuguuuggcgccauagcgggcuucaucgaagggggauggacagguauggucgacggcugguacggguaucaucaccagaaugagcaaggauccggcuacgccgcagaucucaagucuacccagaacgcuauugacgagaucacgaauaaagugaacagcguuauagaaaagaugaauacccaguuuacagccguggguaaagaguucaaccaccuggaaaagcggauugagaauuuaaacaagaaagucgaugacggguuccuggauaucuggacuuacaaugcugaacuccuugugcuguuggagaacgagcgcacccuagacuaucaugauucaaauguaaagaaccuguacgaaaaaguucgaagucagcucaagaacaaugccaaagagaucggcaacggauguuuugaguucuaucacaagugcgacaauacauguauggaguccgugaagaacggcacuuacgauuauccuaaauacagcgaagaggcaaagcugaauagagaggaaauugacggggucaaacuugagucuaccaggaucuaucaaauucuggccauauacucaacaguggcuaguagcuugguccucgugguuucccugggagcgaucucuuuuuggaugugcucgaacgguagcuuacagugccggauuuguaucuga

SEQ ID NO: 132331 - RNA, 1701 nt, Artificial Sequence; identical to SEQ ID NO: 132269
  derived and/or modified CDS sequence (opt3) from hemagglutinin__InfluenzaA__ADD74668

SEQ ID NO: 132332 - RNA, 1701 nt, Artificial Sequence; identical to SEQ ID NO: 132309
  derived and/or modified CDS sequence (opt3) from hemagglutinin__InfluenzaA__ADD74678

SEQ ID NO: 132333 - RNA, 1701 nt, Artificial Sequence; identical to SEQ ID NO: 132269
  derived and/or modified CDS sequence (opt3) from hemagglutinin__InfluenzaA__ADD74688

SEQ ID NO: 132334 - RNA, 1701 nt, Artificial Sequence
  derived and/or modified CDS sequence (opt3) from hemagglutinin__InfluenzaA__ADD74698
augaaggccauccuggugguccuccuuuacaccuucgcuacagcaaacgccgacacucugugcauuggcuaucacgcgaauaacagcacggauaccguugacacaguguuggagaaaaauguaacugugacccauuccgucaacuuacuggaagauaagcacaaugggaaacuauguaagcucagaggaguggcuccccugcaucuugguaaaugcaacauagccggcuggauccuggggaauccugagugugaaucuuugucaacagcaaguagcugguccuacauuguugagaccucuucgucagacaacggaacuugcuauccaggcgauuuuaucaauuacgaggagcucagggagcagcugagcaguguguccucuuucgaacgguuugagauuuucccgaagacaagcuccuggcccaaccacgacucaaauaagggugucaccgccgcuuguccucaugcaggggccaaaaguuuuuauaagaaccugaucuggcucgugaaaaagggaaauagcuacccaaaauuaucuaaguccuauauaaacgauaagggcaaagaaguacugguucuuuggggcauccaccaccccucaacgagcgcugaccaacagaguuuguaccagaaugccgaugcguacguguucgucgggacuucucgcuauuccaagaaauuuaagccugagauugcaauccgaccaaaagugcgugaccaggagggaagaaugaacuacuauuggacccugguggaacccggugauaagauuacauucgaggccacuggcaaccuagucguuccuagguacgcuuuugccauggaacggaaugcagggagcggaaucauaauuucggacaccccagugcaugauugcaacacaaccugucaaacgccgaaaggcgcuaucaauacuucucuccccuuccagaacauucacccuaucacaaucgguaagugcccaaaguauguaaaauccaccaagcugcgccuugccacugggcugagaaaugugcccucaauucagaguaggggauuguuuggcgcgauagccggcuucaucgaagggggauggacagguauggucgacggcugguacggguaucaucaccagaacgaacaaggaagcggcuacgcagcugaccucaaauccacccagaaugccauugauaagaucacgaacaaaguuaauucugugauagagaagaugaacacccaguuuacagcuguggguaaggaguucaaucaccuggaaaaacggauugagaacuuaaauaagaaagucgacgauggguuccuggacaucuggacuuacaacgccgaacuccuugugcuguuggagaaugaacgcacccuagauuaucaugacagcaacguaaagaaccuguacgagaaaguucgaaaucagcucaagaacaaugcaaaggagaucggcaacggauguuuugaguucuaucacaaaugcgauaauacauguauggaaucagugaagaacggcacuuacgacuauccuaaauacagugaagaggccaagcugaauagagaagagauugauggggucaaacuugaguccaccaggaucuaucaaauucuggcuauauacagcacaguggcgucuucauugguccucgugguuagucugggagcaaucagcuuuuggaugugcuccaacgguucuuuacagugccggauuuguaucuga

SEQ ID NO: 132335 - RNA, 1701 nt, Artificial Sequence; identical to SEQ ID NO: 132269
  derived and/or modified CDS sequence (opt3) from hemagglutinin__InfluenzaA__ADD74708

SEQ ID NO: 132336 - RNA, 1701 nt, Artificial Sequence
  derived and/or modified CDS sequence (opt3) from hemagglutinin__InfluenzaA__ADD74728
augaaggccauccuggugguccuccuuuacaccuucgcuacagcaaacgccgacacucugugcauuggcuaucacgcgaauaacagcacggauaccguugacacaguguuggagaaaaauguaacugugacccauuccgucaacuuacuggaagauaagcacaaugggaaacuauguaagcucagaggaguggcuccccugcaucuugguaaaugcaacauagccggcuggauccuggggaauccugagugugaaucuuugucaacagcaaguagcugguccuacauuguugagaccucuucgucagacaacggaacuugcuauccaggcgauuuuaucgacuacgaggagcucagggagcagcugagcaguguguccucuuucgaacgguuugagauuuucccgaagacaagcuccuggcccgaucacgacucaaauaagggugucaccgccgcuuguccucaugcaggggccaaaaguuuuuauaagaaccugaucuggcucgugaaaaagggaaauagcuacccaaaauuaucuaaguccuauauaaacgauaagggcaaagaaguacugguucuuuggggcauccaccaccccucaacgagcgcugaccaacagaguuuguaccagaaugccgaugcguacguguucgucgggacuucucgcuauuccaagaaauuuaagccugagauugcaauccgaccaaaagugcgugaccaggagggaagaaugaacuacuauuggacccugguggaacccggugauaagauuacauucgaggccacuggcaaucuagucguuccuagguacgcuuuugccauggaacggaacgcagggagcggaaucauaauuucggacaccccagugcaugacugcaacacaaccugucaaacgccgaaaggcgcuaucaauacuucucuccccuuccagaacauucacccuaucacaaucgguaagugcccaaaguauguaaaauccaccaagcugcgccuugccacugggcugagaaaugugcccucaauucagaguaggggauuguuuggcgcgauagccggcuucaucgaagggggauggacagguauggucgauggcugguacggguaucaucaccagaacgaacaaggaagcggcuacgcagcugaccucaaauccacccagaaugccauugauaagaucacgaacaaaguuaauucugugauagagaagaugaacacccaguuuacagcuguggguaaggaguucaaucaccuggaaaaacggauugagaacuuaaauaagaaagucgacgauggguuccuggacaucuggacuuacaacgccgaacuccuugugcuguuggagaaugaacgcacccuagauuaucaugacagcaacguaaagaaucuguacgagaaaguucgaucacagcucaagaacaacgcaaaggagaucggcaauggauguuuugaguucuaucacaaaugcgauaacacauguauggaaagugugaagaauggcacuuacgacuauccuaaauacuccgaagaggccaagcugaacagagaagagauugauggggucaaacuugagagcaccaggaucuaucaaauucuggcuauauacucuacaguggcgucaagugucguguugguugugagccucggagcaaucuccuuuuggaugugcucuaaugguucgcugcagugccggauuuguaucuga

SEQ ID NO: 132337 - RNA, 1701 nt, Artificial Sequence
  derived and/or modified CDS sequence (opt3) from hemagglutinin__InfluenzaA__ADD74738
augaaggccauccuggugguccuccuuuacaccuucgcuacagcaaacgccgacacucugugcauuggcuaucacgcgaauaacagcacggauaccguugacacaguguuggagaaaaauguaacugugacccauuccgucaacuuacuggaagauaagcacaaugggaaacuauguaagcucagaggaguggcuccccugcaucuugguaaaugcaacauagccggcuggauccuggggaauccugagugugaaucuuugucaacagcaaggaguuggagcuacauuguugagaccuccucuucggacaacggaacuugcuauccaggcgauuuuaucgacuacgaagaacuccgggagcagcugucaagcgugaguuccuucgaacgcuuugagauuuucccgaagacaucuagcuggcccaaucacgauuccaacaagggugucaccgccgcuuguccucaugcaggggccaaaucauuuuauaagaaucugaucuggcucgugaaaaagggaaacaguuacccaaaauuaagcaagucuuauauaaaugacaagggcaaagaaguacugguucuuuggggcauccaccaccccuccacgucagcugaucaacagagcuuguaccagaacgccgacgcguacguguucgucgggaccaguggauauucuaagaaauuuaagccugagauugcaauccgaccaaaagugcgugaucaggaggguagaaugaauuacuauuggacucugguggaacccggcgacaagauuacauucgaggccacugggaaccuagucguuccuagguacgcuuuugccauggaacggaacgcaggauccggcaucauaauuagcgauaccccagugcaugacugcaauacaaccugucaaacgccgaaaggugcuaucaacacuucgcuccccuuccagaauauucacccuaucacaaucgggaagugcccaaaguauguaaaaucuaccaagcugcgccuugccacuggacugagaaacgugcccuccauucagucaaggggcuuguuuggcgcgauagccggguucaucgagggagguuggacaggcauggucgacgggugguacggauaucaucaccagaaugaacaaggcagugguuacgcagcugaucucaaaagcacccagaacgccauugacaagaucacgaauaaagugaacuccguuauagagaagaugaauacccaguuuacagcuguggggaaggaguucaaccaccuggaaaaacggauugagaauuuaaacaagaaagucgaugacggcuuccuggauaucuggacuuacaaugccgaacuccuugugcuguuggagaacgaacgcacccuagacuaucaugauucuaauguaaagaaccuguacgagaaaguucgaagccagcucaagaacaaugcaaaggagaucggaaacggcuguuuugaguucuaucacaaaugcgacaauacauguauggagucagugaagaacgggacuuacgauuauccuaaauacagugaagaggccaagcugaauagagaagagauugacggagucaaacuugaguccaccaggaucuaucaaauucuggcuauauacagcacaguggcgucuucauugguccucgugguuagucugggugcaaucagcuuuuggaugugcuccaacggcucuuuacagugccggauuuguaucuga

SEQ ID NO: 132338 - RNA, 1701 nt, Artificial Sequence; identical to SEQ ID NO: 131881
  derived and/or modified CDS sequence (opt3) from hemagglutinin__InfluenzaA__ADD74748

SEQ ID NO: 132339 - RNA, 1701 nt, Artificial Sequence; identical to SEQ ID NO: 131881
  derived and/or modified CDS sequence (opt3) from hemagglutinin__InfluenzaA__ADD74758

SEQ ID NO: 132340 - RNA, 1701 nt, Artificial Sequence
  derived and/or modified CDS sequence (opt3) from hemagglutinin__InfluenzaA__ADD74768
augaaggccauccuggugguccuccuuuacaccuucgcuacagcaaacgccgacacucugugcauuggcuaucacgcgaauaacagcacggauaccguugacacaguguuggagaaaaauguaacugugacccauuccgucaacuuacuggaagauaagcacaaugggaaacuauguaagcucagaggaguggcuccccugcaucuugguaaaugcaacauagccggcuggauccuggggaauccugagugugaaucuuugucaacagcaaguagcugguccuacauuguugagaccucuucgucagacaacggaacuugcuauccaggcgauuuuaucgacuacgaggagcucagggagcagcugagcaguguguccucuuucgaacgguuugagauuuucccgaagacaagcuccuggcccaaucacgauucaaacaagggugucaccgccgcuuguccucaugcaggggccaaaaguuuuuauaagaaucugaucuggcucgugaaaaagggaaacagcuacccaaaauuaucuaaguccuauauaaaugacaagggcaaagaaguacugguucuuuggggcauccaccaccccucaacgagcgcugaucaacagaguuuguaccagaacgccgacgcguacguguucgucgggacuucucgcuauuccaagaaauuuaagccugagauugcaauccgaccaaaagugcgugaucaggagggaagaaugagcuacuauuggacccugguggaacccggugacaagauuacauucgaggccacuggcaaucuagucguuccuagguacgcuuuugccauggaacggaacgcagggucgggaaucauaauuucugauaccccagugcaugacugcaacacaaccugucaaacgccgaaaggcgcuaucaauacuucccuccccuuccagaacauucacccuaucacaaucgguaagugcccaaaguauguaaaaucaaccaagcugcgccuugccacugggcugagaaaugugcccaguauucagagcaggggauuguuuggcgcgauagccggcuucaucgaagggggauggacagguauggucgacggcugguacggguaucaucaccagaacgaacaaggauccggcuacgcagcugaucucaaaucuacccagaaugccauugacaagaucacgaacaaagugaauagcguuauagagaagaugaacacccaguuuacagcuguggguaaggaguucaaucaccuggaaaaacggauugagaacuuaaauaagaaagucgaugacggguuccuggauaucuggacuuacaacgccgaacuccuugugcuguuggagaaugaacgcacccuagacuaucaugauucaaacguaaagaaucuguacgagaaaguucgaagucagcucaagaacaacgcaaaggagaucggcaauggauguuuugaguucuaucacaaaugcgacaacacauguauggaauccgugaagaauggcacuuacgauuauccuaaauacagcgaagaggccaagcugaacagagaagagauugacggggucaaacuugagucuaccaggaucuaucaaauucuggcuauauacucaacaguggcgaguagcuugguccucgugguuucccugggagcaaucucuuuuuggaugugcucgaaugguagcuuacagugccggauuuguaucuga

SEQ ID NO: 132341 - RNA, 1701 nt, Artificial Sequence; identical to SEQ ID NO: 131881
  derived and/or modified CDS sequence (opt3) from hemagglutinin__InfluenzaA__ADD74778

SEQ ID NO: 132342 - RNA, 1701 nt, Artificial Sequence; identical to SEQ ID NO: 132269
  derived and/or modified CDS sequence (opt3) from hemagglutinin__InfluenzaA__ADD74788

SEQ ID NO: 132343 - RNA, 1701 nt, Artificial Sequence; identical to SEQ ID NO: 132269
  derived and/or modified CDS sequence (opt3) from hemagglutinin__InfluenzaA__ADD74798

SEQ ID NO: 132344 - RNA, 1701 nt, Artificial Sequence
  derived and/or modified CDS sequence (opt3) from hemagglutinin__InfluenzaA__ADD74808
augaaggccauccuggugguccuccuuuacaccuucgcuacagcaaacgccgacacucugugcauuggcuaucacgcgaauaacagcacggauaccguugacacaguguuggagaaaaauguaacugugacccauuccgucaacauauuagaagauaagcacaaugggaaacuguguaagcuaagaggaguggcuccccuccaucuggguaaaugcaacaucgccggcuggauucuugggaauccugagugugaaucucugucaacagcaaguagcugguccuacaucguugagaccucuucgucagacaacggaacuugcuauccaggcgauuuuauugacuacgaagaguugagggagcagcucagcaguguguccucuuucgaacgguuugagaucuucccgaagacaagcuccuggcccaaucacgauucaaacaagggugucaccgccgcuuguccucaugcaggggccaaaaguuuuuauaagaaucugauauggcuggugaaaaagggaaacagcuacccaaaacucucuaaguccuauaucaaugacaagggcaaagaaguauuaguucuguggggcauucaccaccccucaacgagcgcugaucaacagagucuuuaccagaacgccgacgcguacguguucgucgggucuucccgcuauagcaagaaauuuaagccugagaucgcaauucgaccaaaagugcgugaucaggagggaagaaugaauuacuauuggacuuugguggaacccggugacaagaucaccuucgaggccacaggcaaccuggucguuccuagguacgcuuuugccauggaacggaacgcagggucgggaauaauuaucucugauacuccagugcaugacugcaauaccacaugucaaaccccgaaaggcgcuauuaacacgucccuacccuuccagaauauccacccuaucacuauugguaagugcccaaaguauguaaaaucaacaaagcuccgccuggccaccgggcuuagaaacgugcccaguauacagagcaggggacuguuuggcgcgaucgccggcuucauugaagggggauggacugguauggucgacggcugguacggguaucaucaccagaaugaacaaggauccggcuacgcagcugauuugaaaucuacacagaacgccaucgacgagauaaccaauaaggugaacagcguuauugagaaaaugaauacgcaguuuaccgcuguggguaaggaguucaaccaccucgagaagcggaucgaaaaucugaacaaaaaggucgaugacggguucuuagauaucuggacauacaaugccgagcugcucgugcuucuggaaaacgagcgcacuuuggacuaucaugauucaaauguuaaaaaccuauacgagaagguacgaagucagcugaaaaacaaugcaaaggaagugggcaacggauguuuugaguucuaucacaagugcgacaauaccuguauggaauccgucaaaaacggcacauacgauuauccuaaguacagcgaggaagccaaacucaauagagaggagauugacggggugaagcuggaaucuacuaggaucuaucaaauucuugcuauauacucaaccgcggcaaguagccuggucuuggugguuucccucggagccaucucuuuuuggaugugcucgaacgguagccugcagugccggauuuguaucuga

SEQ ID NO: 132345 - RNA, 1701 nt, Artificial Sequence
  derived and/or modified CDS sequence (opt3) from hemagglutinin__InfluenzaA__ADD74818
augaaggccauccuggugguccuccuuuacaccuucgcuacagcaaacgccgacacucugugcauuggcuaucacgcgaauaacagcacggauaccguugacacaguguuggagaaaaauguaacugugacccauuccgucaacauauuagaagauaagcacaaugggaaacuguguaagcuaagaggaguggcuccccuccaucuggguaaaugcaacaucgccggcuggauucuugggaauccugagugugaaucucugucaacagcaaguagcugguccuacaucguugagaccucuucgucagacaacggaacuugcuauccaggcgauuuuauugacuacgaagaguugagggagcagcucagcaguguguccucuuucgaacgguuugagaucuucccgaagacaagcuccuggcccaaucacgauucaaacaagggugucaccgccgcuuguccucaugcaggggccaaaaguuuuuauaagaaucugauauggcuggugaaaaagggaaacagcuacccaaaacucucuaaguccuauaucaaugacaagggcaaagaaguauuaguucuguggggcauucaccaccccucaacgagcgcugaucaacagagucuuuaccagaacgccgacgcguacguguucgucgggacuucucgcuauuccaagaaauuuaagccugagaucgcaauucgaccaaaagugcgugaucaggagggaagaaugaauuaccauuggaccuugguggaacccggugacaagaucacauucgaggccacuggcaaccuggucguuccuagguaugcuuuugccauggaacggaacgcagggagcggaauaauuaucucggauaccccagugcacgacugcaauacaaccugucaaacgccgaaaggcgcuauuaacacuucucuacccuuccagaauauccauccuaucacaauugguaagugcccaaaguacguaaaauccaccaagcuccgccuggccacugggcuuagaaacgugcccucaauacagaguaggggacuguuuggcgcgaucgccggcuucauugaagggggauggacagguauggucgacggcugguauggguaccaccaccagaaugaacaaggaagcggcuaugcagcugauuugaaauccacccagaacgccaucgacgagauaacgaauaaggugaacucuguuauugagaaaaugaauacccaguuuacagcuguggguaaggaguucaaccaucucgagaagcggaucgaaaaucugaacaaaaaggucgaugacggguucuuagauaucuggacuuacaaugccgagcugcucgugcuucuggaaaacgagcgcaccuuggacuaccacgauagcaauguuaaaaaccuauaugagaagguacgaucacagcugaaaaacaaugcaaaggaaauuggcaacggauguuuugaguucuaccauaagugcgacaauacauguauggaaagugugaaaaacggcacuuaugauuacccuaaguauuccgaggaagccaaacucaauagagaggagaucgacggggucaagcuggaaagcaccaggauuuaccaaauacuugcuaucuauucuacaguggcgucaagucuggucuuggugguuagccucggagcaauuuccuuuuggaugugcucuaacgguucgcugcagugccggaucuguaucuga

SEQ ID NO: 132346 - RNA, 1701 nt, Artificial Sequence
  derived and/or modified CDS sequence (opt3) from hemagglutinin__InfluenzaA__ADD74838
augaaggccauccuggugguccuccuuuacaccuucgcuacagcaaacgccgacacucugugcauuggcuaucacgcgaauaacagcacggauaccguugacacaguguuggagaaaaauguaacugugacccauuccgucaacuuacuggaagauaagcacaaugggaaacuauguaagcucagaggaguggcuccccugcaucuugguaaaugcaacauagccggcuggauccuggggaauccugagugugaaucuuugucaacagcaaguagcugguccuacauuguugagaccucuucgucagacaacggaacuugcuauccaggcgauuuuaucaauuacgaggagcucagggagcagcugagcaguguguccucuuucgaacgguuugagauuuucccgaagacaagcuccuggcccaaccacgacucaaauaagggugucaccgccgcuuguccucaugcaggggccaaaaguuuuuauaagaaccugaucuggcucgugaaaaagggaaauagcuacccaaaauuaucuaaguccuauauaaacgauaagggcaaagaaguacugguucuuuggggcauccaccaccccucaacgagcgcugaccaacagaguuuguaccagaaugccgaugcguacguguucgucgggacuucucgcuauuccaagaaauuuaagccugagauugcaauccgaccaaaagugcgugaccaggagggaagaaugaacuacuauuggacccugguggaacccggugauaagauuacauucgaggccacuggcaaccuagucguuccuagguacgcuuuugccauggaacggaaugcagggagcggaaucauaauuucggacaccccagugcaugauugcaacacaaccugucaaacgccgaaaggcgcuaucaauacuucucuccccuuccagaacguacacccuauuacaaucgguaagugcccaaaguaugugaaauccaccaagcugcgccuugccacugggcugagaaauguccccucaauccagaguaggggauuguuuggcgcgauugccggcuucauagaagggggauggacagguaugguggacggcugguacggguaucaucaccagaacgaacaaggaagcggcuacgcagcugaccucaaauccacccagaaugccaucgauaagauuacgaacaaaguuaauucugugaucgagaagaugaacacccaguuuacagcugucgguaaggaguucaaucaccuggaaaaacggauagagaacuuaaauaagaaaguggacgauggguuccuggacauuuggacuuacaacgccgaacuccuuguacuguuggagaaugaacgcacccuagauuaucaugacagcaacguuaagaaccuguacgagaaagugcgaucacagcucaagaauaacgcaaaggagaucggcaauggauguuuugaguucuaucacaaaugcgauaacacauguauggaaagugucaagaauggcacuuacgacuauccuaaauacuccgaagaggccaagcugaacagagaagagaucgauggggugaaacuugagagcaccaggauuuaucaaauccuggcuauuuacucuacagucgcgucaaguuuggugcucguugugagccugggagcaauauccuuuuggaugugcucuaaugguucguuacagugccggaucuguauuuga

SEQ ID NO: 132347 - RNA, 1701 nt, Artificial Sequence
  derived and/or modified CDS sequence (opt3) from hemagglutinin__InfluenzaA__ADD74848
augaaggccauccuggugguccuccuuuacaccuucgcuacagcaaacgccgacacucugugcauuggcuaucacgcgaauaacagcacggauaccguugacacaguguuggagaaaaauguaacugugacccauuccgucaacuuacuggaagauaagcacaaugggaaacuauguaagcucagaggaguggcuccccugcaucuugguaaaugcaacauagccggcuggauccuggggaauccugagugugaaucuuugucaacagcaaguagcugguccuacauuguugagaccucuucgucagacaacggaacuugcuauccaggcgauuuuaucgacuacgaggagcucagggagcagcugagcaguguguccucuuucgaacgguuugagauuuucccgaagacaagcuccuggcccaaucacgauucaaacaagggugucaccgccgcuuguccucaugcaggggccaaaaguuuuuauaagaaucugaucuggcucgugaaaaagggaaacagcuacccaaaauuaucuaaguccuauauaaaugacaagggcaaagaaguacugguucuuuggggcauccaccaccccucaacgagcgcugaucaacagaguuuguaccagaacgccgacgcguacguguucgucgggacuucucgcuauuccaagaaauuuaagccugagauugcaauccgaccaaaagugcgugaucaggagggaagaaugaauuacuauuggacccugguggaacccggugacaagauuacauucgaggccacuggcaaccuagucguuccuagguacgcuuuugccauggaacggaacgcagggagcggaaucauaauuucggauaccccagugcaugacugcaauacaaccugucaaacgccgaaaggcgcuaucaacacuucucuccccuuccagaauauucacccuaucacaaucgguaagugcccaaaguauguaaaauccaccaagcugcgccuugccacugggcugagaaacgugcccucaauucagaguaggggauuguuuggcgcgauagccggcuucaucgaagggggauggacagguauggucgacggcugguacggguaucaucaccagaaugaacaaggaagcggcuacgcagcugaucucaaauccacccagaacgccauugacaagaucacgaauaaagugaacucuguuauagagaagaugaauacccaguuuacagcuguggguaaggaguucaaccaccuggaaaaacggauugagaauuuaaacaagaaagucgaugacggguuccuggauaucuggacuuacaaugccgaacuccuugugcuguuggagaacgaacgcacccuagacuaucaugauagcaauguaaagaaccuguacgagaaaguucgaucacagcucaagaacaaugcaaaggagaucggcaacggauguuuugaguucuaucacaaaugcgacaauacauguauggaaagugugaagaacggcacuuacgauuauccuaaauacuccgaagaggccaagcugaauagagaagagauugacggggucaaacuugagagcaccaggaucuaucaaauucuggcuauauacucuacaguggcgucaaguuugguccucaucgugagccugggagcaauuuccuuuuggaugugcucuaacgguucguuacagugccggaucuguaucuga

SEQ ID NO: 132348 - RNA, 1701 nt, Artificial Sequence
  derived and/or modified CDS sequence (opt3) from hemagglutinin__InfluenzaA__ADD74858
augaaggccauccuggugguccuccuuuacaccuucgcuacagcaaacgccgacacucugugcauuggcuaucacgcgaauaacagcacggauaccguugacacaguguuggagaaaaauguaacugugacccauuccgucaacuuacuggaagauaagcacaaugggaaacuauguaagcucagaggaguggcuccccugcaucuugguaaaugcaacauagccggcuggauccuggggaauccugagugugaaucuuugucaacagcaaguagcugguccuacauuguugagaccucuucgucagacaacggaacuugcuauccaggcgauuuuaucaauuacgaggagcucagggagcagcugagcaguguguccucuuucgaacgguuugagauuuucccgaagacaagcuccuggcccaaccacgacucaaauaagggugucaccgccgcuuguccucaugcagggacgaaaaguuuuuauaagaaccugaucuggcucgugaaaaagggaaauagcuacccaaaauuaucuaaguccuauauaaacgauaagggcaaagaaguacugguucuuuggggcauccaccaccccucaacuagcgccgaccaacagaguuuguaccagaaugcugaugccuacguguucgucgggaccucucgcuauuccaagaaauuuaagccugagauugcgauccgaccaaaagugcgugaccaggagggaagaaugaacuacuauuggacacugguggaacccggugauaagauuacuuucgaggcaaccggcaaccuagucguuccuagguacgccuuugcuauggaacggaaugccgggagcggaaucauaauuucggacacaccagugcaugauugcaacaccacgugucaaacuccgaaaggcgcaaucaauacaucucuccccuuccagaacauucacccuaucaccaucgguaagugcccaaaguauguaaaauccacuaagcugcgccuugcuacagggcugagaaaugugcccucaauucagaguaggggauuguuuggcgccauagcgggcuucaucgaagggggauggaccgguauggucgacggcugguacggguaucaucaccagaacgaacaaggaagcggcuacgccgcagaccucaaauccacgcagaaugcuauugauaagaucaccaacaaaguuaauucugugauagagaagaugaacacacaguuuacugccguggguaaggaguucaaucaccuggaaaaacggauugagaacuuaaauaagaaagucgacgauggguuccuggacaucuggaccuacaacgcugaacuccuugugcuguuggagaaugaacgcacacuagauuaucaugacagcaacguaaagaaccuguacgagaaaguucgaucacagcucaagaauaacgccaaggagaucggcaauggauguuuugaguucuaucacaaaugcgauaacacuuguauggaaagugugaagaauggcaccuacgacuauccuaaauacuccgaagaggcaaagcugaacagagaagagauugauggggucaaacuugagagcacaaggaucuaucaaauucuggccauauacucuaccguggcuucaaguuugguccucgugguuagccugggagcgaucuccuuuuggaugugcucuaaugguucguuacagugccggauuuguaucuga

SEQ ID NO: 132349 - RNA, 1701 nt, Artificial Sequence; identical to SEQ ID NO: 132269
  derived and/or modified CDS sequence (opt3) from hemagglutinin__InfluenzaA__ADD74868

SEQ ID NO: 132350 - RNA, 1701 nt, Artificial Sequence; identical to SEQ ID NO: 132269
  derived and/or modified CDS sequence (opt3) from hemagglutinin__InfluenzaA__ADD74878

SEQ ID NO: 132351 - RNA, 1701 nt, Artificial Sequence
  derived and/or modified CDS sequence (opt3) from hemagglutinin__InfluenzaA__ADD74888
augaaggccauccuggugguccuccuuuacaccuucgcuacagcaaacgccgacacucugugcauuggcuaucacgcgaauaacagcacggauaccguugacacaguguuggagaaaaauguaacugugacccauuccgucgauuuacuggaagacaagcacaacgggaaacuauguaagcucagaggaguggcuccccugcaucuugguaaaugcaauauagccggcuggauccuggggaacccugagugugaaucuuugucaacagcaaguagcugguccuacauuguugagaccucuucgucagauaauggaacuugcuauccaggcgacuuuaucgauuacgaggagcucagggagcagcugagcaguguguccucuuucgaacgguuugagauuuucccgaagacaaacagcuggcccaaucacgacuccaacaagggugucaccgccgcuuguccucaugcaggggccaaaucauuuuauaagaaucugaucuggcucgugaaaaagggaaacaguuacccaaaauuaagcaagucuuauauaaaugauaagggcaaagaaguacugguucuuuggggcauccaccaccccuccacgucagcugaccaacagagcuuguaccagaacgccgaugcguacguguucgucgggaccagucgcuauucuaagaaauuuaagccugagauugcaauccgaccaaaagugcgugaccaggagggaagaaugaauuacuauuggacucugguggaacccggugauaagauuacauucgaggccacuggcaaccuagucguuccuagguacgcuuuugccauggaacggaacgcaggguccggaaucauaauuagcgacaccccagugcaugacugcaauacaaccugucaaacgccgaaaggcgcuaucaacacuucgcuccccuuccagaauauucacccuaucacaaucgguaagugcccaaaguauguaaaaucuaccaagcugcgccuugccacugggcugagaaacgugcccuccauucagucaaggggauuguuuggcgcgauagccggcuucaucgaagggggauggacagguauggucgauggcugguacggguaucaucaccagaaugaacaaggaaguggcuacgcagcugaccucaaaagcacccagaacgccauugaugagaucacgaauaaggugaacuccguuauagagaaaaugaauacccaguuuacagcuguggguaaggaguucaaccaccuggaaaagcggauugaaaauuuaaacaaaaaggucgacgauggguuccuggacaucuggacuuacaaugccgagcuccuugugcuguuggaaaacgagcgcacccuagauuaucaugacucuaauguaaagaaccuguacgagaagguucgaagccagcucaaaaacaaugcaaaggaaaucggcaacggauguuuugaguucuaucacaagugcgauaauacauguauggaaucagugaaaaacggcacuuacgacuauccuaaguacagugaggaagccaaacugaauagagaggagauugauggggucaaacuugaauccaccaggaucuaucaaauucuggcuauauacagcacaguggcgucuucauugguccucgugguuagucugggagcaaucagcuuuuggaugugcuccaacgguucuuuacagugccggauuuguaucuga

SEQ ID NO: 132352 - RNA, 1701 nt, Artificial Sequence
  derived and/or modified CDS sequence (opt3) from hemagglutinin__InfluenzaA__ADD74898
augaaggccauccuggugguccuccuuuacaccuucacaacugcuaacgcagacacgcugugcauuggcuaucacgccaauaacagcaccgauacaguugacacuguguuggagaaaaauguaaccgugacacauuccgucaacuuacuggaagauaagcacaaugggaaacuauguaagcucagaggaguggcgccccugcaucuugguaaaugcaacauagcuggcuggauccuggggaauccugagugugaaucuuugucaaccgccaguagcugguccuacauuguugagacuucuucgucagacaacggaacaugcuauccaggcgauuuuaucaauuacgaggagcucagggagcagcugagcaguguguccucuuucgaacgguuugagauuuucccgaagaccagcuccuggcccaaccacgacucaaauaagggugucacggcagccuguccucaugcuggggcaaaaaguuuuuauaagaaccugaucuggcucgugaaaaagggaaauagcuacccaaaauuaucuaaguccuauauaaacgauaagggcaaagaaguacugguucuuuggggcauccaccaccccucaacuagcgccgaccaacagaguuuguaccagaaugcugaugccuacguguucgucgggaccucucgcuauuccaagaaauuuaagccugagauugcgauccgaccaaaagugcgugaccaggagggaagaaugaacuacuauuggacacugguggaacccggugauaagauuacuuucgaggcaaccggcaaccuagucguuccuagguacgccuuugcuauggaacggaaugccgggagcggaaucauaauuucggacacaccagugcaugauugcaacaccacgugucaaacuccgaaaggcgcaaucaauacaucucuccccuuccagaacauucacccuaucaccaucgguaagugcccaaaguauguaaaauccacuaagcugcgccuugcuacagggcugagaaaugugcccucaauucagaguaggggauuguuuggcgccauagcgggcuucaucgaagggggauggaccgguauggucgacggcugguacggguaucaucaccagaacgaacaaggaagcggcuacgccgcagaccucaaauccacgcagaaugcuauugauaagaucaccaacaaaguuaauucugugauagagaagaugaacacacaguuuacugccguggguaaggaguucaaucaccuggaaaaacggauugagaacuuaaauaagaaagucgacgauggguuccuggacaucuggaccuacaacgcugaacuccuugugcuguuggagaaugaacgcacacuagauuaucaugacagcaacguaaagaaccuguacgagaaaguucgaucacagcucaagaauaacgccaaggagaucggcaauggauguuuugaguucuaucacaaaugcgauaacacuuguauggaaagugugaagaauggcaccuacgacuauccuaaauacuccgaagaggcaaagcugaacagagaagagauugauggggucaaacuugagagcacaaggaucuaucaaauucuggccauauacucuaccguggcuucaaguuugguccucgugguuagccugggagcgaucuccuuuuggaugugcucuaaugguucguuacagugccggauuuguaucuga

SEQ ID NO: 132353 - RNA, 1701 nt, Artificial Sequence
  derived and/or modified CDS sequence (opt3) from hemagglutinin__InfluenzaA__ADD74908
augaaggccauccuggugguccuccuuuacaccuucgcuacagcaaacgccgacacucugugcauuggcuaucacgcgaauaacagcacggauaccguugacacaguguuggagaaaaauguaacugugacccauuccgucaacuuacuggaagauaagcacaaugggaaacuauguaagcucagaggaguggcuccccugcaucuugguaaaugcaacauagccggcuggauccuggggaauccugagugugaaucuuugucaacagcaaguagcugguccuacauuguugagaccucuucgucagacaacggaacuugcuauccaggcgauuuuaucgacuacgaggagcucagggagcagcugagcaguguguccucuuucgaacgguuugagauuuucccgaagacaagcuccuggcccaaucacgauucaaacaagggugucaccgccgcuuguccucaugcaggggccaaaaguuuuuauaagaaucugaucuggcucgugaaaaagggaaacagcuacccaaaauuaucuaaguccuauauaaaugacaagggcaaagaaguacugguucuuuggggcauccaccaccccucaacgagcgcugaucaacagaguuuguaccagaacgccgacgcguacguguucgucgggacuucucgcuauuccaagaaauuuaagccugagauugcaauccgaccaaaagugcgugaucaggagggaagaaugaauuacuauuggacccugguggaacccggugacaagauuacauucgaggccacuggcaaccuagucguuccuagguacgcuuuuaccauggaacggaacgccgggagcggaaucauaauuucggauacaccagugcaugacugcaauaccacgugucaaacuccgaaaggcgcaaucaacacaucucuccccuuccagaauauucacccuaucaccaucgguaagugcccaaaguauguaaaauccacuaagcugcgccuugcuacagggcugagaaacgugcccucaauucagaguaggggauuguuuggcgccauagcgggcuucaucgaagggggauggaccgguauggucgacggcugguacggguaucaucaccagaaugaacaaggaagcggcuacgccgcagaucucaaauccacgcagaacgcuauugacgagaucaccaauaaggugaacucuguuauagagaaaaugaauacacaguuuacugccguggguaaggaguucaaccaccuggaaaagcggauugaaaauuuaaacaaaaaggucgaugacggguuccuggauaucuggaccuacaaugcugagcuccuugugcuguuggaaaacgagcgcacacuagacuaucaugauagcaauguaaagaaccuguacgagaagguucgaucacagcucaaaaacaaugccaaggaaaucggcaacggauguuuugaguucuaucacaagugcgacaauacuuguauggaaagugugaaaaacggcaccuacgauuauccuaaguacuccgaggaagcaaaacugaauagagaggagauugacggggucaaacuugaaagcacaaggaucuaucaaauucuggccauauacucuaccguggcuucaaguuugguccucgugguuagccugggagcgaucuccuuuuggaugugcucuaacgguucguuacagugccggauuuguaucuga

SEQ ID NO: 132354 - RNA, 1701 nt, Artificial Sequence; identical to SEQ ID NO: 132347
  derived and/or modified CDS sequence (opt3) from hemagglutinin__InfluenzaA__ADD74918

SEQ ID NO: 132355 - RNA, 1701 nt, Artificial Sequence; identical to SEQ ID NO: 132269
  derived and/or modified CDS sequence (opt3) from hemagglutinin__InfluenzaA__ADD74928

SEQ ID NO: 132356 - RNA, 1701 nt, Artificial Sequence; identical to SEQ ID NO: 132347
  derived and/or modified CDS sequence (opt3) from hemagglutinin__InfluenzaA__ADD74938

SEQ ID NO: 132357 - RNA, 1701 nt, Artificial Sequence
  derived and/or modified CDS sequence (opt3) from hemagglutinin__InfluenzaA__ADD74958
augaaggccauccuggugguccuccuuuacaccuucgcuacagcaaacgccgacacucugugcauuggcuaucacgcgaauaacagcacggauaccguugacacaguguuggagaaaaauguaacugugacccauuccgucaacuuacuggaaaauaagcacaacgggaaacuauguaagcucagaggaguggcuccccugcaucuugguaaaugcaauauagccggcuggauccuggggaacccugagugugaaucuuugucaacagcaaguagcugguccuacauuguugagaccucuucgucagauaauggaacuugcuauccaggcgacuuuaucaacuacgaggagcucagggagcagcugagcaguguguccucuuucgaacgguuugagauuuucccgaagacaagcuccuggcccaaucacgauucaaacaagggugucaccgccgcuuguccucaugcaggggccaaaaguuuuuauaagaaucugaucuggcucgugaaaaagggaaacagcuacccaaaauuaucuaaguccuauauaaaugacaagggcaaagaaguacugguucuuuggggcauccaccaccccucaacgagcgcugaucaacagaguuuguaccagaacgccgacgcguacguguucgucgggacuucucgcuauuccaagaaauuuaagccugagauugcaauccgaccaaaagugcgugaucaggagggaagaaugaacuacuauuggacccugguggaacccggugacaagauuacauucgaggccacuggcaaucuagucguuccuagguacgcuuuugccauggaacggaacgcagggagcggaaucauaauuucggauaccccagugcaugacugcaauacaaccugucaaacgccgaaaggcgcuaucaacacuucucuccccuuccagaauauucacccuaucacaaucgguaagugcccaaaguauguaaaauccaccaagcugcgccuugccacugggcugagaaacgugcccucaauucagaguaggggauuguuuggcgcgauagccggcuucaucgaagggggauggacagguauggucgauggcugguacggguaucaucaccagaaugaacaaggaagcggcuacgcagcugaccucaaauccacccagaacgccauugacaagaucacgaauaaagugaacucuguuauagagaagaugaauacccaguuuacagcuguggguaaggaguucaaccaccuggaaaaacggauugagaauuuaaacaagaaagucgaugacggguuccuggauaucuggacuuacaaugccgaacuccuugugcuguuggagaacgaacgcacccuagacuaucaugauagcaacguaaagaaucuguacgagaaaguucgaucacagcucaagaacaaugcaaaggagaucggcaacggauguuuugaguucuaucacaaaugcgacaauacauguauggaaagugugaagaacggcacuuacgauuauccuaaauacuccgaagaggccaagcugaauagagaagagauugacggggucaaacuugagagcaccaggaucuaucaaauucuggcuauauacucuacaguggcgucaaguuugguccucgugguuagccugggagcaaucuccuuuuggaugugcucuaacgguucguuacagugccggauuuguaucuga

SEQ ID NO: 132358 - RNA, 1701 nt, Artificial Sequence; identical to SEQ ID NO: 131881
  derived and/or modified CDS sequence (opt3) from hemagglutinin__InfluenzaA__ADD74968

SEQ ID NO: 132359 - RNA, 1701 nt, Artificial Sequence
  derived and/or modified CDS sequence (opt3) from hemagglutinin__InfluenzaA__ADD74998
augaaggccauccuggugguccuccuuuacaccuucgcuacagcaaacgccgacacucugugcauuggcuaucacgcgaauaacagcacggauaccguugacacaguguuggagaaaaauguaacugugacccauuccgucaacuuacuggaagauaagcacaaugggaaacuauguaagcucagaggaguggcuccccugcaucuugguaaaugcaacauagccggcuggauccuggggaauccugagugugaaucuuugucaacagcaaguagcugguccuacauuguugagaccucuucgucagacaacggaacuugcuauccaggcgauuuuaucgacuacgaggagcucagggagcagcugagcaguguguccucuuucgaacgguuugagauuuucccgaagacaagcuccuggcccaaucacgauucaaacaagggugucaccgccgcuuguccucaugcaggggccaaaaguuuuuauaagaaucugaucuggcucgugaaaaagggaaacagcuacccaaaauuaucuaaguccuauauaaaugacaagggcaaagaaguacugguucuuuggggcauccaccaccccucaacgagcgcugaucaacagaguuuguaccagaacgccgacgcguacguguucgucgggacuucucgcuauuccaagaaauuuaagccugagauugcaauccgaccaaaagugcgugaucaggagggaagaaugaauuacuauuggacccugguggaacccggugacaagauuacauucgaggccacuggcaaccuagucguuccuagguacgcuuuugccauggaacggaacgcagggagcggaaucauaauuucggauaccccagugcaugacugcaauacaaccugucaaacgccgaaaggcgcuaucaacacuucucuccccuuccagaauauucacccuaucacaaucgguaagugcccaaaguauguaaaauccaccaagcugcgccuugccacugggcugagaaacgugcccucaauucagaguaggggauuguuuggcgcgauagccggcuucaucgaagggggauggacagguauggucgacggcugguacggguaucaucaccagaaugaacggggaagcggcuacgcagcugaucucaaauccacccaaaacgccauugacaagaucacgaauaaagugaacucuguuauagagaagaugaauacccaguuuacagcuguggguaaggaguucaaccaccuggaaaaacgcauugagaauuuaaacaagaaagucgaugacggguuccuggauaucuggacuuacaaugccgaacuccuugugcuguuggagaacgaacgaacccuagacuaucaugauagcaauguaaagaaccuguacgagaaaguuagaucacagcucaagaacaaugcaaaggagaucggcaacggauguuuugaguucuaucacaaaugcgacaauacauguauggaaagugugaagaacggcacuuacgauuauccuaaauacuccgaagaggccaagcugaauagggaagagauugacggggucaaacuugagagcacccggaucuaucagauucuggcuauauacucuacaguggcgucaaguuugguccucgugguuagccugggagcaaucuccuuuuggaugugcucuaacgguucguuacaaugccguauuuguaucuga

SEQ ID NO: 132360 - RNA, 1701 nt, Artificial Sequence; identical to SEQ ID NO: 131881
  derived and/or modified CDS sequence (opt3) from hemagglutinin__InfluenzaA__ADD75008

SEQ ID NO: 132361 - RNA, 1701 nt, Artificial Sequence; identical to SEQ ID NO: 131881
  derived and/or modified CDS sequence (opt3) from hemagglutinin__InfluenzaA__ADD75018

SEQ ID NO: 132362 - RNA, 1701 nt, Artificial Sequence; identical to SEQ ID NO: 131881
  derived and/or modified CDS sequence (opt3) from hemagglutinin__InfluenzaA__ADD75028

SEQ ID NO: 132363 - RNA, 1701 nt, Artificial Sequence; identical to SEQ ID NO: 131818
  derived and/or modified CDS sequence (opt3) from hemagglutinin__InfluenzaA__ADD75058

SEQ ID NO: 132364 - RNA, 1701 nt, Artificial Sequence; identical to SEQ ID NO: 132137
  derived and/or modified CDS sequence (opt3) from hemagglutinin__InfluenzaA__ADD75088

SEQ ID NO: 132365 - RNA, 1701 nt, Artificial Sequence; identical to SEQ ID NO: 130717
  derived and/or modified CDS sequence (opt3) from hemagglutinin__InfluenzaA__ADD75098

SEQ ID NO: 132366 - RNA, 1701 nt, Artificial Sequence
  derived and/or modified CDS sequence (opt3) from hemagglutinin__InfluenzaA__ADD75108
augaaggccauccuggugguccuccuuuacaccuucgcuacagcaaacgccgacacucugugcauuggcuaucacgcgaauaacagcacggauaccguugacacaguguuggagaaaaauguaacugugacccauuccgucaacuuacuggaagauaagcacaaugggaaacuauguaagcucagaggaguggcuccccugcaucuugguaaaugcaacauagccggcuggauccuggggaauccugagugugaaucuuugucaacagcaaguagcugguccuacauuguugagaccucuucgucagacaacggaacuugcuauccaggcgauuuuaucgacuacgaggagcucagggagcagcugagcaguguguccucuuucgaacgguuugagauuuucccgaagacaagcuccuggcccaaucacgauucaaacaagggugucaccgccgcuuguccucaugcaggggccaaaaguuuuuauaagaaucugaucuggcucgugaaaaagggaaacagcuacccaaaauuaucuaaguccuauauaaaugacaagggcaaagaaguacugguucuuuggggcauccaccaccccucaacgagcgcugaucaacagaguuuguaccagaacgccgacgcguacguguucgucgggacuucucgcuauuccaagaaauuuaagccugagauugcaauccgaccaaaagugcgugaucaggagggaagaaugaauuacuauuggacccugguggaacccggugacaagauuacauucgaggccacuggcaaccuagucguuccuagguacgcuuuugccauggaacggaacgcagggagcggaaucauaauuucggauaccccagugcaugacugcaauacaaccugucaaacgccgaaaggcgcuaucaacacuucucuccccuuccagaauauucacccuaucacaaucgguaagugcccaaaguauguaaaauccaccaagcugcgccuugccacugggcugagaaacauucccucaauacagaguaggggauuguuuggcgcgaucgccggcuucauugaagggggauggacagguaugguggacggcugguacggguaucaucaccagaaugaacaaggaagcggcuacgcagcugaucucaaauccacccagaacgccaucgacaagauaacgaauaaagucaacucugugauugagaagaugaauacccaguuuacagcuguugguaaggaguucaaccaccuggaaaaacggaucgagaauuuaaacaagaaaguggaugacggguuccuggauaucuggacuuacaaugccgaacuccuuguccuguuggagaacgaacgcacccuagacuaucaugauagcaaugugaagaaccuguacgagaaaguacgaucacagcucaagaacaaugcaaaggagauuggcaacggauguuuugaguucuaucacaaaugcgacaauacauguauggaaaguguuaagaacggcacuuacgauuauccuaaauacuccgaagaggccaagcugaauagagaagagaucgacggggugaaacuugagagcaccaggauuuaucaaauacuggcuaucuacucuacagucgcgucaaguuuggugcucgucgugagccugggagcaauuuccuuuuggaugugcucuaacgguucguuacagugccggaucuguaucuga

SEQ ID NO: 132367 - RNA, 1701 nt, Artificial Sequence; identical to SEQ ID NO: 130717
  derived and/or modified CDS sequence (opt3) from hemagglutinin__InfluenzaA__ADD75118

SEQ ID NO: 132368 - RNA, 1701 nt, Artificial Sequence; identical to SEQ ID NO: 131164
  derived and/or modified CDS sequence (opt3) from hemagglutinin__InfluenzaA__ADD75128

SEQ ID NO: 132369 - RNA, 1701 nt, Artificial Sequence; identical to SEQ ID NO: 130717
  derived and/or modified CDS sequence (opt3) from hemagglutinin__InfluenzaA__ADD75138

SEQ ID NO: 132370 - RNA, 1701 nt, Artificial Sequence; identical to SEQ ID NO: 131881
  derived and/or modified CDS sequence (opt3) from hemagglutinin__InfluenzaA__ADD75148

SEQ ID NO: 132371 - RNA, 1701 nt, Artificial Sequence; identical to SEQ ID NO: 130717
  derived and/or modified CDS sequence (opt3) from hemagglutinin__InfluenzaA__ADD75158

SEQ ID NO: 132372 - RNA, 1701 nt, Artificial Sequence
  derived and/or modified CDS sequence (opt3) from hemagglutinin__InfluenzaA__ADD84494
augaaggccauccuggugguccuccuuuacaccuucgcuacagcaaacgccgacacucugugcauuggcuaucacgcgaauaacagcacggauaccguugacacaguguuggagaaaaauguaacugugacccauuccgucaacuuacuggaagauaagcacaaugggaaacuauguaagcucagaggaguggcuccccugcaucuugguaaaugcaacauagccggcuggauccuggggaauccugagugugaaucuuugucaacagcaaguagcugguccuacauuguugagaccucuucgucagacaacggaacuugcuauccaggcgauuuuaucgacuacgaagaacucagggagcagcugagcaguguguccucuuucgaacgguuugagauuuucccgaagaucagcuccuggcccaaucacgauccuaacaagggugucacagccgcuuguccacaugcaggggccaaaucauuuuauaagaaucugauauggcucgugaaaaagggaaacaguuaccccaaauuaagcaagucuuauaucaaugacaagggcaaagaaguacugguucuuuggggcauucaccacccuuccaccucagcugaucaacagagcuuguaccagaacgccgacgcguacguguucgucgggacgagucgcuauucuaagaaauuuaagccagagaucgcaauucgacccaaagugcgugaucaggagggaagaaugaauuacuauuggacucugguggaaccuggugacaagaucaccuucgaggccacaggcaaccuagucguuccaagguacgcuuuugccauggaacggaacgcaggguccggaauaauuaucagcgauacuccggugcauggcugcaauaccacaugucaaacccccaaaggugcuauuaacacgucgcucccuuuccagaauauccacccaaucacuauugggaagugccccaaguauguaaaaucuacaaagcugcgccuugccaccggacugagaaacgugccuuccauacagucaaggggcuuguuuggcgcgaucgccggguucauugagggagguuggacuggcauggucgacgggugguacggauaucaucaccagaaugaacaaggcagugguuacgcagcugaccucaaaagcacacagaacgccaucgaugagauaaccaauaaggugaacuccguuauugagaaaaugaauacgcaguuuaccgcuguggggaaggaguucaaccaccuggagaagcggaucgaaaauuuaaacaaaaaggucgacgauggcuuccuggacaucuggacauacaaugccgagcuccuugugcuguuggaaaacgagcgcacucuagauuaucaugacucuaauguaaagaaccuguacgagaagguucgaagccagcucaaaaacaaugcaaaggaaauuggaaacggcuguuuugaguucuaucacaagugcgauaauaccuguauggaaucagugaaaaacgggacauacgacuauccaaaguacagugaggaagccaaacugaauagagaggagaucgauggagucaaacuugaauccacuaggauuuaucaaauacuggcuaucuacagcaccguggcgucuucauugguccucgugguuagucugggugcaauuagcuuuuggaugugcuccaacggcucuuuacagugccggaucuguaucuga

SEQ ID NO: 132373 - RNA, 1701 nt, Artificial Sequence
  derived and/or modified CDS sequence (opt3) from hemagglutinin__InfluenzaA__ADD84495
augaaggccauccuggugguccuccuuuacaccuucgcuacagcaaacgccgacacucugugcauuggcuaucacgcgaauaacagcacggauaccguugacacaguguuggagaaaaauguaacugugacccauuccgucaacuuacuggaagauaagcacaaugggaaacuauguaagcucagaggaguggcuccccugcaucuugguaaaugcaacauagccggcuggauccuggggaauccugagugugaaucuuugucaacagcaaguagcugguccuacauuguugagaccucuucgucagacaacggaacuugcuauccaggcgauuuuaucgacuacgaggagcucagggagcagcugagcaguguguccucuuucgaacgguuugagauuuucccgaagaucagcuccuggcccaaucacgauccuaacaagggugucacagccgcuuguccacaugcaggggccaaaucauuuuauaagaaucugauauggcucgugaaaaagggaaacaguuaccccaaauuaagcaagucuuauaucaaugacaagggcaaagaaguacugguucuuuggggcauucaccacccuuccaccucagcugaucaacagagcuuguaccagaacgccgacgcguacguguucgucgggacgagucgcuauucuaagaaauuuaagccagagaucgcaauucgacccaaagugcgugaucaggagggaagaaugaauuacuauuggacucugguggaaccuggugacaagaucaccuucgaggccacaggcaaccuagucguuccaagguacgcuuuugccauggaacggaacgcaggguccggaauaauuaucagcgauacuccggugcaugacugcaauaccacaugucaaacccccaaaggcgcuauuaacacgucgcucccuuuccagaauauccacccaaucacuauugguaagugccccaaguauguaaaaucuacaaagcugcgccuugccaccgggcugagaaacgugccuuccauacagucaaggggauuguuuggcgcgaucgccggcuucauugaagggggauggacugguauggucgacggcugguacggguaucaucaccagaaugaacaaggaaguggcuacgcagcugaucucaaaagcacacagaacgccaucgacgagauaaccaauaaggugaacuccguuauugagaaaaugaauacgcaguuuaccgcuguggguaaggaguucaaccaccuggaaaagcggaucgaaaauuuaaacaaaaaggucgaugacggguuccuggauaucuggacauacaaugccgagcuccuugugcuguuggaaaacgagcgcacucuagacuaucaugauucuaauguaaagaaccuguacgagaagguucgaagccagcucaaaaacaaugcaaaggaaauuggcaacggauguuuugaguucuaucacaagugcgacaauaccuguauggaaucagugaaaaacggcacauacgauuauccaaaguacagugaggaagccaaacugaauagagaggagaucgacggggucaaacuugaauccacuaggauuuaucaaauacuggcuaucuacagcaccguggcgucuucauugguccucgugguuagucugggagcaauuagcuuuuggaugugcuccaacgguucuuuacagugccggaucuguaucuga

SEQ ID NO: 132374 - RNA, 1701 nt, Artificial Sequence
  derived and/or modified CDS sequence (opt3) from hemagglutinin__InfluenzaA__ADD84496
augaaggccauccuggugguccuccuuuacaccuucgcuacagcaaacgccgacacucugugcauuggcuaucacgcgaauaacagcacggauaccguugacacaguguuggagaaaaauguaacugugacccauuccgucaacuuacuggaagauaagcacaaugggaaacuauguaagcucagaggaguggcuccccugcaucuugguaaaugcaacauagccggcuggauccuggggaauccugagugugaaucuuugucaacagcaaguagcugguccuacauuguugagaccucuucgucagacaacggaacuugcuauccaggcgauuuuaucgacuacgaggagcucagggagcagcugagcaguguguccucuuucgaacgguuugagauuuucccgaagaucagcuccuggcccaaucacgauccuaacaagggugucacagccgcuuguccacaugcaggggccaaaucauuuuauaagaaucugauauggcucgugaaaaagggaaacaguuaccccaaauuaagcaagucuuauaucaaugacaagggcaaagaaguacugguucuuuggggcauucaccacccuuccaccucagcugaucaacagagcuuguaccagaacgccgacgcguacguguucgucgggaguucucgcuauuccaagaaauuuaagccagagaucgcaauucgacccaaagugcgugaucaggagggaagaaugaauuacuauuggacgcugguggaaccuggugacaagaucacuuucgaggccaccggcaaccuagucguuccaagguacgcuuuugccauggaacggaacgcagggagcggaauaauuaucucggauacaccggugcaugacugcaauacuaccugucaaacacccaaaggcgcuauuaacaccucucucccuuuccagaauauccacccaaucacgauugguaagugccccaaguauguaaaauccacuaagcugcgccuugccacagggcugagaaacgugccuucaauacagaguaggggauuguuuggcgcgaucgccggcuucauugaagggggauggaccgguauggucgacggcugguacggguaucaucaccagaaugaacaaggaagcggcuacgcagcugaucucaaauccacucagaacgccaucgacgagauaacaaauaaggugaacucuguuauugagaaaaugaauacccaguuuacggcuguggguaaggaguucaaccaccuggaaaagcggaucgaaaauuuaaacaaaaaggucgaugacggguuccuggauaucuggaccuacaaugccgagcuccuugugcuguuggaaaacgagcgcacacuagacuaucaugauagcaauguaaagaaccuguacgagaagguucgaucacagcucaaaaacaaugcaaaggaaauuggcaacggauguuuugaguucuaucacaagugcgacaauacuuguauggaaagugugaaaaacggcaccuacgauuauccaaaguacuccgaggaagccaaacugaauagagaggagaucgacggggucaaacuugaaagcacaaggauuuaucaaauacuggcuaucuacucuacuguggcgucaaguuugguccucgugguuagccugggagcaauuuccuuuuggaugugcucuaacgguucguuacagugccggaucuguaucuga

SEQ ID NO: 132375 - RNA, 1701 nt, Artificial Sequence; identical to SEQ ID NO: 132373
  derived and/or modified CDS sequence (opt3) from hemagglutinin__InfluenzaA__ADD84497

SEQ ID NO: 132376 - RNA, 1701 nt, Artificial Sequence
  derived and/or modified CDS sequence (opt3) from hemagglutinin__InfluenzaA__ADD84498
augaaggccauccuggugguccuccuuuacaccuucgcuacagcaaacgccgacacucugugcauuggcuaucacgcgaauaacagcacggauaccguugugacaguauuggagaaaaaugugacugucacccauuccgugaacuuacuggaagacaagcacaaugggaaacuauguaagcucagaggaguugcuccccugcaucuugguaaaugcaacauagccggcuggauccuggggaauccugagugugaaucuuugucaacagcaaguagcugguccuacauuguggagaccucuucgucagauaacggaacuugcuauccaggcgacuuuaucgauuacgaggagcucagggagcagcugagcagugucuccucuuucgaacgguuugagauuuucccgaagaucagcuccuggcccaaucacgacccuaacaagggugugacagccgcuuguccacaugcaggggccaaaucauuuuauaagaaucugauauggcucguaaagaagggaaacaguuaccccaaauuaagcaagucuuauaucaaugauaagggcaaagaaguucuggugcuuuggggcauucaccacccuuccaccucagcugaccaacagagcuuguaccagaacgccgaugcguacgucuucguggggaguucucgcuauuccaagaaauuuaagccagagaucgcaauucgacccaaagugcgugaccaggagggaagaaugaauuacuauuggacgcuggucgaaccuggugauaagaucacuuucgaggccaccggcaaccuaguugugccaagguacgcuuuugccauggaacggaacgcagggagcggaauaauuaucucggacacaccgguacaugauugcaauacuaccugucaaacacccaaaggcgcuauuaacaccucucucccuuuccagaauauccacccaaucacgauugguaagugccccaaguaugugaaauccacuaagcugcgccuugccacagggcugagaaacgucccuucaauacagaguaggggauuguuuggcgcgaucgccggcuucauugaagggggauggaccgguaugguggacggcugguacggguaucaucaccagaaugaacaaggaagcggcuacgcagcugaccucaaauccacucagaacgccaucgaugagauaacaaauaagguuaacucugugauugagaaaaugaauacccaguuuacggcugucgguaaggaguucaaccaccuggaaaagcggaucgaaaauuuaaacaaaaagguggacgauggguuccuggacaucuggaccuacaaugccgagcuccuuguacuguuggaaaacgagcgcacacuagauuaucaugacagcaauguuaaaaaccuguacgagaaggugcgaucacagcucaaaaacaaugcaaaggaaauuggcaacggauguuuugaguucuaucacaagugcgauaauacuuguauggaaagugucaaaaacggcaccuacgacuauccaaaguacuccgaggaagccaaacugaauagagaggagaucgauggggugaaacuugaaagcacaaggauuuaucaaauacuggcuaucuacucuacugucgcgucaaguuuggugcucguugugagccugggagcaauuuccuuuuggaugugcucuaacgguucguuacagugccggaucuguaucuga

SEQ ID NO: 132377 - RNA, 1701 nt, Artificial Sequence; identical to SEQ ID NO: 132373
  derived and/or modified CDS sequence (opt3) from hemagglutinin__InfluenzaA__ADD84499

SEQ ID NO: 132378 - RNA, 1701 nt, Artificial Sequence
  derived and/or modified CDS sequence (opt3) from hemagglutinin__InfluenzaA__ADD92535
augaaggccauccuggugguccuccuuuacaccuucgcuacagcaaacgccgacacucugugcauuggcuaucacgcgaauaacagcacggauaccguugacacaguguuggagaaaaauguaacugugacccauuccgucaacuuacuggaagauaagcacaaugggaaacuauguaagcucagaggaguggcuccccugcaucuugguaaaugcaacauagccggcuggauccuggggaauccugagugugaaucuuugucaacagcaaguagcugguccuacauuguugagaccucuucgucagacaacggaacuugcuauccaggcgauuuuaucgacuacgaggagcucagggagcagcugagcaguguguccucuuucgaacgguuugagauuuucccgaagacaagcuccuggcccaaucacgauucaaacaagggugucaccgccgcuuguccucaugcaggggccaaaaguuuuuauaagaaucugaucuggcucgugaaaaagggaaacagcuacccaaaauuaucuaaguccuauauaaaugacaagggcaaagaaguacugguucuuuggggcauccaccaccccucaacgagcgcugaucaacagaguuuguaccagaacgccgacgcguacguguucgucgggacuucucgcuauuccaagaaauuuaagccugagauugcaauccgaccaaaagugcgugauagagagggaaggaugaauuacuauuggacccugguggaacccggugacaagauuacauucgaggccacuggcaaccuagucguuccucgguacgcuuuugccauggaacgcaacgcagggagcggaaucauaauuucggauaccccagugcaugacugcaauacaaccugucagacgccgaaaggcgcuaucaacacuucucuccccuuccaaaauauucacccuaucacaaucgguaagugcccaaaguauguaaaauccaccaagcugagacuugccacugggcugaggaacgugcccucaauucagagucggggauuguuuggcgcgauagccggcuucaucgaagggggauggacagguauggucgacggcugguacggguaucaucaccagaaugaacagggaagcggcuacgcagcugaucucaaauccacccaaaacgccauugacgagaucacgaaucgcgugaacucuguuauagagaagaugaauacccaguuuacagcuguggguaaagaguucaaccaccuggaaaagcgaauugaaaauuuaaacaagaaagucgaugggggcuuccuggacaucuggacuuacaaugccgagcuccuugugcuguuggaaaacgagagaacccuagauuaucaugacagcaauguaaagaaccuguacgagaaaguuaggucacagcucaagaacaaugcaaaagaaaucggaaacggcuguuuugaguucuaucacaagugcgauaauacauguauggaaagugugaagaacgggacuuacgacuauccuaaauacuccgaggaagccaagcugaaucgggaggagauugauggagucaaacuugaaagcacccguaucuaucagauucuggcuauauacucuacaguggcgucaaguuugguccucgugguuagccugggugcaaucuccuuuuggaugugcucuaacggcucguuacaaugccgcauuuguaucuga

SEQ ID NO: 132379 - RNA, 1701 nt, Artificial Sequence; identical to SEQ ID NO: 132305
  derived and/or modified CDS sequence (opt3) from hemagglutinin__InfluenzaA__ADD96766

SEQ ID NO: 132380 - RNA, 1701 nt, Artificial Sequence; identical to SEQ ID NO: 130897
  derived and/or modified CDS sequence (opt3) from hemagglutinin__InfluenzaA__ADD96776

SEQ ID NO: 132381 - RNA, 1701 nt, Artificial Sequence; identical to SEQ ID NO: 130897
  derived and/or modified CDS sequence (opt3) from hemagglutinin__InfluenzaA__ADD96786

SEQ ID NO: 132382 - RNA, 1701 nt, Artificial Sequence; identical to SEQ ID NO: 132202
  derived and/or modified CDS sequence (opt3) from hemagglutinin__InfluenzaA__ADD96796

SEQ ID NO: 132383 - RNA, 1701 nt, Artificial Sequence
  derived and/or modified CDS sequence (opt3) from hemagglutinin__InfluenzaA__ADD96806
augaaggccauccuggugguccuccuuuacacccuggcuacagcaaacgccgacacuuugugcauuggcuaucacgcgaauaacagcacggauaccguugacacaguguuagagaaaaauguaacugugacccauuccgucaaccugcuagaagauaagcacaaugggaaacucuguaagcugagaggaguggcuccccuucaucuggguaaaugcaacauagccggcuggaucuuggggaauccugagugugaaucucucucaacagcaaguagcugguccuacauuguugagaccucuucgucagacaacggaacuugcuauccaggcgauuucaucgacuacgaggagcugagggagcagcugagcaguguguccucuuuugaacgguucgagauuuuuccgaagacaagcuccuggcccaaucacgauucaaacaagggugucaccgccgcuuguccucaugcaggggccaaaaguuucuauaagaaucucaucugguuagugaaaaagggaaacagcuacccaaaacugucuaaguccuauauaaaugacaagggcaaagaaguacuuguuuuguggggcauccaccaccccucaacgagcgcugaucaacagagucuguaccagaacgccgacgcguacguguuugucgggacuucucgcuauuccaagaaauucaagccugagauugcaauccgaccaaaagugcgugaucaggagggaagaaugaauuacuauuggacccuaguggaacccggugacaagauuacauuugaggccacuggcaaccucgucguuccuagguacgcuuucgccauggaacggaacgcagggagcggaaucauaauuucggauaccccagugcaugacugcaauacaaccugucaaacgccgaaaggcgcuaucaacacuucucugcccuuucagaauauucacccuaucacaaucgguaagugcccaaaguauguaaaauccaccaaacuucgccuggccacuggguugagaaacgugcccucaauucagaguaggggacucuucggcgcgauagccggcuuuaucgaagggggauggacagguauggucgacggcugguacggguaucaucaccagaaugaacaaggaagcggcuacgcagcugaucugaaauccacccagaacgccauugacgagaucacgaauaaggugaacucuguuauagagaaaaugaauacccaguucacagcuguggguaaggaauuuaaccacuuagagaagcggauugaaaaucugaacaaaaaggucgaugacggguuccucgauaucuggacuuacaaugccgagcuucugguguugcuagaaaacgagcgcacccuggacuaucaugauagcaauguaaagaaccucuacgagaagguucgaucacagcugaaaaacaaugcaaaggaaaucggcaacggauguuucgaguuuuaucacaagugcgacaauacauguauggaaagugugaaaaacggcacuuacgauuauccuaaguacuccgaggaagccaaacuuaauagagaggagauugacggggucaagcuggaaagcaccaggaucuaucaaauuuuggcuauauacucuacaguggcgucaagucucguccuggugguuagcuuaggagcaaucuccuucuggaugugcucuaacgguucgcugcagugccggauuuguaucuga

SEQ ID NO: 132384 - RNA, 1701 nt, Artificial Sequence; identical to SEQ ID NO: 131881
  derived and/or modified CDS sequence (opt3) from hemagglutinin__InfluenzaA__ADD96816

SEQ ID NO: 132385 - RNA, 1701 nt, Artificial Sequence
  derived and/or modified CDS sequence (opt3) from hemagglutinin__InfluenzaA__ADD96826
augaaggccauccuggugguccuccuuuacaccuucgcuacagcaaacgccgacacucugugcauuggcuaucacgcgaauaacagcacggauaccguugacacaguguuggagaaaaauguaacugugacccauuccgucaacuuacuggaagauaagcacaaugggaaacuauguaagcucagaggaguggcuccccugcaucuugguaaaugcaacauagccggcuggauccuggggaauccugagugugaaucuuugucaacagcaaguagcugguccuacauuguugagaccucuucgucagacaacggaacuugcuauccaggcgauuuuaucgacuacgaggagcucagggagcagcugagcaguguguccucuuucgaacgguuugagauuuucccgaagacaagcuccuggcccaaucacgauucaaacaagggugucaccgccgcuuguccucaugcaggggccaaaaguuuuuauaagaaucugaucuggcucgugaaaaagggaaacagcuacccaaaauuaucuaaguccuauauaaaugacaagggcaaagaaguacugguucuuuggggcauccaccaccccucaacgagcgcugaucaacagaguuuguaccagaacgccgacgcguacguguucgucgggacuucucgcuauuccaagaaauuuaagccugagauugcaauccgaccaaaagugauggaucaggagggacguaugaauuacuauuggacccugguggaacccggugacaagauuacauucgaggccacuggcaaccuagucguuccuagauacgcuuuugccauggaaaggaacgcagggagcggaaucauaauuucggauaccccagugcaugacugcaauacaaccugucaaacgccgaaaggcgcuaucaacacuucucuccccuuccagaauauucacccuaucacaaucgguaagugcccaaaguauguaaaauccaccaagcugcggcuugccacugggcugcgcaacgugcccucaauucagaguagaggauuguuuggcgcgauagccggcuucaucgaagggggauggacagguauggucgacggcugguacggguaucaucaccagaaugaacaaggaagcggcuacgcagcugaucucaaauccacccagaacgccauugacgagaucacgaauaaggugaacucuguuauagagaaaaugaauacccaguuugcugccguggguaaggaguucaaccaccuggaaaagaggauugaaaauuuaaacaaaaaggucgaugacggguuccuggauaucuggacauacaaugcagagcuccuugugcuguuggaaaacgagcggacucuagacuaucaugauagcaauguaaagaaccuguacgagaagguucgcucacagcucaaaaacaaugccaaggaaaucggcaacggauguuuugaguucuaucacaagugcgacaauaccuguauggaaagugugaaaaacggcacauacgauuauccuaaguacuccgaggaagcuaaacugaaucgagaggagauugacggggucaaacuugaaagcacuagaaucuaucaaauucuggcgauauacucuaccguggcaucaaguuugguccucgugguuagccugggagccaucuccuuuuggaugugcucuaacgguucguuacagugcaggauuuguaucuga

SEQ ID NO: 132386 - RNA, 1701 nt, Artificial Sequence; identical to SEQ ID NO: 130717
  derived and/or modified CDS sequence (opt3) from hemagglutinin__InfluenzaA__ADD96836

SEQ ID NO: 132387 - RNA, 1701 nt, Artificial Sequence; identical to SEQ ID NO: 130717
  derived and/or modified CDS sequence (opt3) from hemagglutinin__InfluenzaA__ADD96846

SEQ ID NO: 132388 - RNA, 1701 nt, Artificial Sequence; identical to SEQ ID NO: 132269
  derived and/or modified CDS sequence (opt3) from hemagglutinin__InfluenzaA__ADD96856

SEQ ID NO: 132389 - RNA, 1701 nt, Artificial Sequence; identical to SEQ ID NO: 131070
  derived and/or modified CDS sequence (opt3) from hemagglutinin__InfluenzaA__ADD96886

SEQ ID NO: 132390 - RNA, 1701 nt, Artificial Sequence; identical to SEQ ID NO: 132344
  derived and/or modified CDS sequence (opt3) from hemagglutinin__InfluenzaA__ADD96896

SEQ ID NO: 132391 - RNA, 1701 nt, Artificial Sequence; identical to SEQ ID NO: 131881
  derived and/or modified CDS sequence (opt3) from hemagglutinin__InfluenzaA__ADD96906

SEQ ID NO: 132392 - RNA, 1701 nt, Artificial Sequence; identical to SEQ ID NO: 131881
  derived and/or modified CDS sequence (opt3) from hemagglutinin__InfluenzaA__ADD96916

SEQ ID NO: 132393 - RNA, 1701 nt, Artificial Sequence; identical to SEQ ID NO: 131881
  derived and/or modified CDS sequence (opt3) from hemagglutinin__InfluenzaA__ADD96926

SEQ ID NO: 132394 - RNA, 1701 nt, Artificial Sequence
  derived and/or modified CDS sequence (opt3) from hemagglutinin__InfluenzaA__ADD96936
augaaggccauccuggugguccuccuuuacaccuucgcuacagcaaacgccgacacucugugcauuggcuaucacgcgaauaacagcacggauaccguugacacaguguuggagaaaaauguaacugugacccauuccgucaacauauuagaagauaagcacaaugggaaacuguguaagcuaagaggaguggcuccccuccaucuggguaaaugcaacaucgccggcuggauucuugggaauccugagugugaaucucugucaacagcaaguagcugguccuacaucguugagaccucuucgucagacaacggaacuugcuauccaggcgauuuuauugacuacgaagaguugagggagcagcucagcaguguguccucuuucgaacgguuugagaucuucccgaagacaagcuccuggcccaaucacgauucaaacaagggugucaccgccgcuuguccucaugcaggggccaaaaguuuuuauaagaaucugauauggcugaucaaaaagggaaacagcuacccaaaacucucuaaguccuauauuaaugacaagggcaaagaaguguuaguacuguggggcauccaccaccccucaacgagcgcugaucaacagagucuuuaccagaacgccgacgcguacguuuucguggggacuucucgcuauuccaagaaauuuaagccugagauugcaauccgaccaaaaguccgugaucaggagggaagaaugaauuacuauuggaccuugguggaacccggugacaagauaacauucgaggccacuggcaaccugguggucccuagguacgcuuuugccauggaacggaacgcagggagcggaauuaucauuucggauaccccaguucaugacugcaauacaaccugucaaacgccgaaaggcgcuaucaacacuucucuacccuuccagaauauccacccuauuacaauagguaagugcccaaaguaugugaaauccaccaagcuccgccuggccacugggcuuagaaacguacccucaauccagaguaggggacuguuuggcgcgauugccggcuucaucgaagggggauggacagguaugguggacggcugguacggguaucaucaccagaaugaacaaggaagcggcuacgcagcugauuugaaauccacccagaacgccauagacgagauuacgaauaaggucaacucugugaucgagaaaaugaauacccaguuuacagcuguugguaaggaguucaaccaccucgagaagcggaucgaaaaucugaacaaaaagguggaugacggguucuuagauauuuggacuuacaaugccgagcugcucguccuucuggaaaacgagcgcaccuuggacuaucaugauagcaaugugaaaaaccuauacgagaagguacgaucacagcugaaaaacaaugcaaaggaaaucggcaacggauguuuugaguucuaucacaagugcgacaauacauguauggaaaguguuaaaaacggcacuuacgauuauccuaaguacuccgaggaagccaaacucaauagagaggagauugacggggugaagcuggaaagcaccaggauauaucaaauccuugcuauuuacucuacagucgcgucaagucugguguuggucgugagccucggagcaaucuccuuuuggaugugcucuaacgguucgcugcagugccggaucuguauuuga

SEQ ID NO: 132395 - RNA, 1701 nt, Artificial Sequence
  derived and/or modified CDS sequence (opt3) from hemagglutinin__InfluenzaA__ADD96946
augaaggccauccuggugguccuccuuuacaccuucgcuacagcaaacgccgacacucugugcauuggcuaucacgcgaauaacagcacggauaccguugacacaguguuggagaaaaauguaacugugacccauuccgucaacuuacuggaagauaagcacaaugggaaacuauguaagcucagaggaguggcuccccugcaucuugguaaaugcaacauagccggcuggauccuggggaauccugagugugaaucuuugucaacagcaaguagcugguccuacauuguugagaccucuucgucagacaacggaacuugcuauccaggcgauuuuaucgacuacgaggagcucagggagcagcugagcaguguguccucuuucaagcgguuugaaauuuucccgaagacaagcuccuggcccaaucacgauucaaacaaaggugucaccgccgcuuguccucaugcaggggccaagaguuuuuauaaaaaucugaucuggcucgugaagaaaggaaacagcuacccaaaguuaucuaaguccuauauaaaugacaaaggcaaggagguacugguucuuuggggcauccaccaccccucaacgagcgcugaucaacagaguuuguaccagaacgccgacgcguacguguucgucgggacuucucgcuauuccaaaaaguuuaaaccugaaauugcaauccgaccaaaggugcgugaucaggagggaagaaugaauuacuauuggacccugguggagcccggugacaaaauuacauucgaagccacuggcaaccuagucguuccuagguacgcuuuugccauggagcggaacgcagggagcggaaucauaauuucggauaccccagugcaugacugcaauacaaccugucaaacgccgaagggcgcuaucaacacuucucuccccuuccagaauauucacccuaucacaaucggugaaugcccaaaguauguaaaauccaccaagcugcgccuugccacugggcugagaaacgugcccucaauucagaguaggggauuguuuggcgcgauagccggcuucaucgaagggggauggacagguauggucgacggcugguacggguaucaucaccagaaugaacaaggaagcggcuacgcagcugaucucaaauccacccagaacgccauugacaagaucacgaauaaagugaacucuguuauagagaagaugaauacccaguuuacagcuguggguaaggaguucaaccaccuggaaaaacggauugagaauuuaaacaagaaagucgaugacggguuccuggauaucuggacuuacaaugccgaacuccuugugcuguuggagaacgaacgcacccuagacuaucaugauagcaauguaaagaaccuguacgagaaaguucgaucacagcucaagaacaaugcaaaggagaucggcaacggauguuuugaguucuaucacaaaugcgacaauacauguauggaaagugugaagaacggcacuuacgauuauccuaaauacuccgaagaggccaagcugaauagagaagagauugacggggucaaacuugagagcaccaggaucuaucaaauucuggcuauauacucuacaguggcgucaaguuugguccucgugguuagccugggagcaaucuccuuuuggaugugcucuaacgguucguuacagugccggauuuguaucuga

SEQ ID NO: 132396 - RNA, 1701 nt, Artificial Sequence
  derived and/or modified CDS sequence (opt3) from hemagglutinin__InfluenzaA__ADD96956
augaaggccauccuggugguccuccuuuacaccuucgcuacagcaaacgccgacacucugugcauuggcuaucacgcgaauaacagcacggauaccguugacacaguguuggagaaaaauguaacugugacccauuccgucaacuuacuggaagauaagcacaaugggaaacuauguaagcucagaggaguggcuccccugcaucuugguaaaugcaacauagccggcuggauccuggggaauccugagugugaaucuuugucaacagcaaguagcugguccuacauuguugagaccucuucgucagacaacggaacuugcuauccaggcgauuuuaucgacuacgaggagcucagggagcagcugagcaguguguccucuuucgaacgguuugagauuuucccgaagacaagcuccuggcccaaucacgauucaaacaagggugucaccgccgcuuguccucaugcaggggccaaaaguuuuuauaagaaucugaucuggcucgugaaaaagggaaacagcuacccaaaauuaucuaaguccuauauaaaugacaagggcaaagaaguacugguucuuuggggcauccaccaccccucaacgagcgcugaucaacagaguuuguaccagaacgccgacgcguacguguucgucgggacuucucgcuauuccaagaaauuuaagccugagauugcaauccgaccaaaagugcgugagcaggaaggaagaaugaauuacuauuggacccuggugaagcccggugauaaaauuacauucgaggccacuggcaaccuagucguuccuagguacgcuuuugccauggaacggaacgcagggagcggaaucauaauuucggacaccccagugcaugauugcaauacaaccugucaaacgccgaagggcgcuaucaacacuucucuccccuuccagaauauucacuccaucacaaucgguaagugcccuaaauauguaaagucaaccaaacugcgccuugccacugggcugagaaacgugccaaguauucagagcaggggauuguuuggcgcgauagccggcuucaucgaagggggauggacagguauggucgacggcugguacggguaucaucaccagaaugaacaaggauccggcuacgcagcugaccucaagucuacccagaacgccauugaugagaucacgaauaaagugaacagcguuauagagaagaugaauacccaguuuacagcuguggguaaggaguucaaccaccuggaaaaacggauugaaaauuuaaacaagaaagucgacgauggguuccuggacaucuggacuuacaaugccgagcuccuugugcuguuggaaaacgagcgcacccuagauuaucaugacucaaauguaaagaaccuguacgagaaaguucgaagucagcucaagaacaaugcaaaggaaaucggcaacggauguuuugaguucuaucacaaaugcgauaauacauguauggaauccgugaagaacggcacuuacgacuaucccaaauacagcgaggaagccaagcugaauagagaggagauugauggggucaaacuugaaucuaccaggaucuaucaaauucuggcuauauacucaacaguggcgaguagcuugguccucgugguuucccugggagcaaucucuuuuuggaugugcucgaacgguagcuuacagugccggauuuguaucuga

SEQ ID NO: 132397 - RNA, 1701 nt, Artificial Sequence; identical to SEQ ID NO: 130717
  derived and/or modified CDS sequence (opt3) from hemagglutinin__InfluenzaA__ADD96976

SEQ ID NO: 132398 - RNA, 1701 nt, Artificial Sequence; identical to SEQ ID NO: 130717
  derived and/or modified CDS sequence (opt3) from hemagglutinin__InfluenzaA__ADD96986

SEQ ID NO: 132399 - RNA, 1701 nt, Artificial Sequence
  derived and/or modified CDS sequence (opt3) from hemagglutinin__InfluenzaA__ADD97035
augaaggccauccuggugguccuccuuuacaccuucgcuacagcaaacgccgacacucugugcauuggcuaucacgcgaauaacagcacggauaccguugacacaguguuggagaaaaauguaacugugacccauuccgucaacuuacuggaagauaagcacaaugggaaacuauguaagcucagaggaguggcuccccugcaucuugguaaaugcaacauagccggcuggauccuggggaauccugagugugaaucuuugucaacagcaaguagcugguccuacauuguugagaccucuucgucagacaacggaacuugcuauccaggcgauuuuaucgacuacgaggagcucagggagcagcugagcaguguguccucuuucgaacgguuugagauuuucccgaagacaagcuccuggcccaaucacgauucaaacaagggugucaccgccgcuuguccucaugcaggggccaaaaguuuuuauaagaaucugaucuggcucgugaaaaagggaaacagcuacccaaaauuaucuaaguccuauauaaaugacaagggcaaagaaguacugguucuuuggggcauccaccaccccucaacgagcgcugaucaacagaguuuguaccagaacgccgacgcguacguguucgucgggacuucucgcuauuccaagaaauuuaagccugagauugcaauccgaccaaaagugcgugaucaggagggaagaaugaauuacuauuggacccugguggaacccggugacaagauuacauucgaggccacuggcaaccuagucguuccuagguacgcuuuugccauggaacggaacgcagggagcggaaucauaauuucggauaccccagugcaugacugcaauacaaccugucaaacgccgaaaggcgcuaucaacacuucucuccccuuccagaauauucacccuaucacaaucgguaagugcccaaaguauguaaaauccaccaagcugcgcauggccacugggcuuagaaacgugcccucaauucagaguaggggacuguuuggcgcgauagccggcuucaucgaagggggauggacagguauggucgacggcugguacggguaucaucaccagaaugaacaaggaagcggcuacgcagcugauuugaaauccacccagaacgccauugacgagaucacgaauaaggugaacucuguuauagagaaaaugaauacccaguuuacagcuguggguaaggaguucaaccaccucgaaaagcggauugaaaaucugaacaaaaaggucgaugacggguucuuagauaucuggacuuacaaugccgagcugcucgugcuucuggaaaacgagcgcaccuuggacuaucaugauagcaauguuaaaaaccuauacgagaagguacgaucacagcugaaaaacaaugcaaaggaaaucggcaacggauguuuugaguucuaucacaagugcgacaauacauguauggaaagugugaaaaacggcacuuacgauuauccuaaguacuccgaggaagccaaacucaauagagaggagauugacggggucaagcuggaaagcaccaggaucuaucaaauucuugcuauauacucuacaguggcgucaagucuggucuuggugguuagccucggagcaaucuccuuuuggaugugcucuaacgguucgcugcagugccggauuuguaucuga

SEQ ID NO: 132400 - RNA, 1701 nt, Artificial Sequence
  derived and/or modified CDS sequence (opt3) from hemagglutinin__InfluenzaA__ADD97045
augaaggccauccuggugguccuccuuuacaccuucgcuacagcaaacgccgacacucugugcauuggcuaucacgcgaauaacagcacggauaccguugacacaguguuggagaaaaauguaacugugacccauuccgucaacuuacuggaagauaagcacaaugggaaacuauguaagcucagaggaguggcuccccugcaucuugguaaaugcaacauagccggcuggauccuggggaauccugagugugaaucuuugucaacagcaaguagcugguccuacauuguugagaccucuucgucagacaacggaacuugcuauccaggcgauuuuacagacuacgaggagcucagggagcagcugagcaguguguccucuuucgaacgguuugagaucuucccgaagaccagcuccuggcccaaucacgauucaaacaagggugucacggccgcuuguccucaugcaggggccaaaaguuuuuauaagaaucugauuuggcucgugaaaaagggaaacagcuacccaaaauuaucuaaguccuauaucaaugacaagggcaaagaaguacugguucuuuggggcauacaccaccccucaacuagcgcugaucaacagaguuuguaccagaacgccgacgcguacguguucgucgggaccucucgcuauuccaagaaauuuaagccugagaucgcaauucgaccaaaagugcgugaucaggagggaagaaugaauuacuauuggacacugguggaacccggugacaagaucacuuucgaggccaccggcaaccuagucguuccuagguacgcuuuugccauggaacggaacgcagggagcggaauuaucauaucggauacaccagugcaugacugcaauaccacgugucaaacuccgaaaggcgcuauuaacacaucucuccccuuccagaauauccacccuauuaccaucgguaagugcccaaaguauguaaaauccacuaagcugcgccuugccacagggcugagaaacgugcccucaauccagaguaggggauuguuuggcgcgauugccggcuucauagaagggggauggaccgguauggucgacggcugguacggguaucaucaccagaaugaacaaggaagcggcuacgcagcugaucucaaauccacgcagaacgccaucgacgagauuaccaauaaggugaacucuguuaucgagaaaaugaauacacaguuuacugcuguggguaaggaguucaaccaccuggaaaagcggauagaaaauuuaaacaaaaaggucgaugacggguuccuggauauuuggaccuacaaugccgagcuccuugugcuguuggaaaacgagcgcacacuagacuaucaugauagcaauguaaagaaccuguacgagaagguucgaucacagcucaaaaacaaugcaaaggaaaucggcaacggauguuuugaguucuaucacaagugcgacaauacuuguauggaaagugugaaaaacggcaccuacgauuauccuaaguacuccgaggaagccaaacugaauagagaggagaucgacggggucaaacuugaaagcacaaggauuuaucaaauccuggcuauuuacucuaccguggcgucaaguuugguccucgugguuagccugggagcaauauccuuuuggaugugcucuaacgguucguuacagugccggaucuguauuuga

SEQ ID NO: 132401 - RNA, 1701 nt, Artificial Sequence; identical to SEQ ID NO: 132400
  derived and/or modified CDS sequence (opt3) from hemagglutinin__InfluenzaA__ADD97055

SEQ ID NO: 132402 - RNA, 1701 nt, Artificial Sequence; identical to SEQ ID NO: 132400
  derived and/or modified CDS sequence (opt3) from hemagglutinin__InfluenzaA__ADD97123

SEQ ID NO: 132403 - RNA, 1701 nt, Artificial Sequence
  derived and/or modified CDS sequence (opt3) from hemagglutinin__InfluenzaA__ADD97161
augaaggccauccuggugguccuccuuuacaccuucgcuacagcaaacgccgacacucugugcauuggcuaucacgcgaauaacagcacggauaccguugacacaguguuggagaagaauguaacugugacccauuccgucaacuuacuggaagauaagcacaaugggaaacuauguaagcucagaggaguggcuccccugcaucuugguaaaugcaacauagccggcuggauccuggggaauccugagugugaaucuuugucaacagcaaguagcugguccuacauuguugagaccucuucgucagacaacggaacuugcuauccaggcgauuuuaucgacuacgaagaacucagggagcagcugagcaguguguccucuuucgaacgguuugagauuuucccgaagacaagcuccuggcccaaucacgauucaaacaagggugucaccgccgcuuguccucaugcaggggccaaaaguuuuuauaagaaucugaucuggcucgugaaaaagggaaaaagcuacccaaaguuaucuaaguccuauauaaacgacaaaggcaagaaaguacugguucuuuggggcauccaccaccccucaacgagcgcugaucaacagaguuuguaccagaaugccgacgcguacguguucgucgggacuucucgcuauuccaagaaauuuaagccugaaauugcaauccgaccaaaagugcgugaucaggagggaagaaugaacuacuauuggacccugguggagcccggugacaagauuacauucgaagccacuggcaaucuagucguuccuagguacgcuuuugccauggagcggaacgcagggagcggaaucauaauuucggauaccccagugcaugacugcaacacaaccugucaaacgccgaagggcgcuaucaauacuucucuccccuuccagaacauucacccuaucacaaucgguaaaugcccaaaguauguaaaauccaccaagcugcgccuugccacugggcugagaaaugugcccucaauucagaguaggggauuguuuggcgcgauagccggcuucaucgaagggggauggacagguauggucgacggcugguacggguaucaucaccagaacgagcaaggaagcggcuacgcagcugaucucaaauccacccagaaugccauugacgaaaucacgaacaagguaaauucuguuauagagaagaugaacacccaguuuacagcuguggguaaagaguucaaucaccuggaaaagcggauugagaacuuaaauaaaaaggucgaugacggguuccuggauaucuggacuuacaacgccgaacuccuugugcuguuggagaaugaacgcacccuagacuaucaugauagcaacgugaaaaaucuguacgagaagguucgaucacagcucaagaacaacgcaaaagagaucggcaauggauguuuugaguucuaucacaagugcgacaacacauguauggagagugugaaaaauggcacuuacgauuauccuaaguacuccgaagaggccaaacugaacagagaagagauugacggggucaaacuugagagcaccaggaucuaucaaauucuggcuauauacucuacaguggcgucaaguuugguccucgugguuagccugggagcaaucuccuuuuggaugugcucuaaugguucguuacagugccggauuuguaucuga

SEQ ID NO: 132404 - RNA, 1701 nt, Artificial Sequence
  derived and/or modified CDS sequence (opt3) from hemagglutinin__InfluenzaA__ADD97171
augaaggccauccuggugguccuccuuuacaccuucgcuacagcaaacgccgacacucugugcauuggcuaucacgcgaauaacagcacggauaccguugacacaguguuggagaaaaauguaacugugacccauuccgucaacuuacuggaagauaagcacaaugggaaacuauguaagcucagaggaguggcuccccugcaucuugguaaaugcaacauagccggcuggauccuggggaauccugagugugaaucuuugucaacagcaaguagcugguccuacauuguugagaccucuucgucagacaacggaacuugcuauccaggcgauuuuaucgacuacgaggagcucagggagcagcugagcaguguguccucuuucgaacgguuugagauuuucccgaagacaagcuccuggcccaaucacgauucaaacaagggugucaccgccgcuuguccucaugcaggggccaaaaguuuuuauaagaaucugaucuggcucgugaaaaagggaaacagcuacccaaaauuaucuaaguccuauauaaaugacaagggcaaagaaguacugguucuuuggggcauccaccaccccucaacgagcgcugaucaacagaguuuguaccagaacgccgacgcguacguguucgucgggacuucucgcuauuccaagaaauuuaagccugagauugcaauccgaccaaaagugcgugaucaggagggaagaaugaauuacuauuggacccugguggaacccggugacaagauuacauucgaggccacuggcaaccuagucguuccuagguacgcuuuugccauggaacggaacgcagggagcggaaucauaauuucggauaccccagugcaugacugcaauacaaccugucaaacgccgaaaggcgcuaucaacacuucucuccccuuccagaauauucacccuaucacaaucgguaagugcccaaaguauguaaaauccaccaagcugcgccuugccacugggcugagaaacgugcccucaauucagaguaggggauuguuuggcgcgauagccggcuucaucgaagggggauggacagguauggucgacggcugguacggguaucaucaccagaaugaacaaggaagcggcuacgcagcugaucucaaauccacccagaacgccauugacgagaucacgaauaaggugaacucuguuauagagaaaaugaauacccaguuuacagcuguggguaaggaguucaaccaccuggaaaagcggauugaaaauuuaaacaaaaaggucgaugacggguuccuggauaucuggacuuacaaugccgagcuccuugugcuguuggaaaacgagcgcacccuagacuaucaugauagcaauguaaagaaccuguacgagaagguucgaucacagcucaaaaacaaugcaaaggaaaucggcaacggauguuuugaguucuaucacaagugcgacaauacauguauggaaagugugaaaaacggcacuuacgauuauccuaaguacuccgaggaagccaaacugaauagagaggagauugacggggucaaacuugaaagcaccaggaucuaucaaauucuggcuauauacucuacaguggcgucaaguuugguccucgugguuagccugggagcaguguccuuuuggaugugcucuaacgguucguuacagugccggaucuguauuuga

SEQ ID NO: 132405 - RNA, 1701 nt, Artificial Sequence; identical to SEQ ID NO: 130717
  derived and/or modified CDS sequence (opt3) from hemagglutinin__InfluenzaA__ADD97181

SEQ ID NO: 132406 - RNA, 1701 nt, Artificial Sequence; identical to SEQ ID NO: 130717
  derived and/or modified CDS sequence (opt3) from hemagglutinin__InfluenzaA__ADD97201

SEQ ID NO: 132407 - RNA, 1701 nt, Artificial Sequence; identical to SEQ ID NO: 132400
  derived and/or modified CDS sequence (opt3) from hemagglutinin__InfluenzaA__ADD97211

SEQ ID NO: 132408 - RNA, 1701 nt, Artificial Sequence; identical to SEQ ID NO: 130717
  derived and/or modified CDS sequence (opt3) from hemagglutinin__InfluenzaA__ADD97231

SEQ ID NO: 132409 - RNA, 1701 nt, Artificial Sequence
  derived and/or modified CDS sequence (opt3) from hemagglutinin__InfluenzaA__ADD97241
augaaggccauccuggugguccuccuuuacaccuucgcuacagcaaacgccgacacucugugcauuggcuaucacgcgaauaacagcacggauaccguugacacaguguuggagaagaauguaacugugacccauuccgucaacuuacuggaagauaagcacaaugggaaacuauguaagcucagaggaguggcuccccugcaucuugguaaaugcaacauagccggcuggauccuggggaauccugagugugaaucuuugucaacagcaaguagcugguccuacauuguugagaccucuucgucagacaacggaacuugcuauccaggcgauuuuacagacuacgaggagcucagggagcagcugagcaguguguccucuuucgaacgguuugagaucuucccgaagaccagcuccuggcccaaucacgauucaaacaagggugucacggccgcuuguccucaugcaggggccaaaaguuuuuauaagaaucugauuuggcucgugaaaaagggaaacagcuacccaaaauuaucuaaguccuauaucaaugacaagggcaaagaaguacugguucuuuggggcauacaccaccccucaacuagcgcugaucaacagaguuuguaccagaacgccgacgcguacguguucgucgggaccucucgcuauuccaagaaauuuaagccugagaucgcaauucgaccaaaagugcgugaucaggagggaagaaugaauuacuauuggacacugguggaacccggugacaagaucacuuucgaggccaccggcaaccuagucguuccuagguacgcuuuugccauggaacggaacgcagggagcggaauuaucauaucggauacaccagugcauaauugcaacaccacgugucaaacuccgaaaggcgcuauuaauacaucucuccccuuccagaacauccacccuauuaccaucgguaagugcccaaaguauguaaaauccacuaagcugcgccuugccacagggcugagaaaugugcccucaauccagaguaggggauuguuuggcgcgauugccggcuucauagaagggggauggaccgguauggucgacggcugguacggguaucaucaccagaacgaacaaggaagcggcuacgcagcugaccucaaauccacgcagaaugccaucgaugagauuaccaacaagguaaauucuguuaucgagaaaaugaacacacaguuuacugcuguggguaaggaguucaaucaccuggaaaagcggauagaaaacuuaaauaaaaaggucgacgauggguuccuggacauuuggaccuacaacgccgagcuccuugugcuguuggaaaaugagcgcacacuagauuaucaugacagcaacgugaaaaaccuguacgagaagguucgaucacagcucaaaaauaacgcaaaggaaaucggcaauggauguuuugaguucuaucacaagugcgauaacacuuguauggaaagugugaaaaauggcaccuacgacuauccuaaguacuccgaggaagccaaacugaacagagaggagaucgauggggucaaacuugaaagcacaaggauuuaucaaauccuggcuauuuacucuaccguggcgucaaguuugguccucgugguuagccugggagcaauauccuuuuggaugugcucuaaugguucguuacagugccggaucuguauuuga

SEQ ID NO: 132410 - RNA, 1701 nt, Artificial Sequence; identical to SEQ ID NO: 132400
  derived and/or modified CDS sequence (opt3) from hemagglutinin__InfluenzaA__ADD97251

SEQ ID NO: 132411 - RNA, 1701 nt, Artificial Sequence; identical to SEQ ID NO: 130717
  derived and/or modified CDS sequence (opt3) from hemagglutinin__InfluenzaA__ADD97261

SEQ ID NO: 132412 - RNA, 1701 nt, Artificial Sequence
  derived and/or modified CDS sequence (opt3) from hemagglutinin__InfluenzaA__ADD97271
augaaggccauccuggugguccuccuuuacaccuucgcuacagcaaacgccgacacucugugcauuggcuaucacgcgaauaacagcacggauaccguugacacaguguuggagaagaauguaacugugacccauuccgucaacuuacuggaagauaagcacaaugggaaacuauguaagcucagaggagugacaccccugcaucuugguaaaugcaacauagcuggcuggauccuggggaauccugagugugaaucuuugucaaccgccaguagcugguccuacauuguugagacuucuucgucagacaacggaacaugcuauccaggcgauuuuaucgacuacgaggagcucagggagcagcugagcaguguguccucuuucgaacgguuugagauuuucccgaagaccagcuccuggcccaaucacgauucaaacaagggugucacggcagccuguccucaugcuggggcaaaaaguuuuuauaagaaucugaucuggcucgugaaaaagggaaacagcuacccaaaauuaucuaaguccuauauaaaugacaagggcaaagaaguacugguucuuuggggcauccaccaccccucaacuagcgccgaucaacagaguuuguaccagaacgcugacgccuacguguucgucgggaccucucgcuauuccaagaaauuuaagccugagauugcgauccgaccaaaagugcgugaucaggagggaagaaugaauuacuauuggacacugguggaacccggugacaagauuacuuucgaggcaaccggcaaccuagucguuccuagguacgccuuugcuauggaacggaacgccgggagcggaaucauaauuucggauacaccagugcaugacugcaauaccacgugucaaacuccgaaaggcgcaaucaacacaucucuccccuuccagaauauucacccuaucaccaucgguaagugcccaaaguauguaaaauccacuaagcugcgccuugcuacagggcugagaaacauucccucaauacagaguaggggauuguuuggcgccaucgcgggcuucauugaagggggauggaccgguaugguggacggcugguacggguaucaucaccagaaugaacaaggaagcggcuacgccgcagaucucaaauccacgcagaacgcuaucgacgagauaaccaauaaggucaacucugugauugagaaaaugaauacacaguuuacugccguugguaaggaguucaaccaccuggaaaagcggaucgaaaauuuaaacaaaaagguggaugacggguuccuggauaucuggaccuacaaugcugagcuccuuguccuguuggaaaacgagcgcacacuagacuaucaugauagcaaugugaaaaaccuguacgagaagguacgaucacagcucaaaaacaaugccaaggaaauuggcaacggauguuuugaguucuaucacaagugcgacaauacuuguauggaaaguguuaaaaacggcaccuacgauuauccuaaguacuccgaggaagcaaaacugaauagagaggagaucgacggggugaaacuugaaagcacaaggauuuaucaaauacuggccaucuacucuaccgucgcuucaaguuuggugcucgucgugagccugggagcgauuuccuuuuggaugugcucuaacgguucguuacagugccggaucuguaucuga

SEQ ID NO: 132413 - RNA, 1701 nt, Artificial Sequence; identical to SEQ ID NO: 132404
  derived and/or modified CDS sequence (opt3) from hemagglutinin__InfluenzaA__ADD97281

SEQ ID NO: 132414 - RNA, 1701 nt, Artificial Sequence; identical to SEQ ID NO: 130717
  derived and/or modified CDS sequence (opt3) from hemagglutinin__InfluenzaA__ADD97291

SEQ ID NO: 132415 - RNA, 1701 nt, Artificial Sequence
  derived and/or modified CDS sequence (opt3) from hemagglutinin__InfluenzaA__ADD97311
augaaggccauccuggugguccuccuuuacaccuucgcuacagcaaacgccgacacucugugcauuggcuaucacgcgaauaacagcacggauaccguugacacaauauuggagaaaaaugugacuguaacccauuccgugaacuuacuggaagauaagcacaaugggaaacuauguaagcucagaggagucgcuccccugcaucuugguaaaugcaacaucgccggcuggauucuggggaauccugagugugaaucuuugucaacagcaaguagcugguccuacaucguggagaccucuucgucagacaacggaacuugcuauccaggcgauuuuauugacuacgaggagcucagggagcagcugagcaguguuuccucuuucgaacgguuugagaucuucccgaagacaagcuccuggcccaaucacgauucaaacaagggugugaccgccgcuuguccucaugcaggggccaaaaguuuuuauaagaaucugauauggcucgucaaaaagggaaacagcuacccaaaauuaucuaaguccuauaucaaugacaagggcaaagaaauucuggugcuuuggggcauccaccaccccucaacgauugcugaucaacagagcuuguaccagaacgccgacgcguacguauucguugggaccagucgcuauucuaagaaauuuaagccugagaucgcaauacgaccaaaagugcgugaucaggagggaagaaugaaguacuauuggacucuggucgaacccggugacaaaauuacauucgaggccacuggcaaucuaguggugccuagguacgcuuuugccauggaacggaacgcaggguccggaaucauuaucagcgauaccccaguccauaacugcaauacaaccugucaaacgucgaagggcgcuaucaacacuucucucccguuccagaauauucaccccauaacaaucgguaagugcccuaaauauguuaaguccaccaaacugcgccuugccacugggcugagaaacgugccaucaauucagaguaggggauuguuuggcgcgaucgccggcuucauagaagggggauggacagguaugguagacggcugguacggguaucaucaccagaaugaacaaggaagcggcuacgcagcugaccucaaguccacccagaacgccauugaugagaucacgaauaaagugaacucugucaucgagaagaugaauacccaguuuacagcuguggguaaggaguucaaccaccuggaaaaacggauugaaaauuuaaacaagaaaguugacgauggguuccuggacaucuggacuuacaaugccgagcuccuugugcuguuggaaaacgagcgcacccuagauuaucaugacagcaaugucaagaaccuguacgagaaagugcgaucacagcucaagaacaaugcaaaggaaauuggcaacggauguuuugaguucuaucacaaaugcgauaauacauguauggaaaguguaaagaacggcacuuacgacuaucccaaauacuccgaggaagccaagcugaauagagaggagauagaugggguuaaacuugaaagcaccaggaucuaucaaauucuggcuaucuacucuacaguggcgucaaguuugguccucguggucagccugggagcaaucuccuuuuggaugugcucuaacgguucguuacagugccggauuuguauauga

SEQ ID NO: 132416 - RNA, 1701 nt, Artificial Sequence; identical to SEQ ID NO: 132400
  derived and/or modified CDS sequence (opt3) from hemagglutinin__InfluenzaA__ADD97321

SEQ ID NO: 132417 - RNA, 1701 nt, Artificial Sequence; identical to SEQ ID NO: 131881
  derived and/or modified CDS sequence (opt3) from hemagglutinin__InfluenzaA__ADD97331

SEQ ID NO: 132418 - RNA, 1701 nt, Artificial Sequence
  derived and/or modified CDS sequence (opt3) from hemagglutinin__InfluenzaA__ADD97341
augaaggccauccuggugguccuccuuuacaccuucgcuacaguuaacgcagacacucugugcauuggcuaucacgccaauaacagcacggauaccguggacacaguauuggagaaaaaugugacugucacccauuccgugaacuuacuggaagauaagcacaaugggaaacuauguaagcucagaggaguugcgccccugcaucuugguaaaugcaacauagcuggcuggauccuggggaauccugagugugaaucuuugucaacagccaguagcugguccuacauuguggagaccucuucgucagacaacggaacuugcuauccaggcgauuuuaucgacuacgaggagcucagggagcagcugagcagugucuccucuuucgaacgguuugagauuuucccgaagacaagcuccuggcccaaucacgauucaaacaagggugugaccgcagccuguccucaugcuggggcaaaaaguuuuuauaagaaucugaucuggcucguaaagaagggaaacagcuacccaaaauuaucuaaguccuauauaaaugacaagggcaaagaaguucuggugcuuuggggcauccaccaccccucaacgagcacugaucaacagaguuuguaccagaacgccgacgcuuacgucuucguggggaccucucgcuauuccaagaaauuuaagccugagauugccauccgaccaaaagugcgugaucaggagggaagaaugaauuacuauuggacacuggucgaacccggugacaagauuacuuucgaggcgaccggcaaccuaguugugccuagguacgcauuugccauggaacggaacgcugggagcggaaucauaauuucggauacaccaguacaugacugcaauaccacgugucaaacuccgaaaggcgccaucaacacaucucuccccuuccagaauauucacccuaucaccaucgguaagugcccaaaguaugugaaauccacuaagcugcgccuugcaacagggcugagaaacauucccucaauacagaguaggggauuguuuggcgcuaucgccggcuucauugaagggggauggaccgguauggucgacggcugguacggguaucaucaccagaaugaacaaggaagcggcuacgcggccgaucucaaauccacgcagaacgcaaucgacgagauaaccaauaaggugaacucuguuauugagaaaaugaauacacaguuuacugcuguggguaaggaguucaaccaccuggaaaagcggaucgaaaauuuaaacaaaaaggucgaugacggguuccuggauaucuggaccuacaaugccgagcuccuugugcuguuggaaaacgagcgcacacuagacuaucaugauagcaauguuaaaaaccuguacgagaagguacgaucacagcucaaaaacaaugcuaaggaaauuggcaacggauguuuugaguucuaucacaagugcgacaauacuuguauggaaagugugaaaaacggcaccuacgauuauccuaaguacuccgaggaagccaaacugaauagagaggagaucgacggggucaaacuugaaagcacaaggauuuaucaaauacuggcaaucuacucuaccguggccucaaguuugguccucgugguuagccugggagcuauuuccuuuuggaugugcucuaacgguucguuacagugccggaucuguaucuga

SEQ ID NO: 132419 - RNA, 1701 nt, Artificial Sequence; identical to SEQ ID NO: 131881
  derived and/or modified CDS sequence (opt3) from hemagglutinin__InfluenzaA__ADD97351

SEQ ID NO: 132420 - RNA, 1701 nt, Artificial Sequence; identical to SEQ ID NO: 131881
  derived and/or modified CDS sequence (opt3) from hemagglutinin__InfluenzaA__ADD97361

SEQ ID NO: 132421 - RNA, 1701 nt, Artificial Sequence
  derived and/or modified CDS sequence (opt3) from hemagglutinin__InfluenzaA__ADD97371
augaaggccauccuggugguccuccuuuacaccuucgcuacagcaaacgccgacacucugugcauuggcuaucacgcgaauaacagcacggauaccguugacacaguguuggagaaaaauguaacugugacccauuccgucaacuuacuggaagauaagcacaaugggaaacuauguaagcucagaggaguggcuccccugcaucuugguaaaugcaacauagccggcuggauccuggggaauccugagugugaaucuuugucaacagcaaguagcugguccuacauuguugagaccucuucgucagacaacggaacuugcuauccaggcgauuuuaucgacuacgaagaacucagggagcagcugagcaguguguccucuuucgaacgguuugagauuuucccgaagacaagcuccuggcccaaucacgauucaaacaagggugucaccgccgcuuguccucaugcaggggccaaaaguuuuuauaagaaucugaucuggcucgugaaaaagggaaacagcuacccaaaauuaucuaaguccuauauaaaugacaagggcaaagaaguacugguucuuuggggcauccaccaccccucaacgagcgcugaucaacagaguuuguaccagaacgccgacgcguacguguucgucgggacuucucgcuauuccaagaaauuuaagccugagauugcaauccgaccaaaagugcgugagcaggaaggaagaaugaauuacuauuggacccugguggagcccggugauaagauuacauucgaagccacuggcaaccuagucguuccuagguacgcuuuugccauggagcggaacgcagggagcggaaucauaauuucggacaccccagugcaugauugcaauacaaccugucaaacgccgaaaggcgcuaucaacacuucucuccccuuccagaauauucacccuaucacaaucgguaagugcccaaaguauguaaaauccaccaagcugcgccuugccacugggcugagaaacgugcccucaauucagaguaggggauuguuuggcgcgauagccggcuucaucgaagggggauggacagguauggucgacggcugguacggguaucaucaccagaaugagcaaggaagcggcuacgcagcugaccucaaauccacccagaacgccauugaugagaucacgaauaaggugaacucuguuauagaaaagaugaauacccaguuuacagcuguggguaaggaguucaaccaccuggaaaagcggauugagaauuuaaacaaaaaggucgacgauggguuccuggacaucuggacuuacaaugccgaacuccuugugcuguuggagaacgagcgcacccuagauuaucaugacagcaauguuaaaaaccuguacgaaaagguacgaucacagcucaaaaacaaugcaaaggagaucggcaacggauguuuugaguucuaucacaagugcgauaauacauguauggagagugugaaaaacggcacuuacgacuauccuaaguacuccgaagaggccaaacugaauagagaggaaauugauggggucaaacuugagagcaccaggaucuaucaaauucuggcuauauacucuacaguggcgucaaguuugguccucgugguuagccugggagcaaucuccuuuuggaugugcucuaacgguucguuacagugccggguguguauuuga

SEQ ID NO: 132422 - RNA, 1701 nt, Artificial Sequence; identical to SEQ ID NO: 131881
  derived and/or modified CDS sequence (opt3) from hemagglutinin__InfluenzaA__ADD97381

SEQ ID NO: 132423 - RNA, 1701 nt, Artificial Sequence; identical to SEQ ID NO: 130717
  derived and/or modified CDS sequence (opt3) from hemagglutinin__InfluenzaA__ADD97391

SEQ ID NO: 132424 - RNA, 1701 nt, Artificial Sequence; identical to SEQ ID NO: 131881
  derived and/or modified CDS sequence (opt3) from hemagglutinin__InfluenzaA__ADD97411

SEQ ID NO: 132425 - RNA, 1701 nt, Artificial Sequence; identical to SEQ ID NO: 131881
  derived and/or modified CDS sequence (opt3) from hemagglutinin__InfluenzaA__ADD97421

SEQ ID NO: 132426 - RNA, 1701 nt, Artificial Sequence; identical to SEQ ID NO: 130717
  derived and/or modified CDS sequence (opt3) from hemagglutinin__InfluenzaA__ADD97431

SEQ ID NO: 132427 - RNA, 1701 nt, Artificial Sequence
  derived and/or modified CDS sequence (opt3) from hemagglutinin__InfluenzaA__ADD97441
augaaggccauccuggugguccuccuuuacaccuucgcuacagcaaacgccgacacucugugcauuggcuaucacgcgaauaacagcacggauaccguugacacaauauuggagaaaaaugugacuguaacccauuccgugaacuuacuggaagauaagcacaaugggaaacuauguaagcucagaggagucgcuccccugcaucuugguaaaugcaacaucgccggcuggauucuggggaauccugagugugaaucuuugucaacagcaaguagcugguccuacaucguggagaccucuucgucagacaacggaacuugcuauccaggcgauuuuauugacuacgaggagcucagggagcagcugagcaguguuuccucuuucgaacgguuugagaucuucccgaagacaagcuccuggcccaaucacgauucaaacaagggugugaccgccgcuuguccucaugcaggggccaaaaguuuuuauaagaaucugauauggcucgucaaaaagggaaacagcuacccaaaauuaucuaaguccuauaucaaugacaagggcaaagaaauucuggugcuuuggggcauccaccaccccucaacgagcgcugaucaacagaguuuguaccagaacgccgacgcguacguauucguugggacuucucgcuauuccaagaaauuuaagccugagauugcaauccgaccaaaagugcgugaucaggagggaagaaugaauuacuauuggacccuggucgaacccggugacaagauaacauucgaggccacuggcaaccuaguggugccuagguacgcuuuugccauggaacggaacgcagggagcggaauuaucauuucggauaccccaguccaugacugcaauacaaccugucaaacgccgaaaggcgcuaucaacacuucucuccccuuccagaauauccacccuauuacaauagguaagugcccaaaguauguuaaauccaccaagcugcgccuugccacugggcugagaaacgugcccucaauccagaguaggggauuguuuggcgcgauugccggcuucaucgaagggggauggacagguaugguagacggcugguacggguaucaucaccagaaugaacaaggaagcggcuacgcagcugaucucaaauccacccagaacgccauagacgagauuacgaauaaggugaacucugucaucgagaaaaugaauacccaguuuacagcuguggguaaggaguucaaccaccuggaaaagcggaucgaaaauuuaaacaaaaagguugaugacggguuccuggauauuuggacuuacaaugccgagcuccuugugcuguuggaaaacgagcgcacccuagacuaucaugauagcaaugucaaaaaccuguacgagaaggugcgaucacagcucaaaaacaaugcaaaggaaaucggcaacggauguuuugaguucuaucacaagugcgacaauacauguauggaaaguguaaagaacggcacuuacgauuauccuaaguacuccgaggaagccaaacugaauagagaggagauugacgggguuaaacuugaaagcaccaggauauaucaaauccuggcuauuuacucuacaguggcgucaaguuugguccucguggucagccugggagcaaucuccuuuuggaugugcucuaacgguucguuacagugccggaucuguauuuga

SEQ ID NO: 132428 - RNA, 1701 nt, Artificial Sequence; identical to SEQ ID NO: 132421
  derived and/or modified CDS sequence (opt3) from hemagglutinin__InfluenzaA__ADD97451

SEQ ID NO: 132429 - RNA, 1701 nt, Artificial Sequence; identical to SEQ ID NO: 132421
  derived and/or modified CDS sequence (opt3) from hemagglutinin__InfluenzaA__ADD97461

SEQ ID NO: 132430 - RNA, 1701 nt, Artificial Sequence; identical to SEQ ID NO: 132269
  derived and/or modified CDS sequence (opt3) from hemagglutinin__InfluenzaA__ADD97471

SEQ ID NO: 132431 - RNA, 1701 nt, Artificial Sequence; identical to SEQ ID NO: 132269
  derived and/or modified CDS sequence (opt3) from hemagglutinin__InfluenzaA__ADD97481

SEQ ID NO: 132432 - RNA, 1701 nt, Artificial Sequence
  derived and/or modified CDS sequence (opt3) from hemagglutinin__InfluenzaA__ADD97491
augaaggccauccuggugguccuccuuuacaccuucgcuacagcaaacgccgacacucugugcauuggcuaucacgcgaauaacagcacggauaccguugacacaguguuggagaaaaauguaacugugacccauuccgucaacuuacuggaagauaagcacaaugggaaacuauguaagcucagaggagaggcuccccugcaucuugguaaaugcaacauagccggcuggauccuggggaauccugaaugugagucuuugucaacagcaaguagcugguccuacauuguggaaaccucuucgucagacaacggaacuugcuauccaggcgauuuuaucaauuacgaggagcucagggaacagcugagcaguguuuccucuuucgagcgguuugaaauuuucccgaagacaagcuccuggcccaaccacgacucaaauaagggugugaccgccgcuuguccucaugcaggggccaaaaguuuuuauaagaaccugaucuggcucgucaaaaagggaaauagcuacccaaaauuaucuaaguccuauauaaacgauaagggcaaagaggugcugguacuuuggggcauccaccaccccucaacgagcgcugaccaacagaguuuguaccagaaugccgaugcguacguuuucguggggacuucucgcuauuccaagaaauuuaagccugagauugcaauccgaccaaaaguccgugaccaggaaggaagaaugaacuacuauuggacccugguggagcccggugauaagauuacauucgaagccacuggcaaccuaguggucccuagguacgcuuuugccauggagcggaaugcagggagcggaaucauaauuucggacaccccaguucaugauugcaacacaaccugucaaacgccgaaaggcgcuaucaauacuucucuccccuuccagaacauucacccuaucacaaucgguaagugcccaaaguaugugaaauccaccaagcugcgccuugccacugggcugagaaauguacccucaauucagaguaggggauuguuuggcgcgauagccggcuucaucgaagggggauggacagguaugguggacggcugguacggguaucaucaccagaacgagcaaggaagcggcuacgcagcugaccucaaauccacccagaaugccauugauaagaucacgaacaaagucaauucugugauagagaagaugaacacccaguuuacagcuguugguaaggaguucaaucaccuggaaaaacggauugaaaacuuaaauaagaaaguggacgauggguuccuggacaucuggacuuacaacgccgagcuccuuguccuguuggaaaaugagcgcacccuagauuaucaugacagcaacgugaagaaccuguacgagaaaguacgaucacagcucaagaauaacgcaaaggaaaucggcaauggauguuuugaguucuaucacaaaugcgauaacacauguauggaaaguguuaagaauggcacuuacgacuauccuaaauacuccgaggaagccaagcugaacagagaggagauugauggggugaaacuugaaagcaccaggaucuaucaaauucuggcuauauacucuacagucgcgucaaguuuggugcucgucgugagccugggagcaaucuccuuuuggaugugcucuaaugguucguuacagugccggauuuguaucuga

SEQ ID NO: 132433 - RNA, 1701 nt, Artificial Sequence; identical to SEQ ID NO: 132432
  derived and/or modified CDS sequence (opt3) from hemagglutinin__InfluenzaA__ADD97501

SEQ ID NO: 132434 - RNA, 1701 nt, Artificial Sequence; identical to SEQ ID NO: 131070
  derived and/or modified CDS sequence (opt3) from hemagglutinin__InfluenzaA__ADD97511

SEQ ID NO: 132435 - RNA, 1701 nt, Artificial Sequence
  derived and/or modified CDS sequence (opt3) from hemagglutinin__InfluenzaA__ADD97531
augaaggccauccuggugguccuccuuuacaccuucgcuacagcaaacgccgacacucugugcauuggcuaucacgcgaauaacagcacggauaccguugacacaauauuggagaaaaaugugacuguaacccauuccgugaacuuacuggaagauaagcacaaugggaaacuauguaagcucagaggagucgcuccccugcaucuugguaaaugcaacaucgccggcuggauucuggggaauccugagugugaaucuuugucaacagcaaguagcugguccuacaucguggagaccucuucgucagacaacggaacuugcuauccaggcgauuuuauugacuacgaggagcucagggagcagcugagcaguguuuccucuuucgaacgguuugagaucuucccgaagacaagcuccuggcccaaucacgauucaaacaagggugugaccgccgcuuguccucaugcaggggccaaaaguuuuuauaagaaucugauauggcucgucaaaaagggaaacagcuacccaaaauuaucuaaguccuauaucaaugacaagggcaaagaaauucuggugcuuuggggcauccaccaccccucaacgauugcugaucaacagagcuuguaccagaacgccgacgcguacguauucguugggaccagucgcuauucuaagaaauuuaagccugagaucgcaauacgaccaaaagugcgugaucaggagggaagaaugaaguacuauuggacucuggucgaacccggugacaaaauuacauucgaggccacuggcaaucuaguggugccuagguacgcuuuugccauggaacggaacgcaggguccggaaucauuaucagcgauaccccaguccauaacugcaauacaaccugucaaacgccgaagggcgcuaucaacacuucgcuccccuuccagaauauucacccuauaacaaucgguaagugcccaaaauauguuaagucuaccaaacugcgccuugccacugggcugagaaacgugcccuccauucagucaaggggauuguuuggcgcgaucgccggcuucauagaagggggauggacagguaugguagacggcugguacggguaucaucaccagaaugaacaaggaaguggcuacgcagcugaccucaagagcacccagaacgccauugaugagaucacgaauaaagugaacuccgucaucgagaagaugaauacccaguuuacagcuguggguaaggaguucaaccaccuggaaaaacggauugaaaauuuaaacaagaaaguugacgauggguuccuggacaucuggacuuacaaugccgagcuccuugugcuguuggaaaacgagcgcacccuagauuaucaugacucuaaugucaagaaccuguacgagaaagugcgaagccagcucaagaacaaugcaaaggaaauuggcaacggauguuuugaguucuaucacaaaugcgauaauacauguauggaaucaguaaagaacggcacuuacgacuauccuaaauacagugaggaagccaagcugaauagagaggagauagaugggguuaaacuugaauccaccaggaucuaucaaauucuggcuaucuacagcacaguggcgucuucauugguccucguggucagucugggagcaaucagcuuuuggaugugcuccaacgguucuuuacagugccggauuuguauauga

SEQ ID NO: 132436 - RNA, 1701 nt, Artificial Sequence
  derived and/or modified CDS sequence (opt3) from hemagglutinin__InfluenzaA__ADD97541
augaaggccauccuggugguccuccuuuacaccuucgcuacagcaaacgccgacacucugugcauuggcuaucacgcgaauaacagcacggauaccguugacacaguguuggagaagaauguaacugugacccauuccgucaacuuacuggaagauaagcacaaugggaaacuauguaagcucagaggaguggcuccccugcaucuugguaaaugcaacauagccggcuggauccuggggaauccugagugugaaucuuugucaacagcaaguagcugguccuacauuguugagaccucuucgucagacaacggaacuugcuauccaggcgauuuuaucgacuacgaggagcucagggagcagcugagcaguguguccucuuucgaacgguuugagauuuucccgaagacaagcuccuggcccaaucacgauucaaacaagggugucaccgccgcuuguccucauacgggggcaaaaaguuuuuauaagaaucugaucuggcucgugaaaaagggaaacagcuacccaaaauuaucuaaguccuauauaaaugacaagggcaaagaaguacugguucuuuggggcauccaccaccccucaacuagcaccgaucaacagaguuuguaccagaacgccgacgcucauguguucgucgggacaucucgcuacuccaagaaauuuaagccugagauugccauccgaccaaaagugcgugaucaggagggaagaaugaauuauuacuggacucugguggaacccggugacaagauuaccuucgaggcgacaggcaaccuagucguuccuagguaugcauuugccauggaacggaacgcugggagcggaaucauaauuucggauaccccagugcacgacugcaauacgacuugucaaacaccgaaaggcgccaucaacaccucucuccccuuccagaauauucauccuaucacuaucgguaagugcccaaaguacguaaaauccacaaagcugcgccuugcaaccgggcugagaaacauucccucaauacagaguaggggauuguuuggcgcuaucgccggcuucauugaagggggauggacggguaugguggacggcugguauggguaccaccaccagaaugaacaaggaagcggcuaugcggccgaucucaaauccacccagaacgcaaucgacgagauaacaaauaaggucaacucugugauugagaaaaugaauacucaguuuaccgcuguugguaaggaguucaaccaucuggaaaagcggaucgaaaauuuaaacaaaaagguggaugacggguuccuggauaucuggacauacaaugccgagcuccuuguccuguuggaaaacgagcgcacucuagacuaccacgauagcaaugugaaaaaccuguaugagaagguacgaucacagcucaaaaacaaugcuaaggaaauuggcaacggauguuuugaguucuaccauaagugcgacaauaccuguauggaaaguguuaaaaacggcacauaugauuacccuaaguauuccgaggaagccaaacugaauagagaggagaucgacggggugaaacuugaaagcaccaggauuuaccaaauacuggcaaucuauucuacugucgccucaaguuuggugcucgucgugagccugggagcuauuuccuuuuggaugugcucuaacgguucguuacagugccggaucuguaucuga

SEQ ID NO: 132437 - RNA, 1701 nt, Artificial Sequence; identical to SEQ ID NO: 132269
  derived and/or modified CDS sequence (opt3) from hemagglutinin__InfluenzaA__ADD97551

SEQ ID NO: 132438 - RNA, 1701 nt, Artificial Sequence; identical to SEQ ID NO: 131881
  derived and/or modified CDS sequence (opt3) from hemagglutinin__InfluenzaA__ADD97561

SEQ ID NO: 132439 - RNA, 1701 nt, Artificial Sequence
  derived and/or modified CDS sequence (opt3) from hemagglutinin__InfluenzaA__ADD97571
augaaggccauccuggugguccuccuuuacaccuucgcuacagcaaacgccgacacucugugcauuggcuaucacgcgaauaacagcacggauaccguugacacaguguuggagaaaaauguaacugugacccauuccgucaacuuacuggaagauaagcacaaugggaaacuauguaagcucagaggaguggcuccccugcaucuugguaaaugcaacauagccggcuggauccuggggaauccugagugugaaucuuugucaacagcaaguagcugguccuacauuguugagaccucuucgucagacaacggaacuugcuauccaggcgauuuuaucaauuacgaggagcucagggagcagcugagcagugugucccuguucgaacgguuugagauuuucccgaagacaucuagcuggcccaaccacgacuccaauaagggugucaccgccgcuuguccucaugcaggggccaaaucauuuuauaagaaccucaucugguuagugaaaaagggaaauaguuacccaaaacugagcaagucuuauauaaacgauaagggcaaagaaguacuuguuuuguggggcauccaccaccccuccacgucagcugaccaacagagccuguaccagaaugccgaugcguacguguucgucgggacuucccgcuauucuaagaaauuuaagccugagauugcaauccgaccaaaagugcgugaccaggagggaagaaugaacuacuauuggacccuaguggaacccggugauaagauuacauucgaggccacuggcaaccucgucguuccuagguacgcuuuugccauggaacggaaugcaggguccggaaucauaauuagcgacaccccagugcaugauugcaacacaaccugucaaacgccgaaaggcgcuaucaauacuucgcugcccuuccagaacauucacccuaucacaaucgguaagugcccaaaguauguaaaaucuaccaagcugcgccuugccacuggguugagaaaugugcccuccauucagucaaggggacucuuuggcgcgauagccggcuucaucgaagggggauggacagguauggucgacggcugguacggguaucaucaccagaacgaacaaggaaguggcuacgcagcugaccugaaaagcacccagaaugccauugauaagaucacgaacaaagugaauaguguuauagagaagaugaacacccaguuuacagcuguggguaaggaguucaaucacuuagaaaaacggauugagaaccugaauaagaaagucgacgauggguuccucgacaucuggacuuacaacgccgaacuucugguguugcuagagaaugaacgcacccuggauuaucaugacucuaacguaaagaaccucuacgagaaaguucgaagccagcugaagaauaacgcaaaggagaucggcaauggauguuuugaguucuaucacaaaugcgauaacacauguauggaaucagugaagaauggcacuuacgacuauccuaaauacagugaagaggccaaacuuaacagagaagagauugauggggucaagcuggaguccaccaggaucuaucaaauuuuggcuauauacagcacaguggcgucuucacucguccuggugguuaguuuaggagcaaucagcuuuuggaugugcuccaaugguucucugcagugccggauuuguaucuga

SEQ ID NO: 132440 - RNA, 1701 nt, Artificial Sequence; identical to SEQ ID NO: 130717
  derived and/or modified CDS sequence (opt3) from hemagglutinin__InfluenzaA__ADD97581

SEQ ID NO: 132441 - RNA, 1701 nt, Artificial Sequence; identical to SEQ ID NO: 130717
  derived and/or modified CDS sequence (opt3) from hemagglutinin__InfluenzaA__ADD97591

SEQ ID NO: 132442 - RNA, 1701 nt, Artificial Sequence; identical to SEQ ID NO: 130717
  derived and/or modified CDS sequence (opt3) from hemagglutinin__InfluenzaA__ADD97688

SEQ ID NO: 132443 - RNA, 1701 nt, Artificial Sequence; identical to SEQ ID NO: 132269
  derived and/or modified CDS sequence (opt3) from hemagglutinin__InfluenzaA__ADD97698

SEQ ID NO: 132444 - RNA, 1701 nt, Artificial Sequence; identical to SEQ ID NO: 132269
  derived and/or modified CDS sequence (opt3) from hemagglutinin__InfluenzaA__ADD97888

SEQ ID NO: 132445 - RNA, 1701 nt, Artificial Sequence
  derived and/or modified CDS sequence (opt3) from hemagglutinin__InfluenzaA__ADD97898
augaaggccauccuggugguccuccuuuacaccuucgcuacagcaaacgccgacacucugugcauuggcuaucacgcgaauaacagcacggauaccguugacacaguguuggagaagaauguaacugugacccauuccgucaacuuacuggaagauaagcacaaugggaaacuauguaagcucagaggaguggcuccccugcaucuugguaaaugcaacauagccggcuggauccuggggaauccugagugugaaucuuugucaacagcaaguagcugguccuacauuguugagaccucuucgucagacaacggaacuugcuauccaggcgauuuuaucgacuacgaggagcucagggagcagcugagcaguguguccucuuucgaacgguuugagauuuucccgaagacaagcuccuggcccaaucacgauucaaacaagggugucaccgccgcuuguccucaugcaggggccaaaaguuuuuauaagaaucugaucuggcucgugaaaaagggaaacagcuacccaaaauuaucuaaguccuauauaaaugacaagggcaaagaaguacugguucuuuggggcauccaccaccccucaacgagcacugaucaacagaguuuguaccagaacgcugacgccuacguguucgucgggaccucucgcuauuccaagaaauuuaagccugagauugcgauccgaccaaaagugcgugaucaggagggaagaaugaauuacuauuggacacugguggaacccggugacaagauuacuuucgaggcaaccggcaaccuagucguuccuagguacgccuuugcuauggaacggaacgccgggagcggaaucauaauuucggauacaccagugcaugacugcaauaccacgugucaaacuccgaaaggcgcaaucaacacaucucuccccuuccagaauauucacccuaucaccaucgguaagugcccaaaguauguaaaauccacuaagcugcgccuugcuacagggcugagaaacauucccucaauacagaguaggggauuguuuggcgccaucgcgggcuucauugaagggggauggaccgguaugguggacggcugguacggguaucaucaccagaaugaacaaggaagcggcuacgccgcagaucucaaauccacgcagaacgcuaucgacgagauaaccaauaaggucaacucugugauugagaaaaugaauacacaguuuacugccguugguaaggaguucaaccaccuggaaaagcggaucgaaaauuuaaacaaaaagguggaugacggguuccuggauaucuggaccuacaaugcugagcuccuuguccuguuggaaaacgagcgcacacuagacuaucaugauagcaaugugaaaaaccuguacgagaagguacgaucacagcucaaaaacaaugccaaggaaauuggcaacggauguuuugaguucuaucacaagugcgacaauacuuguauggaaaguguuaaaaacggcaccuacgauuauccuaaguacuccgaggaagcaaaacugaauagagaggagaucgacggggugaaacuugaaagcacaaggauuuaucaaauacuggccaucuacucuaccgucgcuucaaguuuggugcucgucgugagccugggagcgauuuccuuuuggaugugcucuaacgguucguuacagugccggaucuguaucuga

SEQ ID NO: 132446 - RNA, 1701 nt, Artificial Sequence; identical to SEQ ID NO: 131070
  derived and/or modified CDS sequence (opt3) from hemagglutinin__InfluenzaA__ADD97908

SEQ ID NO: 132447 - RNA, 1701 nt, Artificial Sequence; identical to SEQ ID NO: 131881
  derived and/or modified CDS sequence (opt3) from hemagglutinin__InfluenzaA__ADD97918

SEQ ID NO: 132448 - RNA, 1701 nt, Artificial Sequence
  derived and/or modified CDS sequence (opt3) from hemagglutinin__InfluenzaA__ADD97928
augaaggccauccuggugguccuccuuuacaccuucgcuacagcaaacgccgacacucugugcauuggcuaucacgcgaauaacagcacggauaccguugacacaguguuggagaaaaauguaacugugacccauuccgucaacuuacuggaagauaagcacaaugggaaacuauguaagcucagaggaguggcuccccugcaucuugguaaaugcaacauagccggcuggauccuggggaauccugagugugaaucuuugucaacagcaaguagcugguccuacauuguugagaccucuucgucaggaaacggcacuugcuauccaggugacuuuaucgauuacgaagaacucagggagcagcugagcaguguguccucuuucgaacgguuugagauuuucccgaagacaagcuccuggcccaaucacgacucaaacaagggggucaccgccgcuuguccucaugcaggagccaaaaguuuuuauaagaaucugaucuggcucgugaaaaagggcaacagcuacccaaaauuaucuaaguccuauauaaaugauaagggcaaagaaguacugguucuuugggggauccaccaccccucaacgagcgcugaccaacagaguuuguaccagaacgccgaugcguacguguucgucggaacuucucgcuauuccaagaaauuuaagccugagauugcaauccgaccaaaagugcgugaccaggaggguagaaugaauuacuauuggacccugguggaacccggcgauaagauuacauucgaggccacugggaaccuagucguuccuagguacgcuuuugccauggaacggaacgcaggaagcggcaucauaauuucggacaccccagugcaugauugcaauacaaccugucaaacgccgaaaggugcuaucaacacuucucuccccuuccagaauauucacccuaucacaaucgggaagugcccaaaguauguaaaauccaccaagcugcgccuugccacuggacugagaaacgugcccucaauucagaguaggggcuuguuuggcgcgauagccggguucaucgagggagguuggacaggcauggucgacgggugguacggauaucaucaccagaaugaacaaggcagcgguuacgcagcugaccucaaauccacccagaacgccauugaugggaucacgaauaaggugaacucuguuauagagaaaaugaauacccaguuuacagcugugggcaaggaguucaaccaccuggaaaagcggauugagaauuuaaacaaaaaggucgacgauggauuccuggacaucuggacuuacaaugccgaacuccuugugcuguuggagaacgaacgcacccuagauuaucaugacagcaauguaaagaaccuguacgagaagguucgaucacagcucaaaaacaaugcaaaggagaucggcaacggguguuuugaguuccaccauaagugcgauaauacauguauggagagugugaaaaacggaacuuaugacuacccuaaguauuccgaagaggccaaacugaauagagaagagauugauggugucaaacuugagagcaccaggaucuaccaaauucuggcuauauauucuacaguggcgucaaguuugguccucgugguuagccugggcgcaaucuccuuuuggaugugcucuaacgggucguuacagugccggauuuguaucuga

SEQ ID NO: 132449 - RNA, 1701 nt, Artificial Sequence
  derived and/or modified CDS sequence (opt3) from hemagglutinin__InfluenzaA__ADD97938
augaaggccauccuggugguccuccuuuacaccuucgcuacagcaaacgccgacacucugugcauuggcuaucacgcgaauaacagcacggauaccguugacacaauauuggagaaaaaugugacuguaacccauuccgugaacuuacuggaagauaagcacaaugggaaacuauguaagcucagaggagucgcuccccugcaucuugguaaaugcaacaucgccggcuggauucuggggaauccugagugugaaucuuugucaacagcaaguagcugguccuacaucguggagaccucuucgucagacaacggaacuugcuauccaggcgauuuuauugacuacgaggagcucagggagcagcugagcaguguuuccucuuucgaacgguuugagaucuucccgaugacaagcuccuggcccaaucacgauucaaacaagggugugaccgccgcuuguccucaugcaggggccaagaguuuuuauaaaaaucugauauggcucgucaagaaaggaaacagcuacccaaaguuaucuaaauccuauaucaaugacaagggcaaggaaauucuggugcuuuggggcauccaccaccccucaacgagcgcugaucaacagaguuuguaccagaacgccgacgcguacguauucguugggacuucucgcuauuccaaaaaguuuaaaccugagauugcaauccgaccaaaggugcgugaucaggagggaagaaugaauuacuauuggacccuggucgaacccggugacaaaauaacauucgaggccacuggcaaccuaguggugccuagguacgcuuuugccauggaacggaacgcagggagcggaauuaucauuucggauaccccaguccaugacugcaauacaaccugucaaacgccgaagggcgcuaucaacacuucucuccccuuccagaauauccacccuauuacaauagguaaaugcccaaaguauguuaaguccaccaaacugcgccuugccacugggcugagaaacgugcccucaauccagaguaggggauuguuuggcgcgauugccggcuucaucgaagggggauggacagguaugguagacggcugguacggguaucaucaccagaaugaacaaggaagcggcuacgcagcugaucucaaguccacccagaacgccauagacgagauuacgaauaaagugaacucugucaucgagaagaugaauacccaguuuacagcuguggguaaagaguucaaccaccuggaaaagcggaucgaaaauuuaaacaagaaaguugaugacggguuccuggauauuuggacuuacaaugccgagcuccuugugcuguuggaaaacgagcgcacccuagacuaucaugauagcaaugucaagaaccuguacgagaaagugcgaucacagcucaagaacaaugcaaaagaaaucggcaacggauguuuugaguucuaucacaagugcgacaauacauguauggaaaguguaaagaacggcacuuacgauuauccuaaauacuccgaggaagccaagcugaauagagaggagauugacgggguuaaacuugaaagcaccaggauauaucaaauccuggcuauuuacucuacaguggcgucaaguuugguccucguggucagccugggagcaaucuccuuuuggaugugcucuaacgguucguuacagugccggaucuguauuuga

SEQ ID NO: 132450 - RNA, 1701 nt, Artificial Sequence
  derived and/or modified CDS sequence (opt3) from hemagglutinin__InfluenzaA__ADD97948
augaaggccauccugcucgugcuucuguacaccuucgcuacagcaaacgccgacacuuugugcauuggcuaucacgcgaauaacagcacggauaccgucgacacaguuuuagagaaaaaugugacuguaacccauuccgugaaccugcuagaagauaagcacaaugggaaacucuguaagcugagaggagucgcuccccuucaucuggguaaaugcaacauagccggcuggaucuuggggaauccugagugugaaucucucucaacagcaaguagcugguccuacauuguggagaccucuucgucagacaacggaacuugcuauccaggcgauuuuaucgacuacgaggagcugagggagcagcugagcaguguuuccucuuucgaacgguuugagauguucccgaagacaagcuccuggcccaaucacgauucaaacaagggugugaccgccgcuuguccucaugcaggggccaaaaguuuuuauaagaaucucauuugguuagucaaaaagggaaacagcuacccaaaacugucuaaguccuauaucaaugacaagggcaaagaagugcuuguauuguggggcauacaccaccccucaacgagcgcugaucaacagagucuguaccagaacgccgacgcguacguuuucguggggacuucucgcuauuccaagaaauuuaagccugagaucgcaauucgaccaaaaguccgugaucaggagggaagaaugaauuacuauuggacccuaguggaacccggugacaagaucacauucgaggccacuggcaaccucguggucccuagguacgcuuuugccauggaacggaacgcagggagcggaauuaucauaucggauaccccaguucaugacugcaauacaaccugucaaacgccgaaaggcgcuauuaacacuucucugcccuuccagaauauccacccuauuacaaucgguaagugcccaaaguaugugaaauccaccaaacuucgccuggccacuggguugagaaacguacccucaauccagaguaggggacucuuuggcgcgauugccggcuucauagaagggggauggacagguaugguggacggcugguacggguaucaucaccagaaugaacaaggaagcggcuacgcagcugaucugaaguccacccagaacgccaucgacgagauuacgaauaaggucaacucugugaucgagaaaaugaauacccaguuuacagcuguugguaaggaguucaaccacuuagaaaagcggauagaaaaucugaacaaaaagguggaugacggguuccucgauauuuggacuuacaaugccgagcuucuggucuugcuagaaaacgagcgcacccuggacuaucaugauagcaaugugaaaaaccucuacgagaagguacgaucacagcugaaaaacaaugcaaaggaaaucggcaacggauguuuugaguucuaucacaagugcgacaauacauguauggaaaguguuaaaaacggcacuuacgauuauccuaaguacuccgaggaagccaaacuuaauagagaggagaucgacggggugaagcuggaaagcaccaggauuuaucaaaucuuggcuauuuacucuacagucgcgucaagucucgugcuggucgugagcuuaggagcaauauccuuuuggaugugcucuaacgguucgcugcagugccggaucuguauuuga

SEQ ID NO: 132451 - RNA, 1701 nt, Artificial Sequence
  derived and/or modified CDS sequence (opt3) from hemagglutinin__InfluenzaA__ADD97958
augaaggccauccuggugguccuccuuuacaccuucgcuacagcaaacgccgacacucugugcauuggcuaucacgcgaauaacagcacggauaccguugacacaguguuggagaaaaauguaacugugacccauuccgucaacuuacuggaagauaagcacaaugggaaacuauguaagcucagaggaguggcuccccugcaucuugguaaaugcaacauagccggcuggauccuggggaauccugagugugaaucuuugucaacagcaaguagcugguccuacauuguugagaccucuucgucagacaacggaacuugcuauccaggcgauuuuaucgacuacgaggagcucagggagcagcugagcaguguguccucuuucgaacgguuugagauuuucccgaagacaagcuccuggcccaaucacgauucaaacaagggugucaccgccgcuuguccucaugcaggggccaaaaguuuuuauaagaaucugaucuggcucgugaaaaagggaaacagcuacccaaaauuaucuaaguccuauauaaaugacaagggcaaagaaguacugguucuuuggggcauccaccaccccucaacgagcgcugaucaacagaguuuguaccagaacgccgacgcguacguguucgucgggacuucucgcuauuccaagaaauuucagccugagauugcaauccgaccaaaggugcgugaucaagagggaagaaugaauuacuauuggacccugcuagaacccggugacaaaauuacauucgaggccacuggcaaccucguggucccuagguacgcuuuugccauggaacggaacgcagggagcggaaucauaauuucggauaccccaguucaugacugcaauacaaccugucagacgccgaagggcgcuaucaacacuucucugcccuuccagaauauucacccuaucacaaucgguaaaugcccaaaguaugugaaguccaccaaacuucgccuggccacuggguugagaaacguacccucaauucagaguaggggacucuuuggcgcgauagccggcuucaucgaagggggauggacagguaugguggacggcugguacggguaucaucaccaaaaugaacagggaagcggcuacgcagcugaucugaaguccacccagaacgccauugacgagaucacgaauaaagucaacucugugauagagaagaugaauacccaguuuacagcuguugguaaagaguucaaccacuuagaaaagcggauugaaaaucugaacaagaaaguggaugacggguuccucgauaucuggacuuacaaugccgagcuucuggucuugcuagaaaacgagcgcacccuggacuaucaugauagcaaugugaagaaccucuacgagaaaguacgaucacaacugaagaacaaugcaaaagaaaucggcaacggauguuuugaguucuaucacaagugcgacaauacauguauggaaaguguuaagaacggcacuuacgauuauccuaaauacuccgaggaagccaaacuuaauagagaggagauugacggggugaagcuggaaagcaccaggaucuaucagauuuuggcuauauacucuacagucgcgucaagucucgugcuggucgugagcuuaggagcaaucuccuuuuggaugugcucuaacgguucgcugcagugccggauuuguaucuga

SEQ ID NO: 132452 - RNA, 1701 nt, Artificial Sequence; identical to SEQ ID NO: 130717
  derived and/or modified CDS sequence (opt3) from hemagglutinin__InfluenzaA__ADD97968

SEQ ID NO: 132453 - RNA, 1701 nt, Artificial Sequence; identical to SEQ ID NO: 132445
  derived and/or modified CDS sequence (opt3) from hemagglutinin__InfluenzaA__ADD97978

SEQ ID NO: 132454 - RNA, 1701 nt, Artificial Sequence; identical to SEQ ID NO: 132399
  derived and/or modified CDS sequence (opt3) from hemagglutinin__InfluenzaA__ADD97988

SEQ ID NO: 132455 - RNA, 1701 nt, Artificial Sequence
  derived and/or modified CDS sequence (opt3) from hemagglutinin__InfluenzaA__ADD97998
augaaggccauccuggugguccuccuuuacaccuucgcuacagcaaacgccgacacucugugcauuggcuaucacgcgaauaacagcacggauaccguugacacaguguuggagaaaaauguaacugugacccauuccgucaacuuacuggaagauaagcacaaugggaaacuauguaagcucagaggaguggcuccccugcaucuugguaaaugcaacauagccggcuggauccuggggaauccugagugugaaucuuugucaacagcaaguagcugguccuacauuguugagaccucuucgucagacaacggaacuugcuauccaggcgauuuuaucgacuacgaagaacucagggagcagcugagcaguguguccucuuucgaacgguuugagauuuucccgaaggccagcuccuggcccaaucacgauucaaacaagggugucacagcugcauguccucaugccggggcuaaaaguuuuuauaagaaucugaucuggcucgugaaaaagggaaacagcuacccaaaauuaucuaaguccuauauaaaugacaagggcaaagaaguacugguucuuuggggcauccaccaccccucaaccagcgccgaucaacagaguuuguaccagaacgcggacgcauacguguucgucgggacgucucgcuauuccaagaaauuuaagccugagauugccauccgaccaaaagugcgugaucaggagggaagaaugaauuacuauuggacucugguggaacccggugacaagauuaccuucgaggcuacaggcaaccuagucguuccuagguacgccuuugaaauggagcggaacgcagggagcggaaucauaauuucggauacuccagugcaugacugcaauaccacaugucaaaccccgaaaggcgcuaucaacacgucucuccccuuccagaauauucacccuaucacuaucgguaagugcccaaaguauguaaaauccacaaagcugcgccuugccaccgggcugagaaacgugcccucaauucagaguaggggauuguuuggcgcgauagccggcuucaucgaagggggauggacugguauggucgacggcugguacggguaucaucaccagaaugagcaaggaagcggcuacgcagcugaucucaaauccacacagaacgccauugacgagaucaccaauaaggugaacucuguuauagaaaagaugaauacgcaguuuaccgcuguggguaaggaguucaaccaccuggaaaagcggauugagaauuuaaacaaaaaggucgaugacggguuccuggauaucuggacauacaaugccgaacuccuugugcuguuggagaacgagcgcacucuagacuaucaugauagcaauguuaaaaaccuguacgaaaagguacgaucacagcucaaaaacaaugcaaaggagaucggcaacggauguuuugaguucuaucacaagugcgacaauaccuguauggagagugugaaaaacggcacauacgauuauccuaaguacuccgaagaggccaaacugaauagagaggaaauugacggggucaaacuugagagcacuaggaucuaucaaauucuggcuauauacucuaccguggcgucaaguuugguccucgugguuagccugggagcaaucuccuuuuggaugugcucuaacgguucguuacagugccggauuuguaucuga

SEQ ID NO: 132456 - RNA, 1701 nt, Artificial Sequence; identical to SEQ ID NO: 132269
  derived and/or modified CDS sequence (opt3) from hemagglutinin__InfluenzaA__ADD98008

SEQ ID NO: 132457 - RNA, 1701 nt, Artificial Sequence
  derived and/or modified CDS sequence (opt3) from hemagglutinin__InfluenzaA__ADD98018
augaaggccauccuggugguccuccuuuacaccuucgcuacagcaaacgccgacacucugugcauuggcuaucacgcgaauaacagcacggauaccguugacacaguguuggagaaaaauguaacugugacccauuccgucaacuuacuggaagauaagcacaaugggaaacuauguaagcucagaggaguggcuccccugcaucuugguaaaugcaacauagccggcuggauccuggggaauccugagugugaaucuuugucaacagcaaguagcugguccuacauuguugagaccucuucgucagacaacggaacuugcuauccaggcgauuuuaucgacuacgaagaacucagggagcagcugagcaguguguccucuuucgaacgguuugagauuuucccgaagacaagcuccuggcccaaucacgauucaaacaagggugucaccgccgcuuguccucaugcaggggccaaaaguuuuuauaagaaucugaucuggcucgugaaaaagggaaacagcuacccaaaauuaucuaaguccuauauaaaugacaagggcaaagaaauccugguacuuuggggcauucaccaccccucaacgagcgcugaucaacagaguuuguaccagaacgccgacgcguacguuuucguggggacuucucgcuauuccaagaaauuuaagccugagaucgcaacccgaccaaaaguccgugagcaggaaggaagaaugaauuacuauuggacacugguggagcccggugauaagauuacuuucgaagccaccggcaaccuaguggucccuagguacgcuuuugccauggagcggaacgcagggagcggaaucauaauuucggacacaccaguucaugauugcaauaccacgugucaaacuccgaaaggcgcuaucaacacaucucuccccuuccagaauauucacuccaucaccaucgguaagugcccuaaguaugugaaaucaacuaagcugcgccuugccacagggcugagaaacguaccaaguauucagagcaggggauuguuuggcgcgauagccggcuucaucgaagggggauggaccgguaugguggacggcugguacggguaucaucaccagaaugagcaaggauccggcuacgcagcugaccucaaaucuacgcagaacgccauugaugagaucaccaauaaggucaacagcgugauagaaaagaugaauacacaguuuacugcuguugguaaggaguucaaccaccuggaaaagcggauugagaauuuaaacaaaaagguggacgauggguuccuggacaucuggaccuacaaugccgaacuccuuguccuguuggagaacgagcgcacacuagauuaucaugacucaaaugugaaaaaccuguacgaaaagguacgaagucagcucaaaaacaaugcaaaggagaucggcaacggauguuuugaguucuaucacaagugcgauaauacuuguauggaguccguuaaaaacggcaccuacgacuaucccaaguacagcgaagaggccaaacugaauagagaggaaauugauggggugaaacuugagucuacaaggaucuaucaaauucuggcuauauacucaaccgucgcgaguagcuuggugcucgucgugucccugggagcaaucucuuuuuggaugugcucgaacgguagcuuacagugccggauuuguaucuga

SEQ ID NO: 132458 - RNA, 1701 nt, Artificial Sequence; identical to SEQ ID NO: 132421
  derived and/or modified CDS sequence (opt3) from hemagglutinin__InfluenzaA__ADD98028

SEQ ID NO: 132459 - RNA, 1701 nt, Artificial Sequence
  derived and/or modified CDS sequence (opt3) from hemagglutinin__InfluenzaA__ADD98038
augaaggccauccuggugguccuccuuuacaccuucgcuacagcaaacgccgacacucugugcauuggcuaucacgcgaauaacagcacggauaccguugacacaguguuggagaaaaauguaacugugacccauuccgucaacuuacuggaagauaagcacaaugggaaacuauguaagcucagaggaguggcuccccugcaucuugguaaaugcaacauagccggcuggauccuggggaauccugagugugaaucuauuucaacagcaaguagcugguccuacaucguugagaccucuucgucagacaacggaacuugcuauccaggcgauuuuauugacuacgaagaguugagggagcagcucagcaguguguccucuuucgaacgguuugagaucuucccgaaggccagcuccuggcccaaucacgauucaaacaagggugucacagcugcauguccucaugccggggcuaaaaguuuuuauaagaaucugauauggcuggugaaaaagggaaacagcuacccaaaacucucuaaguccuauaucaaugacaagggcaaagaaguauuaguucuguggggcauucaccaccccucaaccagcgccgaucaacagagucuuuaccagaacgcggacgcauacguguucgucgggacgucucgcuauuccaagaaauuuaagccugagaucgccauucgaccaaaagugcgugaucaggagggaagaaugaauuacuauuggacuuugguggaacccggugacaagaucaccuucgaggcuacaggcaaccuggucguuccuagguacgccuuugaaauggagcggaacgcagggagcggaauaauuaucucggauacuccagugcaugacugcaauaccacaugucaaaccccgaaaggcgcuauuaacacgucucuacccuuccagaauauccacccuaucacuauugguaagugcccaaaguauguaaaauccacaaagcuccgccuggccaccgggcuuagaaacgugcccucaauacagaguaggggacuguuuggcgcgaucgccggcuucauugaagggggauggacugguauggucgacggcugguacggguaucaucaccagaaugagcaaggaagcggcuacgcagcugauuugaaauccacacagaacgccaucgacgagauaaccaauaaggugaacucuguuauugaaaagaugaauacgcaguuuaccgcuguggguaaagaguucaaccaccucgaaaagcggaucgagaaucugaacaaaaaggucgaugacggguucuuagauaucuggacauacaaugccgaacugcucgugcuucuggagaacgagcgcacuuuggacuaucaugauagcaauguuaaaaaccuauacgaaaagguacgaucacagcugaaaaacaaugcaaaggagauuggcaacggauguuuugaguucuaucacaagugcgacaauaccuguauggaaagugugaaaaacggcacauacgauuauccuaaguacuccgaagaggccaaacucaauagagaggaaaucgacggggucaagcuggagagcacuaggauuuaucaaauacuugcuaucuacucuaccguggcgucaagucuggucuuggugguuagccucggagcaauuuccuuuuggaugugcucuaacgguucgcugcagugccggaucuguaucuga

SEQ ID NO: 132460 - RNA, 1701 nt, Artificial Sequence; identical to SEQ ID NO: 132445
  derived and/or modified CDS sequence (opt3) from hemagglutinin__InfluenzaA__ADD98048

SEQ ID NO: 132461 - RNA, 1701 nt, Artificial Sequence; identical to SEQ ID NO: 130717
  derived and/or modified CDS sequence (opt3) from hemagglutinin__InfluenzaA__ADD98058

SEQ ID NO: 132462 - RNA, 1701 nt, Artificial Sequence; identical to SEQ ID NO: 130717
  derived and/or modified CDS sequence (opt3) from hemagglutinin__InfluenzaA__ADD98068

SEQ ID NO: 132463 - RNA, 1701 nt, Artificial Sequence; identical to SEQ ID NO: 130959
  derived and/or modified CDS sequence (opt3) from hemagglutinin__InfluenzaA__ADD98078

SEQ ID NO: 132464 - RNA, 1701 nt, Artificial Sequence
  derived and/or modified CDS sequence (opt3) from hemagglutinin__InfluenzaA__ADD98098
augaaggccauccuggugguccuccuuuacaccuucgcuacagcaaacgccgacacucugugcauuggcuaucacgcgaauaacagcacggauaccguugacacaauauuggagaaaaaugugacuguaacccauuccgugaacuuacuggaagauaagcacaaugggaaacuauguaagcucagaggagucgcuccccugcaucuugguaaaugcaacaucgccggcuggauucuggggaauccugagugugaaucuuugucaacagcaaguagcugguccuacaucguggagaccucuucgucagacaacggaacuugcuauccaggcgauuuuauugacuacgaggagcucagggagcagcugagcaguguuuccucuuucgaacgguuugagaucuucccgaagacaagcuccuggcccaaucacgauucaaacaagggugugaccgccgcuuguccucaugcaggggccaaaaguuuuuauaagaaucugauauggcucgucaaaaagggaaacagcuacccaaaauuaucuaaguccuauaucaaugacaagggcaaagaagugcugguacuuuggggcauucaccaccccucaacgagcagugaucaacagucuuuguaccagaacgcugacgccuacguuuucguggggacuucccgcuauagcaagaaauuuaagccugagaucgcgauucgaccaaaaguccgugaucaggagggaagaaugaauuacuauuggacccugguggaacccggugacaagaucacauucgaggcaacuggcaaccuaguggucccuagguacgccuuugcuguugaacggaacgccgggucgggaauaauuaucucugauaccccagugcaugacugcaauacaaccugucaaacgccgaaaggcgcaauuaacacuucccuccccuuccagaauauccacccuaucacaauugguaagugcccaaaguauguaaaaucaaccaagcugcgccuugcuacugggcugagaaacgugcccaguauacagagcaggggauuguuuggcgccaucgcgggcuucauugaagggggauggacagguauggucgacggcugguacggguaucaucaccagaaugaacaaggauccggcuacgccgcagaucucaaaucuacccagaacgcuaucgacgagauaacgaauaaggugaacagcguuauugagaaaaugaauacccaguuuacagccguggguaaggaguucaaccaccuggaaaagcggaucgaaaauuuaaacaaaaaggucgaugacggguuccuggauaucuggacuuacaaugcugagcuccuugugcuguuggaaaacgagcgcacccuagacuaucaugauucaaauguaaagaaccuguacgagaagguucgaagucagcucaaaaacaaugccaaggaaauuggcaacggauguuuugaguucuaucacaagugcgacaauacauguauggaauccgugaaaaacggcacuuacgauuauccuaaguacagcgaggaagcaaaacugaauagagaggagaucgacggggucaaacuugaaucuaccaggauuuaucaaauacuggccaucuacucaacaguggcuaguagcuugguccucgugguuucccugggagcgauuucuuuuuggaugugcucgaacgguagcuuacagugccggaucuguaucuga

SEQ ID NO: 132465 - RNA, 1701 nt, Artificial Sequence; identical to SEQ ID NO: 132432
  derived and/or modified CDS sequence (opt3) from hemagglutinin__InfluenzaA__ADD98118

SEQ ID NO: 132466 - RNA, 1701 nt, Artificial Sequence; identical to SEQ ID NO: 132432
  derived and/or modified CDS sequence (opt3) from hemagglutinin__InfluenzaA__ADD98128

SEQ ID NO: 132467 - RNA, 1701 nt, Artificial Sequence
  derived and/or modified CDS sequence (opt3) from hemagglutinin__InfluenzaA__ADD98138
augaaggccauccuggugguccuccuuuacaccuucgcuacagcaaacgccgacacucugugcauuggcuaucacgcgaauaacagcacggauaccguugacacaguguuggagaaaaauguaacugugacccauuccgucaacuuacuggaagauaagcacaaugggaaacuauguaagcucagaggaguggcuccccugcaucuugguaaaugcaacauagccggcuggauccuggggaauccugagugugaaucuuugucaacagcaaguagcugguccuacauuguugagaccucuucgucagacaacggaacuugcuauccaggcgauuuuaucaauuacgaggagcucagggagcagcugagcaguguguccucuuucgaacgguuugagauuuucccgaagacaagcuccuggcccaaccacgacucaaauaagggugucaccgccgcuuguccucaugcaggggccaaaaguuuuuauaagaaccugaucuggcucgugaaaaagggaaauagcuacccaaaauuaucuaaguccuauauaaacgauaagggcaaagaaguacugguucuuuggggcauccaccaccccucaacgagcacugaccaacagaguuuguaccagaaugcugaugccuacguguucgucgggaccucucgcuauuccaagaaauuuaagccugagauugcgauccgaccaaaagugcgugaccaggagggaagaaugaacuacuauuggacacugguggaacccggugauaagauuacuuucgaggcaaccggcaaccuagucguuccuagguacgccuuugcuauggaacggaauacagggagcggaaucauaauuucggacaccccagugcaugauugcaacacgacuugucaaacaccgaauggcgccaucaacaccucucuccccuuccagaauauucacccuaucacuaucgguaaaugcccaaaguauguaaaguccacaaaacugcgccuugcaaccgggcugagaaacgugcccucaauucagaguaggggauuguuuggcgcuauagccggcuucaucgaagggggauggacggguauggucgacggcugguacggguaucaucaccagaaugaacaaggaagcggcuacgcggccgaccucaaguccacccagaacgcaauugauaaaaucacaaauaaggugaacucuguuauagagaaaaugaauacucaguuuaccgcuguggguaaggaguucaaccaccuggaaaagcggauugagaauuuaaacaaaaaggucgacgauggguuccuggacaucuggacauacaaugccgaacuccuugugcuguuggagaacgaacgcacucuagauuaucaugacagcaacguaaagaaucuguacgagaagguucgaucacagcucaaaaacaaugcuaaggagaucggcaacggauguuuugaguucuaucacaagugcgauaauaccuguauggaaagugugaaaaacggcacauacgacuauccuaaguacuccgaagaggccaaacugaauagagaagagauugauggggucaaacuugagagcaccaggaucuaucaaauucuggcaauauacucuacuguggccucaaguuugguccucgugguuagccugggagcuaucuccuuuuggaugugcucuaacgguucguuacagugccggauuuguaucuga

SEQ ID NO: 132468 - RNA, 1701 nt, Artificial Sequence
  derived and/or modified CDS sequence (opt3) from hemagglutinin__InfluenzaA__ADD98148
augaaggccauccuggugguccuccuuuacaccuucgcuacagcaaacgccgacacucugugcauuggcuaucacgcgaauaacagcacggauaccguugacacaguguuggagaaaaauguaacugugacccauuccgucaacuuacuggaagauaagcacaaugggaaacuauguaagcucagaggaguggcuccccugcaucuugguaaaugcaacauagccggcuggauccuggggaauccugagugugaaucuuugucaacagcaaguagcugguccuacauuguugagaccucuucgucagacaacggaacuugcuauccaggcgauuuuaucgacuacgaggagcucagggagcagcugagcaguguguccucuuucgaacgguuugagauuuucccgaagacaagcuccuggcccaaucacgauucaaacaagggugucaccgccgcuuguccucaugcaggggccaaaaguuuuuauaagaaucugaucuggcucgugaaaaagggaaacagcuacccaaaauuaucuaaguccuauauaaaugacaagggcaaagaaguacugguucuuuggggcauccaccaccccucaacgagcgcugaucaacagaguuuguaccagaacgccgacgcguacguguucgucgggacuucucgcuauuccaagaaauuuaagccugagauugcaauccgaccaaaagugcgugaucaggagggaagaaugaauuacuauuggacccugguggaacccggugacaagauuacauucgaggccacuggcaaccuagucguuccuagguacgcuuuugccauggaacggaacgcagggagcggaaucuucauaucggauaccccagugcaugacugcaauacaaccugucaaacgccgaaaggcgcuauuaacacuucucuccccuuucagaauauccacccuauuacaaucgguaagugcccaaaguauguaaaauccaccaagcugcgccuugccacugggcugagaaacgugcccucaauccagaguaggggauuguucggcgcgauugccggcuuuauagaagggggauggacagguauggucgacggcugguacggguaucaucaccagaaugaacaaggaagcggcuacgcagcugaucucaaauccacccagaacgccaucgacaagauuacgaauaaagugaacucuguuaucgagaagaugaauacccaguucacagcuguggguaaggaguucaaccaccuggaaaaacggauagagaauuuaaacaagaaagucgaugacggguuucuggauauuuggacuuacaaugccgaacuccuugugcuguuggagaacgaacgcacccuagacuaucaugauagcaauguaaagaaccuguacgagaaaguucgaucacagcucaagaacaaugcaaaggagaucggcaacggauguuucgaauuuuaucacaaaugcgacaauacauguauggagagugugaagaacggcacuuacgauuauccuaaauacuccgaagaggccaagcugaauagagaagagaucgacggggucaaacuugagagcaccaggauuuaucaaauccuggcuauuuacucuacaguggcgucaaguuugguccucgugguuagccugggagcaauauccuucuggaugugcucuaacgguucguuacagugccggaucuguauuuga

SEQ ID NO: 132469 - RNA, 1701 nt, Artificial Sequence
  derived and/or modified CDS sequence (opt3) from hemagglutinin__InfluenzaA__ADD98158
augaaggccauccuggugguccuccuuuacaccuucgcuacagcaaacgccgacacucugugcauuggcuaucacgcgaauaacagcacggauaccguugacacaguguuggagaagaauguaacugugacccauuccgucaacuuacuggaagauaagcacaaugggaaacuaugugagcucagaggaguggcuccccugcaucuugguaagugcaacauagccggcuggauccuggggaauccugaaugugagucuuugucaacagcaaguagcugguccuacauuguugaaaccucuucgucagacaacggaacuugcuauccaggcgauuuuaucgacuacgaggagcucagggaacagcugagcaguguguccucuuucgagcgguuugaaauuuucccgaaaacaagcuccuggcccaaucacgauucaaacaagggugucaccgccgcuuguccucaugcaggggccaagaguuuuuauaaaaaucugaucuggcucgugaagaaaggaaacagcuacccaaaguuaucuaaauccuauauaaaugacaagggcaaggagguacugguucuuuggggcauccaccaccccucaacgagcgcugaucaacagaguuuguaccagaacgccgacgcguacguguucgucgggacuucucgcuauuccaaaaaguuuaaaccugagauugcaauccgaccaaaggugcgugaucaggaaggaagaaugaauuacuauuggacccugguggagcccggugacaaaauuacauucgaagccacuggcaaccuagucaucccuagguacgcuuuugccauggagcggaacgcagggagcggaauaauuaucucggauaccccaguucaugacugcaauacaaccugucaaacgccgaagggcgcuauuaacacuucucuccccuuccagaauauccacccuaucacaauugguaaaugcccaaaguaugugaaguccaccaaacugcgccuugccacugggcugagaaacguacccucaauacagaguaggggauuguuuggcgcgaucgccggcuucauugaagggggauggacagguaugguggacggcugguacggguaucaucaccagaaugagcaaggaagcggcuacgcagcugaucucaaguccacccagaacgccaucgacaaaauaacgaauaaggucaacucugugauugagaaaaugaauacccaguuuacagcuguugguaaggaguucaaccaccuggaaaagcggaucgaaaauuuaaacaaaaagguggaugacggguuccuggauaucuggacuuacaaugccgagcuccuuguccuguuggaaaacgagcgcacccuagacuaucaugauagcaaugugaaaaaccuguacgagaagguacgaucacagcucaaaaacaaugcaaaggaaauuggcaacggauguuuugaguucuaucacaagugcgacaauacauguauggaaaguguuaaaaacggcacuuacgauuauccuaaguacuccgaggaagccaaacugaauagagaggagaucgacggggugaaacuugaaagcaccaggauuuaucaaauacuggcuaucuacucuacagucgcgucaaguuuggugcucgucgugagccugggagcaauuuccuuuuggaugugcucuaacgguucguuacagugccggaucuguaucuga

SEQ ID NO: 132470 - RNA, 1701 nt, Artificial Sequence
  derived and/or modified CDS sequence (opt3) from hemagglutinin__InfluenzaA__ADD98168
augaaggccauccuggugguccuccuuuacaccuucgcuacagcaaacgccgacacucugugcauuggcuaucacgcgaauaacagcacggauaccguugacacaguguuggagaaaaauguaacugugacccauuccauaaacaucuuagaagauaagcacaaugggaaacuguguaagcuaagaggagucgcuccccuccaucuggguaaaugcaacauugccggcuggauccuugggaauccugagugugaaucucugucaacagcaaguagcugguccuacauuguggagaccucuucgucagacaacggaacuugcuauccaggcgauuuuaucgacuacgaagaguugagggagcagcucagcaguguuuccucuuucgaacgguuugagauauucccgaagacaagcuccuggcccaaucacgauucaaacaagggugugaccgccgcuuguccucaugcaggggccaaaaguuuuuauaagaaucugaucuggcuggucaaaaagggaaacagcuacccaaaacucucuaaguccuauauuaaugacaagggcaaagaaguguuaguacuguggggcauccaccaccccucaacgagcgcugaucaacagagucuuuaccagaacgccgacgcguacguuuucguggggacuucucgcuauuccaagaaauuuaagccugagauugcaauccgaccaaaaguccgugaucaggagggaagaaugaauuacuauuggaccuugguggaacccggugacaagauaacauucgaggccacuggcaaccugguggucccuaaauacgcuuuugccauggaaaggaacgcagggagcggaauuaucauuucggauaccccaguucaugacugcaauacaaccugucaaacgccgaagggcgcuaucaacacuucucuacccuuccagaauauccacccuauuacaauagguaagugcccaaaauaugugaaguccaccaaacuccggcuggccacugggcuucgcaacguacccucaauccagaguagaggacuguuuggcgcgauugccggcuucaucgaagggggauggacagguaugguggacggcugguacggguaucaucaccagaaugaacaaggaagcggcuacgcagcugauuugaaguccacccagaacgccauagacgagauuacgaauaaagucaacucugugaucgagaagaugaauacccaguuuacagcuguugguaaggaguucaaccaccucgagaaaaggaucgaaaaucugaacaagaaaguggaugacggguucuuagauauuuggacuuacaaugccgagcugcucguccuucuggaaaacgagcggaccuuggacuaucaugauagcaaugugaagaaccuauacgagaaaguacgcucacagcugaagaacaaugcaaaggaaaucggcaacggauguuuugaguucuaucacaaaugcgacaauacauguauggaaaguguuaagaacggcacuuacgauuauccuaaauacuccgaggaagccaagcucaaucgagaggagauugacggggugaaacuggaaagcaccagaauauaucaaauccuugcuauuuacucuacagucgcgucaagucugguguuggucgugagccucggagcaaucuccuuuuggaugugcucuaacgguucgcugcagugcaggaucuguauuuga

SEQ ID NO: 132471 - RNA, 1701 nt, Artificial Sequence; identical to SEQ ID NO: 131889
  derived and/or modified CDS sequence (opt3) from hemagglutinin__InfluenzaA__ADD98188

SEQ ID NO: 132472 - RNA, 1701 nt, Artificial Sequence
  derived and/or modified CDS sequence (opt3) from hemagglutinin__InfluenzaA__ADD98198
augaaggccauccuggugguccuccuuuacaccuucgcuacagcaaacgccgacacucugugcauuggcuaucacgcgaauaacagcacggauaccguugacacaguguuggagaaaaauguaacugugacccauuccgucaacuuacuggaagauaagcacaaugggaaacuauguaagcucagaggaguggcuccccugcaucuugguaaaugcaacauagccggcuggauccuggggaauccugagugugaaucuuugucaacagcaaguagcugguccuacauuguugagaccucuucgucagacaacggaacuugcuauccaggcgauuuuaucgacuacgaggagcucagggagcagcugagcaguguguccucuuucgaacgguuugagauuuucccgaagacaagcuccuggcccaaucacgauucaaacaagggugucaccgccgcuuguccucaugcaggggccaaaaguuuuuauaagaaucugaucuggcucgugaaaaagggaaacagcuacccaaaauuaucuaaguccuauauaaaugacaagggcaaagaaguacugguucuuuggggcauccaccaccccucaacgagcgcugaucaacagaguuuguaccagaacgccgacgcguacguguucgucgggacuucucgcuauuccaagaaauuuaagccugagauugcaauccgaccaaaagugcgugaucaggagggaagaaugaauuacuauuggacccugguggaacccggugacaagauuacauucgaggccacuggcaaccuagucguuccuagguacgcuuuugccauggaacggaacgcagggagcggaaucauaauuucggauaccccagugcaugacugcaauacaaccugucaaacgccgaaaggcgcuaucaacacuucucuccccuuccagaauauucacccuaucacaaucgguaagugcccaaaguauguaaaauccaccaagaugcgccuggccacugggcuuagaaacgugcccucaauucagaguaggggacuguuuggcgcgauagccggcuucaucgaagggggauggacagguauggucgacggcugguacggguaucaucaccagaaugaacaaggaagcggcuacgcagcugauuugaaauccacccagaacgccauugacgagaucacgaauaaggugaacucuguuauagagaaaaugaauacccaguuuacagcuguggguaaggaguucaaccaccucgaaaagcggauugaaaaucugaacaaaaaggucgaugacggguucuuagauaucuggacuuacaaugccgagcugcucgugcuucuggaaaacgagcgcaccuuggacuaucaugauagcaauguuaaaaaccuauacgagaagguacgaucacagcugaaaaacaaugcaaaggaaaucggcaacggauguuuugaguucuaucacaagugcgacaauacauguauggaaagugugaaaaacggcacuuacgauuauccuaaguacuccgaggaagccaaacucaauagagaggagauugacggggucaagcuggaaagcaccaggaucuaucaaauucuugcuauauacucuacaguggcgucaagucuggucuuggugguuagccucggagcaaucuccuuuuggaugugcucuaacgguucgcugcagugccggauuuguaucuga

SEQ ID NO: 132473 - RNA, 1701 nt, Artificial Sequence; identical to SEQ ID NO: 130717
  derived and/or modified CDS sequence (opt3) from hemagglutinin__InfluenzaA__ADD98208

SEQ ID NO: 132474 - RNA, 1701 nt, Artificial Sequence; identical to SEQ ID NO: 130897
  derived and/or modified CDS sequence (opt3) from hemagglutinin__InfluenzaA__ADE20321

SEQ ID NO: 132475 - RNA, 1701 nt, Artificial Sequence; identical to SEQ ID NO: 130897
  derived and/or modified CDS sequence (opt3) from hemagglutinin__InfluenzaA__ADE20331

SEQ ID NO: 132476 - RNA, 1701 nt, Artificial Sequence; identical to SEQ ID NO: 130897
  derived and/or modified CDS sequence (opt3) from hemagglutinin__InfluenzaA__ADE20341

SEQ ID NO: 132477 - RNA, 1701 nt, Artificial Sequence; identical to SEQ ID NO: 132305
  derived and/or modified CDS sequence (opt3) from hemagglutinin__InfluenzaA__ADE20351

SEQ ID NO: 132478 - RNA, 1701 nt, Artificial Sequence; identical to SEQ ID NO: 130897
  derived and/or modified CDS sequence (opt3) from hemagglutinin__InfluenzaA__ADE20375

SEQ ID NO: 132479 - RNA, 1701 nt, Artificial Sequence; identical to SEQ ID NO: 132305
  derived and/or modified CDS sequence (opt3) from hemagglutinin__InfluenzaA__ADE20388

SEQ ID NO: 132480 - RNA, 1701 nt, Artificial Sequence; identical to SEQ ID NO: 130897
  derived and/or modified CDS sequence (opt3) from hemagglutinin__InfluenzaA__ADE20628

SEQ ID NO: 132481 - RNA, 1701 nt, Artificial Sequence; identical to SEQ ID NO: 132305
  derived and/or modified CDS sequence (opt3) from hemagglutinin__InfluenzaA__ADE20638

SEQ ID NO: 132482 - RNA, 1701 nt, Artificial Sequence; identical to SEQ ID NO: 130897
  derived and/or modified CDS sequence (opt3) from hemagglutinin__InfluenzaA__ADE20648

SEQ ID NO: 132483 - RNA, 1701 nt, Artificial Sequence; identical to SEQ ID NO: 130897
  derived and/or modified CDS sequence (opt3) from hemagglutinin__InfluenzaA__ADE20658

SEQ ID NO: 132484 - RNA, 1701 nt, Artificial Sequence; identical to SEQ ID NO: 132305
  derived and/or modified CDS sequence (opt3) from hemagglutinin__InfluenzaA__ADE20668

SEQ ID NO: 132485 - RNA, 1701 nt, Artificial Sequence; identical to SEQ ID NO: 132305
  derived and/or modified CDS sequence (opt3) from hemagglutinin__InfluenzaA__ADE20678

SEQ ID NO: 132486 - RNA, 1701 nt, Artificial Sequence; identical to SEQ ID NO: 130897
  derived and/or modified CDS sequence (opt3) from hemagglutinin__InfluenzaA__ADE20688

SEQ ID NO: 132487 - RNA, 1701 nt, Artificial Sequence; identical to SEQ ID NO: 130897
  derived and/or modified CDS sequence (opt3) from hemagglutinin__InfluenzaA__ADE20708

SEQ ID NO: 132488 - RNA, 1701 nt, Artificial Sequence; identical to SEQ ID NO: 130897
  derived and/or modified CDS sequence (opt3) from hemagglutinin__InfluenzaA__ADE20718

SEQ ID NO: 132489 - RNA, 1701 nt, Artificial Sequence
  derived and/or modified CDS sequence (opt3) from hemagglutinin__InfluenzaA__ADE20728
augaaggccauccuggugguccuccuuuacaccuucgcuacagcaaacgccgacacucugugcauuggcuaucacgcgaauaacagcacggauaccguugacacaguguuggagaaaaauguaacugugacccauuccgucaacauauuagaagauaagcacaaugggaaacuguguaagcuaaaaggaguggcuccccuccaucuggguaagugcaacaucgccggcuggauucuugggaauccugagugugaaucucugucaacagcaaguagcugguccuacaucguugagaccucuucgucagacaacggaacuugcuauccaggcgauuuuauugacuacgaagaguugagagagcagcucagcaguguguccucuuucgaaagguuugagaucuucccgaagacaagcuccuggcccaaucacgauucaaacaaaggugucaccgccgcuuguccucaugcaggggccaagaguuuuuauaaaaaucugauauggcuggugaagaaaggaaacagcuacccaaagcucucuaaguccuauaucaaugacaaaggcaaggaaguauuaguucuguggggcauucaccaccccucaacgagcgcugaucaacagagucuuuaccagaacgccgacgcguacguguucgucgggucuuccaaauauagcaagaaauuuaagccugagaucgcaauucggccaaaagugcgcgaucaggagggacgaaugaauuacuauuggacuuugguggaacccggugacaagaucaccuucgaggccacaggcaaccuggucguuccucguuacgcuuuugccauggaaagaaacgcagggucgggaauaauuaucucugauacuccagugcaugacugcaauaccacaugucaaaccccgaagggcgcuauuaacacgucccuacccuuccagaauauccacccuaucacuauugguaaaugcccaaaguauguaaaaucaacaaagcucaggcuggccaccgggcuucggaacgugcccaguauacagagccgcggacuguuuggcgcgaucgccggcuucauugaagggggauggacugguauggucgacggcugguacggguaucaucaccagaaugaacaaggauccggcuacgcagcugauuugaaaucuacacagaacgccaucgacgagauaaccaauaaggugaacagcguuauugagaagaugaauacgcaguuuaccgcuguggguaaagaguucaaccaccucgagaagagaaucgaaaaucugaacaaaaaggucgaugacggguucuuagauaucuggacauacaaugccgagcugcucgugcuucuggaaaacgagaggacuuuggacuaucaugauucaaauguuaaaaaccuauacgagaagguacggagucagcugaagaacaaugcaaaagaaauuggcaacggauguuuugaguucuaucacaagugcgacaauaccuguauggaauccgugaaaaacggcacauacgauuauccuaaguacagcgaggaagccaaacucaaucgcgaggagaucgacggggucaagcuggaaucuacucgaauuuaucaaauacuugcuaucuacucaaccguggcgaguagccuggucuuggugguuucccucggagcaauuucuuuuuggaugugcucgaacgguagccugcagugcagaaucuguaucuga

SEQ ID NO: 132490 - RNA, 1701 nt, Artificial Sequence; identical to SEQ ID NO: 130897
  derived and/or modified CDS sequence (opt3) from hemagglutinin__InfluenzaA__ADE20738

SEQ ID NO: 132491 - RNA, 1701 nt, Artificial Sequence; identical to SEQ ID NO: 130897
  derived and/or modified CDS sequence (opt3) from hemagglutinin__InfluenzaA__ADE20748

SEQ ID NO: 132492 - RNA, 1701 nt, Artificial Sequence; identical to SEQ ID NO: 132489
  derived and/or modified CDS sequence (opt3) from hemagglutinin__InfluenzaA__ADE20758

SEQ ID NO: 132493 - RNA, 1701 nt, Artificial Sequence; identical to SEQ ID NO: 130897
  derived and/or modified CDS sequence (opt3) from hemagglutinin__InfluenzaA__ADE20768

SEQ ID NO: 132494 - RNA, 1701 nt, Artificial Sequence
  derived and/or modified CDS sequence (opt3) from hemagglutinin__InfluenzaA__ADE20778
augaaggccauccuggugguccuccuuuacaccuucgcuacagcaaacgccgacacucugugcauuggcuaucacgcgaauaacagcacggauaccguugacacaguguuggagaaaaauguaacugugacccauuccgucaacauauuagaagauaagcacaaugggaaacuguguaagcuaaaaggaguggcuccccuccaucuggguaagugcaacaucgccggcuggauucuugggaauccugagugugaaucucugucaacagcaaguagcugguccuacaucguugagaccucuucgucagacaacggaacuugcuauccaggcgauuuuauugacuacgaagaguugagagagcagcucagcaguguguccucuuucgaaagguuugagaucuucccgaagacaagcuccuggcccaaucacgauucaaacaaaggugucaccgccgcuuguccucaugcaggggccaagaguuuuuauaaaaaucugauauggcuggugaagaaaggaaacagcuacccaaagcucucuaaguccuauaucaaugacaaaggcaagaaaguauuaguucuguggggcauucaccaccccucaacgagcgcugaucaacagagucuuuaccagaacgccgacgcguacguguucgucgggucuuccaaguauagcaaaaaguuuaaaccugaaaucgcaauucggccaaaggugcgcgaucaggagggacgaaugaauuacuauuggacuuugguggagcccggugacaagaucaccuucgaagccacaggcaaccuggucguuccucguuacgcuuuugccauggagagaaacgcagggucgggaauaauuaucucugauacuccagugcaugacugcaauaccacaugucaaaccccgaaaggcgcuauuaacacgucccuacccuuccagaauauccacccuaucacuauugguaagugcccaaaauauguaaagucaacaaaacucaggcuggccaccgggcuucggaacgugcccaguauacagagccgcggacuguuuggcgcgaucgccggcuucauugaagggggauggacugguauggucgacggcugguacggguaucaucaccagaaugagcaaggauccggcuacgcagcugauuugaagucuacacagaacgccaucgacgaaauaaccaauaaggugaacagcguuauugagaaaaugaauacgcaguuuaccgcuguggguaaggaguucaaccaccucgagaaaagaaucgaaaaucugaacaagaaagucgaugacggguucuuagauaucuggacauacaaugccgaacugcucgugcuucuggagaacgaaaggacuuuggacuaucaugauucaaauguaaagaaccuauacgagaagguucggagucagcugaaaaacaaugcaaaggagauuggcaacggauguuuugaguucuaucacaaaugcgacaauaccuguauggaauccgugaagaacggcacauacgauuauccuaaauacagcgaagaggccaagcucaaucgcgaagagaucgacggggucaagcuggagucuacucgaauuuaucaaauacuugcuaucuacucaaccguggcgaguagccuggucuuggugguuucccucggagcaauuucuuuuuggaugugcucgaacgguagccugcagugcagaaucuguaucuga

SEQ ID NO: 132495 - RNA, 1701 nt, Artificial Sequence; identical to SEQ ID NO: 131881
  derived and/or modified CDS sequence (opt3) from hemagglutinin__InfluenzaA__ADE20788

SEQ ID NO: 132496 - RNA, 1701 nt, Artificial Sequence
  derived and/or modified CDS sequence (opt3) from hemagglutinin__InfluenzaA__ADE20808
augaaggccauccuggugguccuccuuuacaccuucgcuacagcaaacgccgacacucugugcauuggcuaucacgcgaauaacagcacggauaccguugacacaguguuggagaaaaauguaacugugacccauuccgucaacuuacuggaagauaagcacaaugggaaacuauguaagcucagaggaguggcuccccugcaucuugguaaaugcaacauagccggcuggauccuggggaauccugagugugaaucuuugucaacagcaaguagcugguccuacauuguugagaccucuucgucagacaacggaacuugcuauccaggcgauuuuaucgacuacgaagaacucagggagcagcugagcaguguguccucuuucgaacgguuugagauuuucccgaagacaagcuccuggcccaaucacgauucaaacaagggugucaccgccgcuuguccucaugcaggggccaaaaguuuuuauaagaaucugaucuggcucgugaaaaagggaaacagcuacccaaaauuaucuaaguccuauauaaaugacaaggaaaaagagguacugguucuuuggggcauccaccaccccucaacgagcgcugaucaacagaguuuguaccagaacgccgacgcguacguguucgucggcacuucucgcuauuccaagaaauuuaagccugagauugcaauccgaccaaaagugcgugaucaggaagggagaaugaauuacuauuggacccugguggagcccggagacaagauuacauucgaagccacugguaaccuagucguuccuagguacgcuuuugccauggagcggaacgcaggcagcgggaucauaauuucggauaccccagugcaugacugcaauacaaccugucaaacgccgaaaggagcuaucaacacuucucuccccuuccagaauauucacccuaucacaaucggcaagugcccaaaguauguaaaauccaccaagcugcgccuugccacuggucugagaaacgugcccucaauucagaguaggggguuguuuggagcgauagccggcuucaucgaaggcggguggacaggaauggucgacgguugguacggcuaucaucaccagaaugagcaagggagcggauacgcagcugaucucaaauccacccagaacgccauugacaagaucacgaauaaagugaacucuguuauagagaagaugaauacccaguuuacagcugugggcaaggaguucaaccaccuggagaaacggauugaaaauuuaaacaagaaagucgaugacgguuuccuggauaucuggacuuacaaugccgagcuccuugugcuguuggaaaacgagcgcacccuagacuaucaugauagcaauguaaagaaccuguacgagaaaguucgaucacagcucaagaacaaugcaaaggaaaucgggaacggcuguuuugaguucuaucacaaaugcgacaauacauguauggaaagugugaagaacggaacuuacgauuauccuaaauacuccgaggaagccaagcugaauagagaggagauugacggcgucaaacuugaaagcaccaggaucuaucaaauucuggcuauauacucuacaguggcgucaaguuugguccucgugguuagccugggggcaaucuccuuuuggaugugcucuaacggaucguuacagugccggauuuguaucuga

SEQ ID NO: 132497 - RNA, 1701 nt, Artificial Sequence; identical to SEQ ID NO: 131881
  derived and/or modified CDS sequence (opt3) from hemagglutinin__InfluenzaA__ADE20818

SEQ ID NO: 132498 - RNA, 1701 nt, Artificial Sequence; identical to SEQ ID NO: 132439
  derived and/or modified CDS sequence (opt3) from hemagglutinin__InfluenzaA__ADE20828

SEQ ID NO: 132499 - RNA, 1701 nt, Artificial Sequence
  derived and/or modified CDS sequence (opt3) from hemagglutinin__InfluenzaA__ADE20848
augaaggccauccuggugguccuccuuuacaccuucgcuacagcaaacgccgacacucugugcauuggcuaucacgcgaauaacagcacggauaccguugacacaguguuggagaaaaauguaacugugacccauuccgucaacuuacuggaagauaagcacaaugggaaacuauguaagcucagaggaguggcuccccugcaucuugguaaaugcaacauagccggcuggauccuggggaauccugagugugaaucuuugucaacagcaaguagcugguccuacauuguugagaccucuucgucagacaacggaacuugcuauccaggcgauuuuaucaauuacgaggagcucagggagcagcugagcaguguguccucuuucgaacgguuugagauuuucccgaagacaagcuccuggcccaaccacgacucaaauaagggugucaccgccgcuuguccucaugcaggggccaaaaguuuuuauaagaaccugaucuggcucgugaaaaagggaaauagcuacccaaaauuaucuaaguccuauauaaacgauaagggcaaagaaguacugguucuuuggggcauccaccaccccucaacgagcgcugaccaacagaguuuguaccagaaugccgaugcguacguguucgucgggacuucucgcuauuccaagaaauuuaagccugagauugcaauccgaccaaaagugcgugaccaggagggaagaaugaacuacuauuggacccugguggaacccggugauaagauuacauucgaggccacuggcaaccuagucguuccuagguacgcuuuugccauggaacggaaugcagggagcggaaucauaauuucggacaccccagugcaugauugcaacacaaccugucaaacgccgaaaggcgcuaucaauacuucucuccccuuccagaacauucacccuaucacaaucgguaagugcccaaaguauguaaaauccaccaagcugcgccuugccacugggcugagaaaugugcccucaauucagaguaggggauuguuuggcgcgauagccggcuucaucgaagggggauggacagguaugauugacggcugguacggguaucaucaccagaacgaacaaggaagcggcuacgcagcugaccucaaauccacccagaaugccaucgauaagauaacgaacaaagucaauucugugauugagaagaugaacacccaguuuacagcuguugguaaggaguucaaucaccuggaaaaacggaucgagaacuuaaauaagaaaguggacgauggguuccuggacaucuggacuuacaacgccgaacuccuuguccuguuggagaaugaacgcacccuagauuaucaugacagcaacgugaagaaccuguacgagaaaguacgaucacagcucaagaauaacgcaaaggagauuggcaauggauguuuugaguucuaucacaaaugcgauaacacauguauggaaaguguuaagaauggcacuuacgacuauccuaaauacuccgaagaggccaagcugaacagagaagagaucgauggggugaaacuugagagcaccaggauuuaucaaauacuggcuaucuacucuacagucgcgucaaguuuggugcucgucgugagccugggagcaauuuccuuuuggaugugcucuaaugguucguuacagugccggaucuguaucuga

SEQ ID NO: 132500 - RNA, 1701 nt, Artificial Sequence; identical to SEQ ID NO: 131881
  derived and/or modified CDS sequence (opt3) from hemagglutinin__InfluenzaA__ADE20858

SEQ ID NO: 132501 - RNA, 1701 nt, Artificial Sequence
  derived and/or modified CDS sequence (opt3) from hemagglutinin__InfluenzaA__ADE20868
augaaggccauccuggugguccuccuuuacaccuucgcuacagcaaacgccgacacucugugcauuggcuaucacgcgaauaacagcacggauaccguugacacaguguuggagaaaaauguaacugugacccauuccgucaacuuacuggaagggaagcacaauggaaaacuauguaagcucagagguguggcuccccugcaucuuggcaaaugcaacauagccggguggauccugggaaauccugagugugaaucuuugacaaccgcaucaaguuggagcuacauuguugagacuuccucuucggauaacggcacaugcuauccaggugacuuuaucgauuacgaagaacucagggagcagcugucaagcgugaguuccuucgaacgguuugagauguucccgaagaccucuagcuggcccaaucacgacuccaacaagggggucacggccgcuuguccucaugcaggagccaaaucauuuuauaagaaucugauuuggcucgugaaaaagggcaacaguuacccaaaauuaagcaagucuuauaucaaugauaagggcaaagaaguacugguucuuugggggauacaccaccccuccacuucagcugaccaacagagcuuguaccagaacgccgaugcguacguguucgucggaaccagucgcuauucuaagaaauuuaagccugagaucgcaauucgaccaaaagugcgugaccaggaggguagaaugaauuacuauuggacacugguggaacccggcgauaagaucacuuucgaggccaccgggaaccuagucguuccuagguacgcuuuugccauggaacggaacgcaggauccggcauuaucauaagcgacacaccagugcaugauugcaauaccacgugucaaacuccgaaaggugcuauuaacacaucgcuccccuuccagaauauccacccuauuaccaucgggaagugcccaaaguauguaaaaucuacuaagcugcgccuugccacaggacugagaaacgugcccuccauccagucaaggggcuuguuuggcgcgauugccggguucauagagggagguuggaccggcauggucgacgggugguacggauaucaucaccagaaugaacaaggcagugguuacgcagcugaccucaaaagcacgcagaacgccaucgaugagauuaccaauaaggugaacuccguuaucgagaaaaugaauacacaguuuacugcuguggggaaggaguucaaccaccuggagaagcggauagaaaauuuaaacaaaaaggucgacgauggcuuccuggacauuuggaccuacaaugccgagcuccuugugcuguuggaaaacgagcgcacacuagauuaucaugacucuaauguaaagaaccuguacgagaagguucgaagccagcucaaaaacaaugcaaaggaaaucggaaacggcuguuuugaguucuaucacaagugcgauaauacuuguauggaaucagugaaaaacgggaccuacgacuauccuaaguacagugaggaagccaaacugaauagagaggagaucgauggagucaaacuugaauccacaaggauuuaucaaauccuggcuauuuacagcaccguggcgucuucauugguccucgugguuagucugggugcaaucagcuuuuggaugugcuccaacggcucuuuacagugccggauauguauuuga

SEQ ID NO: 132502 - RNA, 1701 nt, Artificial Sequence; identical to SEQ ID NO: 132435
  derived and/or modified CDS sequence (opt3) from hemagglutinin__InfluenzaA__ADE20878

SEQ ID NO: 132503 - RNA, 1701 nt, Artificial Sequence; identical to SEQ ID NO: 131819
  derived and/or modified CDS sequence (opt3) from hemagglutinin__InfluenzaA__ADE20888

SEQ ID NO: 132504 - RNA, 1701 nt, Artificial Sequence
  derived and/or modified CDS sequence (opt3) from hemagglutinin__InfluenzaA__ADE20898
augaaggccauccuggugguccuccuuuacaccuucgcuacagcaaacgccgacacucugugcauuggcuaucacgcgaauaacagcacggauaccguugacacaauauuggagaaaaaugugacuguaacccauuccgugaacuuacuggaagauaagcacaaugggaaacuauguaagcucagaggagucgcuccccugcaucuugguaaaugcaacaucgccggcuggauucuggggaauccugagugugaaucuuugucaacagcaaguagcugguccuacaucguggagaccucuucgucagacaacggaacuugcuauccaggcgauuuuauugacuacgaggagcucagggagcagcugagcaguguuuccucuuucgaacgguuugagaucuucccgaagacaagcuccuggcccaaucacgauucaaacaagggugugaccgccgcuuguccucaugcaggggccaaaaguuuuuauaagaaucugauauggcucgucaaaaagggaaacagcuacccaaaauuaucuaaguccuauaucaaugacaagggcaaagaaauucuggugcuuuggggcauccaccaccccucaacgagcgcugaucaacagaguuuguaccagaacgccgacgcguacguauucguugggacuucucgcuauuccaagaaauuuaagccugagauugcaauccgaccaaaagugcgugaucaggagggaagaaugaauuacuauuggacccuggucgaacccggugacaagauaacauucgaggccacuggcaaccuaguggugccuagguacgcuuuugccauggaacggaacgcagggagcggaauuaucauuucggauaccccaguccaugacugcaauacaaccugucaaacgccgaaaggcgcuaucaacacuucucuccccuuccagaauauccacccuauuacaauagguaagugcccaaaguauguuaaauccaccaagcugcgccuugccacugggcugagaaacgugcccucaauccagaguaggggauuguuuggcgcgauugccggcuucaucgaagggggauggacagguaugguagacggcugguacggguaucaucaccagaaugaacaaggaagcggcuacgcagcugaucucaaauccacccagaacgccauagacgagauuacgaauaaggugaacucugucaucgagaaaaugaauacccaguuuacagcuguggguaaggaguucaaccaccuggaaaagcggaucgaaaauuuaaacaaaaagguugaugacggguuccuggauauuuggacuuacaaugccgagcuccuugugcuguuggaaaacgagcgcacccuagacuaucaugauagcaaugucaaaaaccuguacgagaaggugcgaucacagcucaaaaacaaugcaaaggaaaucggcaacggauguuuugaguucuaucacaagugcgacaauacauguauggaaggcguaaagaacgggacuuacgauuauccuaaguacagugaggaagccaaacugaauagagaggagauugacggaguuaaacuugaauccaccaggauauaucaaauccuggcuauuuacagcacaguggcgucuucauugguccucguggucagucugggugcaaucagcuuuuggaugugcuccaacggcucuuuacagugccggaucuguauuuga

SEQ ID NO: 132505 - RNA, 1701 nt, Artificial Sequence; identical to SEQ ID NO: 132468
  derived and/or modified CDS sequence (opt3) from hemagglutinin__InfluenzaA__ADE20908

SEQ ID NO: 132506 - RNA, 1701 nt, Artificial Sequence
  derived and/or modified CDS sequence (opt3) from hemagglutinin__InfluenzaA__ADE20918
augaaggccauccuggugguccuccuuuacaccuucgcuacagcaaacgccgacacucugugcauuggcuaucacgcgaauaacagcacggauaccguugacacaguguuggagaaaaauguaacugugacccauuccgucaacauauuagaagauaagcacaaugggaaacuguguaagcuaagaggaguggcuccccuccaucuggguaaaugcaacaucgccggcuggauucuugggaauccugagugugaaucucugucaacagcaaguagcugguccuacaucguugagaccucuucgucagacaacggaacuugcuauccaggcgauuuuauugacuacgaagaguugagggagcagcucagcaguguguccucuuucgaacgguuugagaucuucccgaagacaagcuccuggcccaaucacgauucaaacaagggugucaccgccgcuuguccucaugcaggggccaaaaguuuuuauaagaaucugauauggcuggugaaaaagggaaacagcuacccaaaacucucuaaguccuauaucaaugacaagggcaaagaaguauuaguucuguggggcauucaccaccccucaacgagcgcugaucaacagagucuuuaccagaacgccgacgcguacguguucgucgggacuucucgcuauuccaagaaauuuaagccugagaucgcaauucgaccaaaagugcgugaucaggagggaagaaugaauuacuauuggaucuugguggaacccggugacaagauaaccuucgaggccacaggcaaccuggucguuccuagguacgcuuuugccauggaacggaacgcagggagcggaauuaucauuucggauacuccagugcaugacugcaauaccacaugucaaaccccgaaaggcgcuaucaacacgucucuacccuuccagaauauccacccuauuacuauagguaagugcccaaaguauguaaaauccacaaagcuccgccuggccaccgggcuuagaaacgugcccucaauccagaguaggggacuguuuggcgcgauugccggcuucaucgaagggggauggacugguauggucgacggcugguacggguaucaucaccagaaugaacaaggaagcggcuacgcagcugauuugaaauccacacagaacgccauagacgagauuaccaauaaggugaacucuguuaucgagaaaaugaauacgcaguuuaccgcuguggguaaggaguucaaccaccucgagaagcggaucgaaaaucugaacaaaaaggucgaugacggguucuuagauauuuggacauacaaugccgagcugcucgugcuucuggaaaacgagcgcacuuuggacuaucaugauagcaauguuaaaaaccuauacgagaagguacgaucacagcugaaaaacaaugcaaaggaaaucggcaacggauguuuugaguucuaucacaagugcgacaauaccuguauggaaagugugaaaaacggcacauacgauuauccuaaguacuccgaggaagccaaacucaauagagaggagauugacggggucaagcuggaaagcacuaggauauaucaaauccuugcuauuuacucuaccguggcgucaagucuggucuuggugguuagccucggagcaaucuccuuuuggaugugcucuaacgguucgcugcagugccggaucuguauuuga

SEQ ID NO: 132507 - RNA, 1701 nt, Artificial Sequence; identical to SEQ ID NO: 131070
  derived and/or modified CDS sequence (opt3) from hemagglutinin__InfluenzaA__ADE20928

SEQ ID NO: 132508 - RNA, 1701 nt, Artificial Sequence
  derived and/or modified CDS sequence (opt3) from hemagglutinin__InfluenzaA__ADE20948
augaaggccauccuggugguccuccuuuacaccuucgcuacagcaaacgccgacacucugugcauuggcuaucacgcgaauaacagcacggauaccguugacacaguguuggagaaaaauguaacugugacccauuccgucaacuuacuggaagauaagcacaaugggaaacuauguaagcucagaggaguggcuccccugcaucuugguaaaugcaacauagccggcuggauccuggggaauccugagugugaaucuuugucaacagcaaguagcugguccuacauuguugagaccucuucgucagacaacggaacuugcuauccaggcgauuuuaucaauuacgaggagcucagggagcagcugagcaguguguccucuuucgaacgguuugagauuuucccgaagacaagcuccuggcccaaccacgacucaaauaagggugucaccgccgcuuguccucaugcaggggccaaaaguuuuuauaagaaccugaucuggcucgugaaaaagggaaauagcuacccaaaauuaucuaaguccuauauaaacgauaagggcaaagaaguacugguucuuuggggcauccaccaccccucaacgagcgcugaccaacagaguuuguaccagaaugccgauucuuacguguucgucgggacuucccgcuauagcaagaaauuuaagccugagauugcgauccgaccaaaagugcgugaccaggagggaagaaugaacuacuauuggacccugguggaacccggugauaagauuacauucgaggcaacuggcaaccuagucguuccuagguacgccuuugcuauggaacggaaugccgggucgggaaucauaauuucugacaccccagugcaugauugcaacacaaccugucaaacgccgaaaggcgcaaucaauacuucccuccccuuccagaacauucacccuaucacaaucgguaagugcccaaaguauguaaaaucaaccaagcugcgccuugcuacugggcugagaaaugugcccaguauucagagcaggggauuguuuggcgccauagcgggcuucaucgaagggggauggacagguauggucgacggcugguacggguaucaucaccagaacgaacaaggauccggcuacgccgcagaccucaaaucuacccagaaugcuauugauaagaucacgaacaaagugaauagcguuauagagaagaugaacacccaguuuacagccguggguaaggaguucaaucaccuggaaaaacggauugagaacuuaaauaagaaagucgacgauggguuccuggacaucuggacuuacaacgcugaacuccuugugcuguuggagaaugaacgcacccuagauuaucaugacucaaacguaaagaaccuguacgagaaaguucgaagucagcucaagaauaacgccaaggagaucggcaauggauguuuugaguucuaucacaaaugcgauaacacauguauggaauccgugaagaauggcacuuacgacuauccuaaauacagcgaagaggcaaagcugaacagagaagagauugauggggucaaacuugagucuaccaggaucuaucaaauucuggccauauacucaacaguggcuaguagcuugguccucgugguuucccugggagcgaucucuuuuuggaugugcucgaaugguagcuuacagugccggauuuguaucuga

SEQ ID NO: 132509 - RNA, 1701 nt, Artificial Sequence
  derived and/or modified CDS sequence (opt3) from hemagglutinin__InfluenzaA__ADE20968
augaaggccauccuggugguccuccuuuacaccuucgcuacagcaaacgccgacacucugugcauuggcuaucacgcgaauaacagcacggauaccguugacacaguguuggagaaaaauguaacugugacccauuccgucaacuuacuggaagauaagcacaaugggaaacuauguaagcucagaggagaggcuccccugcaucuugguaaaugcaacauagccggcuggauccuggggaauccugaaugugagucuuugucaacagcaaguagcugguccuacauuguggaaaccucuucgucagacaacggaacuugcuauccaggcgauuuuaucaauuacgaggagcucagggaacagcugagcaguguuuccucuuucgagcgguuugaaauuuucccgaagacaagcuccuggcccaaccacgacucaaauaagggugugaccgccgcuuguccucauaguggggcaaagagcuuuuauaaaaaccugaucuggcucgucaaaaagggaaauucuuacccaaaauuauccaagucauauauaaacgauaagggcaaagaggugcugguacuuuggggcauccaccaccccagcacgagugccgaccaacagucuuuguaccagaaugcugaugccuacguuuucguggggacuucccgcuauagcaagaaauuuaagccugagauugcgauccgaccaaaaguccgugaccaggaaggaagaaugaacuacuauuggacccugguggagcccggugauaagauuacauucgaagcaacuggcaaccuaguggucccuagguacgccuuugcuauggagcggaaugccgggucgggaaucauaauuucugacaccccaguucaugauugcaacacaaccugucaaacgccgaaaggcgcaaucaauacuucccuccccuuccagaacauucacccuaucacaaucgguaagugcccaaaguaugugaaaucaaccaagcugcgccuugcuacugggcugagaaauguacccaguauucagagcaggggauuguuuggcgccauagcgggcuucaucgaagggggauggacagguaugguggacggcugguacggguaucaucaccagaacgagcaaggauccggcuacgccgcagaccucaaaucuacccagaaugcuauugauaagaucacgaacaaagucaauagcgugauagagaagaugaacacccaguuuacagccguugguaaggaguucaaucaccuggaaaaacggauugaaaacuuaaauaagaaaguggacgauggguuccuggacaucuggacuuacaacgcugagcuccuuguccuguuggaaaaugagcgcacccuagauuaucaugacucaaacgugaagaaccuguacgagaaaguacgaagucagcucaagaauaacgccaaggaaaucggcaauggauguuuugaguucuaucacaaaugcgauaacacauguauggaauccguuaagaauggcacuuacgacuauccuaaauacagcgaggaagcaaagcugaacagagaggagauugauggggugaaacuugaaucuaccaggaucuaucaaauucuggccauauacucaacagucgcuaguagcuuggugcucgucgugucccugggagcgaucucuuuuuggaugugcucgaaugguagcuuacagugccggauuuguaucuga

SEQ ID NO: 132510 - RNA, 1701 nt, Artificial Sequence; identical to SEQ ID NO: 131881
  derived and/or modified CDS sequence (opt3) from hemagglutinin__InfluenzaA__ADE20978

SEQ ID NO: 132511 - RNA, 1701 nt, Artificial Sequence
  derived and/or modified CDS sequence (opt3) from hemagglutinin__InfluenzaA__ADE20988
augaaggccauccuggugguccuccuuuacaccuucgcuacagcaaacgccgacacucugugcauuggcuaucacgcgaauaacagcacggauaccguugacacaguguuggagaaaaauguaacugugacccauuccgucaacuuacuggaagauaagcacaaugggaaacuauguaagcucagaggaguggcuccccugcaucuugguaaaugcaacauagccggcuggauccuggggaauccugagugugaaucuuugucaacagcaaguagcugguccuacauuguugagaccucuucgucagacaacggaacuugcuauccaggcgauuuuaucgacuacgaggagcucagggagcagcugagcaguguguccucuuucgaacgguuugagauuuucccgaagacaagcuccuggcccaaucacgauucaaacaagggugucaccgccgcuuguccucaugcaggggccaaaaguuuuuauaagaaucugaucuggcucgugaaaaagggaaacagcuacccaaaauuaucuaaguccuauauaaaugacaagggcaaagaaguacugguucuuuggggcauccaccaccccucaacgagcacugaucaacagaguuuguaccagaacgcugacgccuacguguucgucgggaccucucgcuauuccaagaaauuuaagccugagauugcgauccgaccaaaagugcgugaucaggagggaagaaugaauuacuauuggacacugguggaacccggugacaagauuacuuucgaggcaaccggcaaccuagucguuccuagguacgccuuugcuauggaacggaacgccgggagcggaaucauaauuucggauacaccagugcaugacugcaauaccacgugucaaacuccgaaaggcgcaaucaacacaucucuccccuuccagaauauucacccuaucaccaucgguaagugcccaaaguauguaaaauccacuaagcugcgccuugcuacagggcugagaaacauucccucaauacagaguaggggauuguuuggcgccaucgcgggcuucauugaagggggauggaccgguaugguggacggcugguacggguaucaucaccagaaugaacaaggaagcggcuacgccgcagaucucaaauccacgcagaacgcuaucgacgagauaaccaauaaggucaacucugugauugagaaaaugaauacacaguuuacugccguugguaaggaguucaaccaccuggaaaagcggaucgaaaauuuaaacaaaaagguggaugacggguuccuggauaucuggaccuacaaugcugagcuccuuguccuguuggaaaacgagcgcacacuagacuaucaugauagcaaugugaaaaaccuguacgagaagguacgaucacagcucaaaaacaaugccaaggaaauuggcaacggauguuuugaguucuaucacaagugcgacaauacuuguauggaaaguguuaaaaacggcaccuacgauuauccuaaguacuccgaggaagcaaaacugaagagagaggagaucgacggggugaaacuugaaagcacaaggauuuaucaaauacuggccaucuacucuaccgucgcuucaaguuuggugcucgucgugagccugggagcgauuuccuuuuggaugugcucuaaugguucguuacagugccggaucuguaucuga

SEQ ID NO: 132512 - RNA, 1701 nt, Artificial Sequence; identical to SEQ ID NO: 131881
  derived and/or modified CDS sequence (opt3) from hemagglutinin__InfluenzaA__ADE20998

SEQ ID NO: 132513 - RNA, 1701 nt, Artificial Sequence; identical to SEQ ID NO: 132045
  derived and/or modified CDS sequence (opt3) from hemagglutinin__InfluenzaA__ADE21008

SEQ ID NO: 132514 - RNA, 1701 nt, Artificial Sequence
  derived and/or modified CDS sequence (opt3) from hemagglutinin__InfluenzaA__ADE21018
augaaggccauccuggugguccuccuuuacaccuucgcuacagcaaacgccgacacucugugcauuggcuaucacgcgaauaacagcacggauaccguugacacaguguuggagaagaauguaacugugacccauuccgucaacuuacuggaagauaagcacaaugggaaacuauguaagcucagaggaguggcuccccugcaucuugguaaaugcaacauagccggcuggauccuggggaauccugagugugaaucuuugucaacagcaaguagcugguccuacauuguugagaccucuucgucagacaacggaacuugcuauccaggcgauuuuaucgacuacgaggagcucagggagcagcugagcaguguguccucuuucgaacgguuugagauuuucccgaagacaagcuccuggcccaaucacgauucaaacaagggugucaccacggccuguccucaugcuggggcaaaaaguuuuuauaagaaucugaucuggcucgugaaaaagggaaacagcuacccaaaauuaucuaaguccuauauaaaugacaagggcaaagaaguacugguucuuuggggcauccaccaccccucaacuagcaccgaucaacagaguuuguaccagaacgccgacgcuuacguguucgucgggacaucucgcuauuccaagaaauuuaagccugagauugccauccgaccaaaagugcgugaucaggagggaagaaugaauuacuauuggacucugguggaacccggugacaagauuaccuucgaggcgacaggcaaccuagucguuccuagguacgcauuugccauggaacggaacgcugggagcggaaucauaauuucggauaccccagugcaugacugcaauacgacuugucaaacaccgaaaggcgccaucaacaccucucuccccuuccagaauauucacccuaucacuaucgguaagugcccaaaguauguaaaauccacaaagcugcgccuugcaaccgggcugagaaacauucccucaauacagaguaggggauuguuuggcgcuaucgccggcuucauugaagggggauggacggguaugguggacggcugguacggguaucaucaccagaaugaacaaggaagcggcuacgcggccgaucucaaauccacccagaacgcaaucgacgagauaacaaauaaggucaacucugugauugagaaaaugaauacucaguuuaccgcuguugguaaggaguucaaccaccuggaaaagcggaucgaaaauuuaaacaaaaagguggaugacggguuccuggauaucuggacauacaaugccgagcuccuuguccuguuggaaaacgagcgcacucuagacuaucaugauagcaaugugaaaaaccuguacgagaagguacgaucacagcucaaaaacaaugcuaaggaaauuggcaacggauguuuugaguucuaucacaagugcgacaauaccuguauggaaaguguuaaaaacggcacauacgauuauccuaaguacuccgaggaagccaaacugaauagagaggagaucgacggggugaaacuugaaagcaccaggauuuaucaaauacuggcaaucuacucuacugucgccucaaguuuggugcucgucgugagccugggagcuauuuccuuuuggaugugcucuaacgguucguuacagugccggaucuguaucuga

SEQ ID NO: 132515 - RNA, 1701 nt, Artificial Sequence; identical to SEQ ID NO: 132455
  derived and/or modified CDS sequence (opt3) from hemagglutinin__InfluenzaA__ADE21028

SEQ ID NO: 132516 - RNA, 1701 nt, Artificial Sequence; identical to SEQ ID NO: 132445
  derived and/or modified CDS sequence (opt3) from hemagglutinin__InfluenzaA__ADE21038

SEQ ID NO: 132517 - RNA, 1701 nt, Artificial Sequence; identical to SEQ ID NO: 132468
  derived and/or modified CDS sequence (opt3) from hemagglutinin__InfluenzaA__ADE21048

SEQ ID NO: 132518 - RNA, 1701 nt, Artificial Sequence
  derived and/or modified CDS sequence (opt3) from hemagglutinin__InfluenzaA__ADE21058
augaaggccauccuggugguccuccuuuacaccuucgcuacagcaaacgccgacacucugugcauuggcuaucacgcgaauaacagcacggauaccguugacacaguguuggagaaaaauguaacugugacccauuccgucaacuuacuggaagauaagcacaaugggaaacuauguaagcucagaggaguggcuccccugcaucuugguaaaugcaacauagccggcuggauccuggggaauccugagugugaaucuuugucaacagcaaguagcugguccuacauuguugagaccucuucgucagacaacggaacuugcuauccaggcgauuuuaucgacuacgaggagcucagggagcagcugagcaguguguccucuuucgaacgguuugagauuuucccgaagacaagcuccuggcccaaucacgauucaaacaagggugucaccgccgcuuguccucaugcaggggccaaaaguuuuuauaagaaucugaucuggcucgugaaaaagggaaacagcuacccaaaauuaucuaaguccuauauaaaugacaagggcaaagaaguacugguucuuuggggcauccaccaccccucaacgagcgcugaucaacagaguuuguaccagaacgccgacgcguacguguucgucgggacuucucgcuauuccaagaaauuuaagccugagauugcaauccgaccaaaagugcgugaucaggagggaagaauuaauuacuauuggacccugguggaacccggugacaagaucacauucgaggccacuggcaaccuagucguuccuagguacgcuuuugccauggaacggaacgcagggagcggaauaauuaucucggauaccccagcucaugacugcaauacaaccugucaaacgccgaaaggcgccauuaacacuucucuccccuuccagaauauccacccuaucacaauugguaagugcccaaaguaugugaaauccaccaagcugcgccuugcgacugggcugagaaacguacccucaauacagaguaggggauuguuuggcgccaucgcaggcuucauugaagggggauggacagguaugguggacggcugguacggguaucaucaccagaaugaacaaggaagcggcuacgcugccgaucucaaauccacccagaacgcuaucgacaagauaacgaauaaagucaacucugugauugagaagaugaauacccaguuuacagccguugguaaggaguucaaccaccuggaaaaacggaucgagaauuuaaacaagaaaguggaugacggguuccuggauaucuggacuuacaaugcagaacuccuuguccuguuggagaacgaacgcacccuagacuaucaugauagcaaugugaagaaccuguacgagaaaguacgaucacagcucaagaacaaugccaaggagauuggcaacggauguuuugaguucuaucacaaaugcgacaauacauguauggaaaguguuaagaacggcacuuacgauuauccuaaauacuccgaagaggcuaagcugaauagagaagagaucgacggggugaaacuugagagcaccaggauuuaucaaauacuggcgaucuacucuacagucgcaucaaguuuggugcucgucgugagccugggagccauuuccuuuuggaugugcucuaacgguucguuacagugccggaucuguaucuga

SEQ ID NO: 132519 - RNA, 1701 nt, Artificial Sequence
  derived and/or modified CDS sequence (opt3) from hemagglutinin__InfluenzaA__ADE21068
augaaggccauccuggugguccuccuuuacaccuucgcuacagcaaacgccgacacucugugcauuggcuaucacgcgaauaacagcacggauaccguugacacaguguuggagaaaaauguaacugugacccauuccgucaacuuacuggaagauaagcacaaugggaaacuauguaagcucagaggaguggcuccccugcaucuugguaaaugcaacauagccggcuggauccuggggaauccugagugugaaucuuugucaacagcaaguagcugguccuacauuguugagaccucuucgucagacaacggaacuugcuauccaggcgauuuuaucgacuacgaagaacucagggagcagcugagcaguguguccucuuucgaacgguuugagauuuucccgaagacaagcuccuggcccaaucacgauucaaacaagggugucaccgccgcuuguccucaugcaggggccaaaaguuuuuauaagaaucugaucuggcucgugaaaaagggaaacagcuacccaaaauuaucuaaguccuauauaaaugacaagggcaaagaaguacugguucuuuggggcauccaccaccccucaacgagcgcugaucaacagaguuuguaccagaacgccgacgcguacguguucgucgggacuucucgcuauuccaagaaauuuaagccugagauugcaauccgaccaaaagugcgugagcaggaaggaagaaugaauuacuauuggacccugguggagcccggugauaagauuacauucgaagccacuggcaaccuagucguuccuagguacgcuuuugccauggagcggaacgcagggagcggaaucauaauuucggacaccccagugcaugauugcaauacaaccugucaaacgccgaaaggcgcuaucaacacuucucuccccuuccagaauauucacuccaucacaaucgguaagugcccuaaguauguaaaaucaaccaagcugcgccuugccacugggcugagaaacgugccaaguauucagagcaggggauuguuuggcgcgauagccggcuucaucgaagggggauggacagguauggucgacggcugguacggguaucaucaccagaaugagcaaggauccggcuacgcagcugaccucaaaucuacccagaacgccauugaugagaucacgaauaaggugaacagcguuauagaaaagaugaauacccaguuuacagcuguggguaaggaguucaaccaccuggaaaagcggauugagaauuuaaacaaaaaggucgacgauggguuccuggacaucuggacuuacaaugccgaacuccuugugcuguuggagaacgagcgcacccuagauuaucaugacucaaauguuaaaaaccuguacgaaaagguacgaagucagcucaaaaacaaugcaaaggagacaggcaacggauguuuugaguucuaucacaagugcgauaauacuuguauggaguccgugaaaaacggcaccuacgacuaucccaaguacagcgaagaggccaaacugaauagagaggaaaucgauggggucaaacuugagucuacaaggauuuaucaaauccuggcuauuuacucaaccguggcgaguagcuugguccucgugguuucccugggagcaauaucuuuuuggaugugcucgaacgguagcuuacagugccggaucuguauuuga

SEQ ID NO: 132520 - RNA, 1698 nt, Artificial Sequence
  derived and/or modified CDS sequence (opt3) from hemagglutinin__InfluenzaA__ADE28761
augaaggugaaacugcucguccuucugugcaccuucacagccacuuacgcugacacgaucuguauuggcuaucacgcaaacaauagcaccgauacaguugacacuguguuggagaagaacguaaccgugacacauuccgucaauuuacuggaaaacucucacaaugggaaacuaugccuccugaagggaauagcgccccuucagcuggguaacuguucaguggccggcuggaucuuggggaauccugagugcgaacuccugauuaguaaagagagcugguccuacaucguugaaaagccaaacccggagaauggaaccuguuaucccggccauuuugcugauuacgaggaacugagagagcaacucucuucggugagcucauucgaaagguuugagauuuucccuaaggagaguuccuggccaaaccacacugucacaggugugucugccagcugcucccauaauggggaaucaaguuuuuaucggaacuuacuguggcuuaccggcaaaaauggauuguaccccaaccugagcaagucuuaugcaaauaacaaagagaaggaagugcuaguucucuggggcgugcaccacccuccaaacaucgggaaucagaaaacgcuguaccauacugagaacgccuacgucuccguggugucaagccacuauagucgcaaguucacccccgaaauagcuaagcgaccuaaaguccgugaccaggagggaagaaucaauuacuauuggacacuucuggagccaggugauacuauuaucuuugaagcaaacggcaauuugauugccccgagguacgcuuucgcccucucucggggguuuggauccggcaucauaaacagcaaugcgcccauggacaagugugaugcaaaaugccagaccccucaaggugccauuaacucgucucugccauuccagaauguucaucccgugacaaucggggaguguccuaaguauguacgcuccgcuaaauuaagaauggugaccggacugaggaacauuccaucaauccagagucggggccucuuuggcgccaucgcaggguucauugaaggagguuggacgggcauggucgacgggugguacggauaucaccaccagaaugagcaaggcagcgguuacgcugccgaucagaaguccacucagaacgcgauaaaugggaucacaaacaaaguaaauucuguuauugaaaagaugaacacccaguuuacugccgugggcaaggaguucaacaaacuugagcgccgaauggaaaaucugaacaagaaagucgacgauggauucaucgacauauggacauacaaugcagaguugcuagugcugcucgaaaacgagagaacccuggauuuucaugaaagcaauguaaagaaccuuuaugagaaaguuaagucacaacugaagaauaacgcuaaagagauuggcaaugggugcuucgaauuuuaccacaaguguaacgacgagugcauggaaagugugaaaaauggaacguaugacuaccccaaguauuccgaggagagcaaauugaacagggaaaagaucgauggugucaagcucgagucuauggaaguguaccagauccuggccauuuauucaaccgucgcuaguagcuuagugcugcuaguuucccucggcgccaucucuuucuggaugugcucgaaugggagccugcagugucggauuugcauauga

SEQ ID NO: 132521 - RNA, 1701 nt, Artificial Sequence; identical to SEQ ID NO: 130897
  derived and/or modified CDS sequence (opt3) from hemagglutinin__InfluenzaA__ADE28780

SEQ ID NO: 132522 - RNA, 1701 nt, Artificial Sequence; identical to SEQ ID NO: 132305
  derived and/or modified CDS sequence (opt3) from hemagglutinin__InfluenzaA__ADE28790

SEQ ID NO: 132523 - RNA, 1701 nt, Artificial Sequence; identical to SEQ ID NO: 132489
  derived and/or modified CDS sequence (opt3) from hemagglutinin__InfluenzaA__ADE28800

SEQ ID NO: 132524 - RNA, 1701 nt, Artificial Sequence; identical to SEQ ID NO: 131881
  derived and/or modified CDS sequence (opt3) from hemagglutinin__InfluenzaA__ADE28810

SEQ ID NO: 132525 - RNA, 1701 nt, Artificial Sequence
  derived and/or modified CDS sequence (opt3) from hemagglutinin__InfluenzaA__ADE28820
augaaggccauccuggugguccuccuuuacaccuucgcuacagcaaacgccgacacucugugcauuggcuaucacgcgaauaacagcacggauaccguugacacaguguuggagaaaaauguaacugugacccauuccgucaacuuacuggaagauaagcacaaugggaaacuauguaagcucagaggaguggcuccccugcaucuugguaaaugcaacauagccggcuggauccuggggucuccugagugugaaucauugaguacagcaagcuccuggucuuacauuguugagaccucgucaagcgacaauggaacuugcuauccaggcgauuuuaucgacuacgaggagcucagggagcagcugaguuccgugucuagcuucgaacgguuugagauuuucccgaagacauccucauggcccaaccacgauaguaauaagggugucaccgccgcuuguccucaugcaggggccaagagcuuuuauaaaaaccugaucuggcucgugaaaaagggaaauucuuacccaaaauuauccaagucauauauaaacgacaagggcaaagaaguacugguucuuuggggcauccaccaccccagcacgagugcugaucaacagucuuuguaccagaaugccgacgcguacguguucgucgggacuucccgcuauagcaagaaauuuaagccugagauugcaauccgaccaaaagugcgugaucaggagggaagaaugaacuacuauuggacccugguggaacccggugacaagauuacauucgaggccacuggcaaucuagucguuccuagguacgcuuuugccauggaacggaacgcagggucgggaaucauaauuucugauaccccagugcaugacugcaacacaaccugucaaacgccgaaaggcgcuaucaauacuucccuccccuuccagaacauucacccuaucacaaucgguaagugcccaaaguauguaaaaucaaccaagcugcgccuugccacugggcugagaaaugugcccaguauucagagcaggggauuguuuggcgcgauagccggcuucaucgaagggggauggacagguauggucgacggcugguacggguaucaucaccagaacgaacaaggauccggcuacgcagcugaucucaaaucuacccagaaugccauugacaagaucacgaacaaagugaauagcguuauagagaagaugaacacccaguuuacagcuguggguaaggaguucaaucaccuggaaaaacggauugagaacuuaaauaagaaagucgaugacggguuccuggauaucuggacuuacaacgccgaacuccuugugcuguuggagaaugaacgcacccuagacuaucaugauucaaacguaaagaaucuguacgagaaaguucgaagucagcucaagaacaacgcaaaggagaucggcaauggauguuuugaguucuaucacaaaugcgacaacacauguauggaauccgugaagaauggcacuuacgauuauccuaaauacagcgaagaggccaagcugaacagagaagagauugacggggucaaacuugagucuaccaggaucuaucaaauucuggcuauauacucaacaguggcgaguagcuugguccucgugguuucccugggagcaaucucuuuuuggaugugcucgaaugguagcuuacagugccggauuuguaucuga

SEQ ID NO: 132526 - RNA, 1701 nt, Artificial Sequence; identical to SEQ ID NO: 130897
  derived and/or modified CDS sequence (opt3) from hemagglutinin__InfluenzaA__ADE28830

SEQ ID NO: 132527 - RNA, 1701 nt, Artificial Sequence; identical to SEQ ID NO: 130897
  derived and/or modified CDS sequence (opt3) from hemagglutinin__InfluenzaA__ADE28840

SEQ ID NO: 132528 - RNA, 1701 nt, Artificial Sequence; identical to SEQ ID NO: 130897
  derived and/or modified CDS sequence (opt3) from hemagglutinin__InfluenzaA__ADE28850

SEQ ID NO: 132529 - RNA, 1701 nt, Artificial Sequence; identical to SEQ ID NO: 130897
  derived and/or modified CDS sequence (opt3) from hemagglutinin__InfluenzaA__ADE28881

SEQ ID NO: 132530 - RNA, 1701 nt, Artificial Sequence; identical to SEQ ID NO: 130897
  derived and/or modified CDS sequence (opt3) from hemagglutinin__InfluenzaA__ADE28891

SEQ ID NO: 132531 - RNA, 1701 nt, Artificial Sequence; identical to SEQ ID NO: 132400
  derived and/or modified CDS sequence (opt3) from hemagglutinin__InfluenzaA__ADE28911

SEQ ID NO: 132532 - RNA, 1701 nt, Artificial Sequence; identical to SEQ ID NO: 131881
  derived and/or modified CDS sequence (opt3) from hemagglutinin__InfluenzaA__ADE28921

SEQ ID NO: 132533 - RNA, 1701 nt, Artificial Sequence; identical to SEQ ID NO: 131881
  derived and/or modified CDS sequence (opt3) from hemagglutinin__InfluenzaA__ADE28931

SEQ ID NO: 132534 - RNA, 1701 nt, Artificial Sequence; identical to SEQ ID NO: 131070
  derived and/or modified CDS sequence (opt3) from hemagglutinin__InfluenzaA__ADE28951

SEQ ID NO: 132535 - RNA, 1701 nt, Artificial Sequence
  derived and/or modified CDS sequence (opt3) from hemagglutinin__InfluenzaA__ADE28961
augaaggccauccuggugguccuccuuuacaccuucgcuacagcaaacgccgacacucugugcauuggcuaucacgcgaauaacagcacggauaccguugacacaguguuggagaaaaauguaacugugacccauuccgucaacuuacuggaagauaagcacaaugggaaacuauguaagcucagaggaguggcuccccugcaucuugguaaaugcaacguugccggcuggauacuggggaauccugagugugaaucuuugucaacagcaaguagcugguccuacaucguggagaccucuucgucagacaacggaacuugcuauccaggcgauuuuauugacuacgaggagcucagggagcagcugagcagugucuccucuuucgaacgguuugagaucuucccgaagacaagcuccuggcccaaucacgauucaaacaagggugugaccgccgcuuguccucaugcaggggccaaaaguuuuuauaagaaucugauuuggcucguaaagaagggaaacagcuacccaaaauuaucuaaguccuauaucaaugacaagggcaaagaaguucuggugcuuuggggcauacaccaccccucaacgagcgcugaucaacagaguuuguaccagaacgccgacgcguacgucuucguggggacuucucgcuauuccaagaaauuuaagccugagaucgcaauucgaccaaaagugcgugaucaggagggaagaaugaauuacuauuggacccuggucgaacccggugacaagaucacauucgaggccacuggcaaccuaguugugccuagguacgcuuuugccauggaacggaacgcagggagcggaauuaucauaucggauaccccaguacaugacugcaauacaaccugucaaacgccgaaaggcgcuauuaacacuucucuccccuuccagaauauccacccuauuacaaucgguaagugcccaaaguaugugaaauccaccaagcugcgccuugccacugggcugagaaacguccccucaauccagaguaggggauuguuuggcgcgauugccggcuucauagaagggggauggacagguaugguggacggcugguacggguaucaucaccagaaugaacaaggaagcggcuacgcagcugaucucaaauccacccagaacgccaucgacgagauuacgaauaagguuaacucugugaucgagaaaaugaauacccaguuuacagcugucgguaaggaguucaaccaccuggaaaagcggauagaaaauuuaaacaaaaagguggaugacggguuccuggauauuuggacuuacaaugccgagcuccuuguacuguuggaaaacgagcgcacccuagacuaucaugauagcaauguuaaaaaccuguacgagaaggugcgaucacagcucaaaaacaaugcaaaggaaaucggcaacggauguuuugaguucuaucacaagugcgacaauacauguauggaaagugucaaaaacggcacuuacgauuauccuaaguacuccgaggaagccaaacugaauagagaggagaucgacggggugaaacuugaaagcaccaggauuuaucaaauccuggcuauuuacucuacagucgcgucaaguuuggugcucguugugagccugggagcaauauccuuuuggaugugcucuaacgguucguuacagugccggaucuguauuuga

SEQ ID NO: 132536 - RNA, 1701 nt, Artificial Sequence; identical to SEQ ID NO: 132421
  derived and/or modified CDS sequence (opt3) from hemagglutinin__InfluenzaA__ADE28971

SEQ ID NO: 132537 - RNA, 1701 nt, Artificial Sequence
  derived and/or modified CDS sequence (opt3) from hemagglutinin__InfluenzaA__ADE28981
augaaggccauccuggugguccuccuuuacaccuucgcuacagcaaacgccgacacucugugcauuggcuaucacgcgaauaacagcacggagaccguugauacaguguuggagaaaaauguaacugugacccauuccgucaacuuacuggaagacaagcacaaugggaaacuauguaagcucagaggaguggcuccccugcaucuugguaaaugcaacauagccggcuggauccuggggaauccugaaugugagucuuugucaacagcaaguagcugguccuacauuguugaaaccucuucgucagauaacggaacuugcuauccaggcgacuuuaucgauuacgaggagcucagggaacagcugagcaguguguccucuuucgagcgguuugaaauuuucccgaagacaagcuccuggcccaaucacgacucaaacaagggugucaccgccgcuuguccucaugcaggggccaaaaguuuuuauaagaaucugaucuggcucgugaaaaagggaaacagcuacccaaaauuaucuaaguccuauauaaaugauaagggcaaagagguacugguucuuuggggcauccaccaccccucaacgagcgcugaccaacagaguuuguaccagaacgccgaugcguacguguucgucgggacuucucgcuauuccaagaaauuuaagccugagauugcaauccgaccaaaagugcgugaccaggaaggaagaaugaauuacuauuggacccugguggagcccggugauaagauuacauucgaagccacuggcaaccuagucguuccuagguacgcuuuugccauggagcggaacgcagggagcggaaucauaauuucggacaccccagugcaugauugcaauacaaccugucaaacgccgaaaggcgcuaucaacacuucucuccccuuccagaauauucacccuaucacaaucgguaagugcccaaaguauguaaaauccaccaagcugcgccuugccacugggcugagaaacgugcccucaauucagaguaggggauuguuuggcgcgauagccggcuucaucgaagggggauggacagguauggucgacggcugguacggguaucaucaccagaaugagcaaggaagcggcuacgcagcugaccucaaauccacccagaacgccauugauaagaucacgaauaaagugaacucuguuauagagaagaugaauacccaguuuacagcuguggguaaggaguucaaccaccuggaaaaacggauugaaaauuuaaacaagaaagucgacgauggguuccuggacaucuggacuuacaaugccgagcuccuugugcuguuggaaaacgagcgcacccuagauuaucaugacagcaauguaaagaaccuguacgagaaaguucgaucacagcucaagaacaaugcaaaggaaaucggcaacggauguuuugaguucuaucacaaaugcgauaauacauguauggaaagugugaagaacggcacuuacgacuauccuaaauacuccgaggaagccaagcugaauagagaggagauugauggggucaaacuugaaagcaccaggaucuaucaaauucuggcuauauacucuacaguggcgucaaguuugguccucgugguuagccugggagcaaucuccuuuuggaugugcucuaacgguucguuacagugccggauuuguaucuga

SEQ ID NO: 132538 - RNA, 1701 nt, Artificial Sequence; identical to SEQ ID NO: 131881
  derived and/or modified CDS sequence (opt3) from hemagglutinin__InfluenzaA__ADE28991

SEQ ID NO: 132539 - RNA, 1701 nt, Artificial Sequence
  derived and/or modified CDS sequence (opt3) from hemagglutinin__InfluenzaA__ADE29001
augaaggccauccuggugguccuccuuuacaccuucgcuacagcaaacgccgacacucugugcauuggcuaucacgcgaauaacagcacggauaccguugacacaguguuggagagaaauguaacugugacccauuccgucaacuuacuggaagauaaacacaaugggaagcuauguaaacucaagggaguggcuccccugcaucuugguaaaugcaacauagccggcuggauccuggggaauccugagugugaaucuuugucaacagcaaguagcugguccuacauuguugagaccucuucgucagacaacggaacuugcuauccaggcgauuuuaucgacuacgaggagcucagggagcagcugagcaguguguccucuuucgaacgguuugagauuuucccgaagacaagcuccuggcccaaucacgauucaaacaagggugucaccgccgcuuguccucaugcaggggccaaaaguuuuuauaagaaucugaucuggcucgugaaaaagggaaacagcuacccaaaauuaucuaaguccuauauaaaugacaagggcaaagaaguacugguucuuuggggcauccaccaccccucaacgagcgcugaucaacagaguuuguaccagaacgccgacgcguacguguucgucgggacuucucgcuauuccaagaaauuuaagccugagauugcaauccgaccaaaagugcgugaucaggagggaagaaugaauuacuauuggacccugguggaacccggugacaagauuacauucgaggccacuggcaaccuagucguuccuagguacgcuuuugccauggaacggaacgcagggagcggaaucauaauuucggauaccccagugcaugacugcaauacaaccugucaaacgccgaaaggcgcuaucaacacuucucuccccuuccagaauauucacccuaucacaaucgguaagugcccaaaguauguaaaauccaccaagcugcgccuugccacugggcugagaaacgugcccucaauucagaguaggggauuguuuggcgcgauagccggcuucaucgaagggggauggacagguauggucgacggcugguacggguaucaucaccagaaugaacaaggaagcggcuacgcagcugaucucaaauccacccagaacgccauugacgagaucacgaauaaggugaacucuguuauagagaaaaugaauacccaguuuacagcuguggguaaggaguucaaccaccuggaaaagcggauugaaaauuuaaacaaaaaggucgaugacggguuccuggauaucuggacuuacaaugccgagcuccuugugcuguuggaaaacgagcgcacccuagacuaucaugauagcaauguaaagaaccuguacgagaagguucgaucacagcucaaaaacaaugcaaaggaaaucggcaacggauguuuugaguucuaucacaagugcgacaauacauguauggaaagugugaaaaacggcacuuacgauuauccuaaguacuccgaggaagccaaacugaauagagaggagauugacggggucaaacuugaaagcaccaggaucuaucaaauucuggcuauauacucuacaguggcgucaaguuugguccucgugguuagccugggagcaaucuccuuuuggaugugcucuaacgguucguuacagugccggauuuguaucuga

SEQ ID NO: 132540 - RNA, 1701 nt, Artificial Sequence; identical to SEQ ID NO: 130959
  derived and/or modified CDS sequence (opt3) from hemagglutinin__InfluenzaA__ADE29011

SEQ ID NO: 132541 - RNA, 1701 nt, Artificial Sequence
  derived and/or modified CDS sequence (opt3) from hemagglutinin__InfluenzaA__ADE29021
augaaggccauccuggugguccuccuuuacaccuucgcuacagcaaacgccgacacucugugcauuggcuaucacgcgaauaacagcacggauaccguugacacaguguuggagaaaaauguaacugugacccauuccgucaacuuacuggaagauaagcacaaugggaaacuauguaagcucagaggaguggcuccccugcaucuugguaaaugcaacauagccggcuggauccuggggaauccugagugugaaucuuugucaacagcaaguagcugguccuacauuguugagaccucuggaucggacaacggcacuugcuauccaggugauuuuaucgacuacgaggaacucagggagcagcugucaagcgugaguuccuucgaacgguuugagauuuucccgaagacaucuagcuggcccaaucacgauuccaacaagggggucaccgccgcuuguccucaugcaggagccaaaucauuuuauaagaaucugaucuggcucgugaaaaagggcaacaguuacccaaaauuaagcaagucuuauauaaaugacaagggcaaagaaguacugguucuuugggggauccaccaccccuccacgucaacugaucaacagagcuuguaccagaacgcugacgccuacgugagugucggaaccucucgcuauuccaagaaauucaagccugagauugcgauccgaccaaaagugcgugaucaggaggguagaaugaauuacuauuggacacugguggaacccggcgacaagauuacuuuugaggcaaccgggaaccuagucguuccuagguacgccuucgcuauggaacggaacgccggaagcggcaucauaauuucggauacaccagugcaugacugcaauaccacgugucaaacuccgaaaggugcaaucaacacaucucuccccuuucagaauauucacccuaucaccaucgggaagugcccaaaguauguaaaauccacuaagcugcgccuugcuacaggacugagaaacgugcccucaauucagaguaggggcuuguucggcgccauagcgggguuuaucgagggagguuggaccggcauggucgacgggugguacggauaucaucaccagaaugaacaaggcagcgguuacgccgcagaucucaaauccacgcagaacgcuauugacaagaucaccaauaaagugaacucuguuauagagaagaugaauacacaguucacugccguggggaaggaguuuaaccaccuggaaaaacggauugagaauuuaaacaagaaagucgaugacggcuuccuggauaucuggaccuacaaugcugaacuccuugugcuguuggagaacgaacgcacacuagacuaucaugauagcaauguaaagaaccuguacgagaaaguucgaucacagcucaagaacaaugccaaggagaucggaaacggcuguuucgaauuuuaucacaaaugcgacaauacuuguauggagagugugaagaacgggaccuacgauuauccuaaauacuccgaagaggcaaagcugaauagagaagagauugacggagucaaacuugagagcacaaggaucuaucaaauucuggccauauacucuaccguggcuucaaguuugguccucgugguuagccugggugcgaucuccuucuggaugugcucuaacggcucguuacagugccggauuuguaucuga

SEQ ID NO: 132542 - RNA, 1701 nt, Artificial Sequence; identical to SEQ ID NO: 132366
  derived and/or modified CDS sequence (opt3) from hemagglutinin__InfluenzaA__ADE29031

SEQ ID NO: 132543 - RNA, 1701 nt, Artificial Sequence
  derived and/or modified CDS sequence (opt3) from hemagglutinin__InfluenzaA__ADE29041
augaaggccauccuggugguccuccuuuacaccuucgcuacagcaaacgccgacacucugugcauuggcuaucacgcgaauaacagcacggauaccguugacacaguguuggagaaaaauguaacugugacccauuccgucaacuuacuggaagauaagcacaaugggaaacuauguaagcucagaggaguggcuccccugcaucuugguaaaugcaacauagccggcuggauccuggggaauccugagugugaaucuuugucaacagcaaguagcugguccuacauuguugagaccucuucgucagacaacggaacuugcuauccaggcgauuuuaucgacuacgaagaacucagggagcagcugagcaguguguccucuuucgaacgguuugagauuuucccgaagacaagcuccuggcccaaucacgauucaaacaagggugucaccgccgcuuguccucaugcaggggccaaaaguuuuuauaagaaucugaucuggcucgugaaaaagggaaacagcuacccaaaauuaucuaaguccuauauaaaugacaagggcaaagaaguacugguucuuuggggcauccaccaccccucaacgagcgcugaucaacagaguuuguaccagaacgccgacgcguacguguucgucgggacuucucgcuauuccaagaaauuuaagccugagauugcaauccgaccaaaagugcgugaucaggagggaagaaugaauuacuauuggacccugguggaacccggugacaagauuacauucgaggccacuggcaaccuagucguuccuagguacgcuuuugccauggagaaaaacgcagggagcggaaucauaauuucggauaccccagugcaugacugcaauacaaccugucaaacgccgaagggcgcuaucaacacuucucuccccuuccagaauauucacccuaucacaaucgguaagugcccaaaauauguaaaguccaccaaacugcggcuugccacugggcugcgcaacgugcccucaauucagaguagaggauuguuuggcgcgauagccggcuucaucgaagggggauggacagguauggucgacggcugguacggguaucaucaccagaaugaacaaggaagcggcuacgcagcugaucucaaguccacccagaacgccauugacgagaucacgaauaaagugaacucuguuauagagaagaugaauacccaguuuacagcuguggguaaggaguucaaccaccuggagaaaaggauugaaaauuuaaacaagaaagucgaugacggguuccuggauaucuggacuuacaaugccgagcuccuugugcuguuggaaaacgagcggacccuagacuaucaugauagcaauguaaagaaccuguacgagaaaguucgcucacagcucaagaacaaugcaaaggaaaucggcaacggauguuuugaguucuaucacaaaugcgacaauacauguauggaaagugugaagaacggcacuuacgauuauccuaaauacuccgaggaagccaagcugaaucgagaggagauugacggggucaaacuugaaagcaccagaaucuaucaaauucuggcuauauacucuacaguggcgucaaguuugguccucgugguuagccugggagcaaucuccuuuuggaugugcucuaacgguucguuacagugcaggauuuguaucuga

SEQ ID NO: 132544 - RNA, 1701 nt, Artificial Sequence; identical to SEQ ID NO: 132366
  derived and/or modified CDS sequence (opt3) from hemagglutinin__InfluenzaA__ADE29051

SEQ ID NO: 132545 - RNA, 1701 nt, Artificial Sequence
  derived and/or modified CDS sequence (opt3) from hemagglutinin__InfluenzaA__ADE29085
augaaggccauccuggugguccuccuuuacaccuucgcuacagcaaacgccgacacucugugcauuggcuaucacgcgaauaacagcacggauaccguugacacaguguuggagaaaaauguaacugugacccauuccgucaacuuacuggaagauaagcacaaugggaaacuauguaagcucagaggaguggcuccccugcaucuugguaaaugcaacauagccggcuggauccuggggaauccugagugugaaucuuugucaacagcaaguagcugguccuacauuguugagaccccaucuucggacaacggaacuugcuauccgggcgauuuuaucgacuacgaagaacucagggagcagcugucaagcgugaguuccuucgaacgguuugagauuuuccccaagacaucuagcuggccuaaucacgauuccaacaagggugucaccgccgcuuguccacaugcagaagccaaaucauuuuauaagaaucugaucuggcucgugaaaaaggggaacaguuaccccaaauuaagcaagucuuauauaaaugacaagggaaaagagguacugguucuuuggggcauccaccacccuuccacgucagcugaucaacagagcuuguaccagaacgccgacgcguacguguucgucggcaguucucgcuauuccaagacuuuuaaaccagagauugcaauccgacccaaggugcgugauagagaagggaggaugaauuacuauuggacccugguggagccuggagacaaaauuacauucgaagccacugguaaccuagucguuccacgguacgcuuuugccauggagcgcaacgcaggcagcgggaucauaauuucggauaccccggugcaugacugcaauacaaccugucagacgcccaagggagcuaucaacacuucucucccuuuccaaaauauucacccaaucacaaucggcaaaugccccaaguauguaaaguccaccaaacugagacuugccacuggucugaggaacauuccuucaauacagagucggggguuguuuggagcgaucgccggcuucauugaaggcggguggacaggaaugguggacgguugguacggcuaucaucaccagaaugagcaggggagcggauacgcagcugaucucaaguccacccaaaacgccaucgacgagauaacgaauaaagucaacucugugauugaaaagaugaauacccaguuuacagcuguuggcaaagaguucaaccaccuggaaaagcgcaucgagaauuuaaacaagaaaguggaugacgguuuccuggauaucuggacuuacaaugccgaacuccuuguccuguuggagaacgagcgaacccuagacuaucaugauagcaaugugaagaaccuguacgaaaaaguaagaucacagcucaagaacaaugcaaaagagauugggaacggcuguuuugaguucuaucacaagugcgacaauacauguauggagaguguuaagaacggaacuuacgauuauccaaaauacuccgaagaggccaagcugaauagggaggaaaucgacggcgugaaacuugagagcacccggauuuaucagauacuggcuaucuacucuacagucgcgucaaguuuggugcucgucgugagccugggggcaauuuccuuuuggaugugcucuaacggaucguuacaaugccguaucuguaucuga

SEQ ID NO: 132546 - RNA, 1701 nt, Artificial Sequence
  derived and/or modified CDS sequence (opt3) from hemagglutinin__InfluenzaA__ADE29095
augaaggccauccuggugguccuccuuuacaccuucgcuacagcaaacgccgacacucugugcauuggcuaucacgcgaauaacagcacggauaccguugacacaguguuggagaaaaauguaacugugacccauuccgucaacuuacuggaagauaagcacaaugggaaacuauguaagcucagaggaguggcuccccugcaucuugguaaaugcaacauagccggcuggauccuggggaauccugagugugaaucuuugucaacagcaaguagcugguccuacauuguugagaccccaucuucggacaacggaacuugcuauccgggcgauuuuaucgacuacgaggagcucagggagcagcugucaagcgugaguuccuucgaacgguuugagauuuuccccaagacaucuagcuggccuaaucacgauuccaacaagggugucaccgccgcuuguccacaugcaggggccaaaucauuuuauaagaaucugaucuggcucgugaaaaagggaaacaguuaccccaaauuaagcaagucuuauauaaaugacaagggcaaagaaguacugguucuuuggggcauccaccacccuuccacgucagcugaucaacagagcuuguaccagaacgccgacgcguacguguucgucgggaguucucgcuauuccaagacuuuuaaaccagagauugcaauccgacccaaggugcgugauagagagggaaggaugaauuacuauuggacccugguggaaccuggugacaaaauuacauucgaggccacuggcaaccuagucguuccacgguacgcuuuugccauggaacgcaacgcagggagcggaaucauaauuucggauaccccggugcaugacugcaauacaaccugucagacgcccaagggcgcuaucaacacuucucucccuuuccaaaauauucacccaaucacaaucgguaaaugccccaaguauguaaaguccaccaaacugagacuugccacugggcugaggaacauuccuucaauacagagucggggauuguuuggcgcgaucgccggcuucauugaagggggauggacagguaugguggacggcugguacggguaucaucaccagaaugaacagggaagcggcuacgcagcugaucucaaguccacccaaaacgccaucgacgagauaacgaauaaagucaacucugugauugagaagaugaauacccaguuuacagcuguugguaaagaguucaaccaccuggaaaagcgcaucgaaaauuuaaacaagaaaguggaugacggguuccuggauaucuggacuuacaaugccgagcuccuuguccuguuggaaaacgagcgaacccuagacuaucaugauagcaaugugaagaaccuguacgagaaaguaagaucacagcucaagaacaaugcaaaagaaauuggcaacggauguuuugaguucuaucacaagugcgacaauacauguauggaaaguguuaagaacggcacuuacgauuauccaaaauacuccgaggaagccaagcugaauagggaggagaucgacggggugaaacuugaaagcacccggauuuaucagauacuggcuaucuacucuacagucgcgucaaguuuggugcucgucgugagccugggagcaauuuccuuuuggaugugcucuaacgguucguuacaaugccguaucuguaucuga

SEQ ID NO: 132547 - RNA, 1701 nt, Artificial Sequence; identical to SEQ ID NO: 131636
  derived and/or modified CDS sequence (opt3) from hemagglutinin__InfluenzaA__ADE34191

SEQ ID NO: 132548 - RNA, 1701 nt, Artificial Sequence; identical to SEQ ID NO: 131636
  derived and/or modified CDS sequence (opt3) from hemagglutinin__InfluenzaA__ADE34202

SEQ ID NO: 132549 - RNA, 1701 nt, Artificial Sequence
  derived and/or modified CDS sequence (opt3) from hemagglutinin__InfluenzaA__ADE34213
augaagaccaucauugcccugagcuacauacucugccuuguguucgcucagaaacugcccggcaacgacaauuccacagcaacuuuguguuuagggcaccaugccgucccuaacggaacgaucguuaagaccauuacaaaugaucaaaucgaggugacuaacgcgaccgaacugguacagucuucaaguacaggugagauuugcgacagcccacaccagauccuagauggcgaaaauuguacccucauagacgcucugcuuggggauccgcagugcgacggauuucaaaacaaaaagugggaucuguucguggagagaaggaaagccuauuccaauuguuaccccuaugacgucccugauuacgcaucuuugcggucgcucguggccucaagcggcacucuggaauuuaacaaugagaguuucaacuggacagguguuacccagaaugggacguccucugcuugcauccgccgaagcaacaauuccuuuuucucacgucugaacuggcucacucauuuaaaguuuaaguauccagcacugaaugugaccaugcccaacaacgagcaguucgacaaacuuuacauuuggggaguccaccauccuggcacagauaaugaccagaucuuuuuguaugcccaagcuaguggcagaauuacugugagcaccaagaggucucagcagacaguaaucccaaacauagggucccggccccgcguuagaaauauuccuucaaggaucagcauuuacuggaccaucgugaaaccaggagauauccugcuaauuaacaguacggguaaucucauagccccgcggggcuacuucaagauccgcucugggaaauccagcauuaugcgaucggacgcgcccaucggaaaguguaacucugaaugcauaacuccuaauggcuccauuccaaacgacaagcccuuucagaaugucaacagaaucacauauggugcauguccuagguacgugaaacaaaauacccugaaacuugccacugggaugcggaacgugccagagaagcagacacguggaaucuucggcgcuauugccggcuuuaucgaaaaugggugggagggaauggucgaugguugguauggcuuccgccaccagaacucagaggggagaggacaagcagcugaccugaagaguacccaggccgcgauugaucagauaaauggcaaauugaacaggcucaucgguaagacgaacgaaaaauuccaccagauugagaaggaauuuagcgagguugaagggcggauccaagaccuggagaaguacguggaggauaccaaaaucgacuuaugguccuauaaugccgaacugcucguagcacuugagaaccagcauacaauugaucugacugacucugaaaugaauaaguuguucgagaaaaccaagaaacagcuacgagaaaacgcugaggauaugggcaauggaugcuuuaagauauaccacaagugugacaacgccugcaucggcagcauucgcaaugggacauaugaucaugacguguacagagacgaggcucugaacaauagguuccagaucaaaggagucgaacucaagucagguuacaaagauuggauucuguggaucaguuuugccauauccugcuuccuucuguguguggcauugcucggcuuuaucaugugggccugccaaaaggggaacauucgguguaauaucugcauuuga

SEQ ID NO: 132550 - RNA, 1701 nt, Artificial Sequence; identical to SEQ ID NO: 131636
  derived and/or modified CDS sequence (opt3) from hemagglutinin__InfluenzaA__ADE34224

SEQ ID NO: 132551 - RNA, 1701 nt, Artificial Sequence
  derived and/or modified CDS sequence (opt3) from hemagglutinin__InfluenzaA__ADE34235
augaagaccaucauugcccugagcuacauacucugccuuguguucgcucagaaacugcccggcaacgacaauuccacagcaacuuuguguuuagggcaccaugccgucccuaacggaacgaucguuaagaccauuacaaaugaucaaaucgaggugacuaacgcgaccgaacugguacagucuucaaguacaggugagauuugcgacagcccacaccagauccuagauggcaaaaauuguacccucauagacgcucugcuuggggauccgcagugcgacggauuucaaaacaagaaaugggaucuguucguggaaagauccaaggccuauucuaauuguuaccccuaugacgucccugauuacgcaucguugaggucacucguggccagcaguggcacucuggaguuuaacaaugaauccuucaacuggacagguguuacccaggacgggacgucuagcgcuugcauccggcgcuccaagaauagcuuuuucagucgacugaacuggcucacucauuuaaauuuuaaauauccagcacugaacgugaccaugcccaauaacgagcaguucgauaagcuguacauuuggggaguccaccauccuggcacagacaaagaucagaucuuuuuguaugcccaagcuagcggccguacuaccgugucuacaaagagaucccagcagaccgccauuccaaacaucgggucaaggccccggguacgcaauauaccuagcagaauuaguaucuacuggacgauuguuaaaccaggagacauccugcuaaucaacucuacugguaaucucauugcgccgaggggcuacuucaagauacgguccgggaagucaucgaucaugcgcucugacgcacccauuggaaaauguaacuccgagugcaucacaccuaauggcucaauaccaaacgauaagcccuuucagaaugugaaccgaauuaccuauggugccuguccuagauacgucaaacaaaauacucugaaacuugcuacagggaugaggaacgugccagaaaaacagacccggggaaucuucggcgccaucgcaggcuuuauugagaaugggugggaaggaaugguggacgguugguauggcuuccgucaccagaacagugaggggcgcggacaagcugccgaucuuaagagcacgcaggcggccaucgaccagauuaauggcaaauugaacagacucauagguaagaccaaugagaaguuccaccagaucgaaaaagaguuuuccgaagucgaggggaggauucaagaucuggaaaaguacguugaggacacaaaaaucgauuuauggucuuauaacgcagagcugcucguggcucuugaaaaccagcauacuaucgaccugaccgauagcgagaugaauaaguuguucgaaaagacaaagaagcagcuacgggagaacgccgaagacaugggcaauggaugcuuuaaaauuuaccacaagugugauaacgcuugcauaggcucaauccgaaaugggacuuaugaccaugacguauaccgcgaugaggcccugaacaauagauuccagauuaaaggaguggagcucaagagugguuacaaagacuggauccuguggauuuccuuugcaaucagcugcuuccuucugugugucgccuugcucggcuuuauaaugugggcuugccaaaaggggaacaucagguguaauauuugcaucuga

SEQ ID NO: 132552 - RNA, 1701 nt, Artificial Sequence; identical to SEQ ID NO: 131636
  derived and/or modified CDS sequence (opt3) from hemagglutinin__InfluenzaA__ADE34246

SEQ ID NO: 132553 - RNA, 1701 nt, Artificial Sequence; identical to SEQ ID NO: 131661
  derived and/or modified CDS sequence (opt3) from hemagglutinin__InfluenzaA__ADE34257

SEQ ID NO: 132554 - RNA, 1701 nt, Artificial Sequence
  derived and/or modified CDS sequence (opt3) from hemagglutinin__InfluenzaA__ADE34268
augaagaccaucauugcccugagcuacauacucugccuuguguucgcucagaaacugcccggcaacgacaauuccacagcaacuuuguguuuagggcaccaugccgucccuaacggaacgaucguuaagaccauuacaaaugaucaaaucgaggugacuaacgcgaccgaacugguacagucuucaaguacaggugagauuugcgacagcccacaccagauccuagauggcaaaaauuguacccucauagacgcucugcuuggggauccgcagugcgacggauuucaaaacaagaaaugggaucuguucguggaaagauccaaggccuauucuaauuguuaccccuaugaggucccugacuacgcaucguugaggucacucguggccagcaguggcacucuggaauuuaacaaugaguccuucaacuggacagguguuacccaggaugggacgucuagcgcuugcauccggcgcuccaagaauagcuuuuucagucgacugaacuggcucacucauuuaaauuuuaaauauccagcacugaacgugaccaugcccaauaacgagcaguucgacaagcuguacauuuggggaguccaccauccuggcacagauaaagaccagaucuuuuuguaugcccaagcuagcggccguauuacugugucuaccaagagaucccagcagacagccaucccaaacauagggucaaggccccggguacgcaauauuccuagcagaaucaguauuuacuggaccaucguuaaaccaggagauauccugcuaauuaacucuacggguaaucucauagcgccgaggggcuacuucaagauccgguccgggaagucaucgauuaugcgcucugacgcacccaucggaaaauguaacuccgaaugcauaacuccuaauggcucaauuccaaacgacaagcccuuucagaaugugaaccgaaucacauauggugccuguccuagauacgucaaacaaaauacccugaaacuugcuacugggaugaggaacgugccagagaagcagacacggggaaucuucggcgccauugcaggcuuuaucgaaaaugggugggagggaaugguggaugguugguauggcuuccgucaccagaacagugaggggcgcggacaagcugccgaccuuaagagcacccaggcggccauugaucagauaaauggcaaauugaacagacucaucgguaagacgaaugaaaaguuccaccagauugagaaagaauuuuccgaggucgaagggaggauccaagaccuggagaaguacguugaggauaccaaaaucgacuuauggucuuauaacgcagaacugcucguggcucuugagaaccagcauacaauugaucugacugacagcgaaaugaauaaguuguucgagaaaaccaagaagcagcuacgggaaaacgccgaggauaugggcaauggaugcuuuaaaauauaccacaagugugacaacgcuugcaucggcucaauucgaaaugggacauaugaucaugacguauaccgcgacgaggcccugaacaauagauuccagaucaaaggaguggaacucaagagugguuacaaagauuggauucuguggaucuccuuugcaauaagcugcuuccuucugugugucgccuugcucggcuuuaucaugugggcuugccaaaaggggaacauuagguguaauaucugcauuuga

SEQ ID NO: 132555 - RNA, 1701 nt, Artificial Sequence
  derived and/or modified CDS sequence (opt3) from hemagglutinin__InfluenzaA__ADE45499
augaaggccauccuggugguccuccuuuacaccuucgcuacagcaaacgccgacacucugugcauuggcuaucacgcgaauaacagcacggauaccguugacacaguguuggagaaaaauguaacugugacccauuccgucaacuuacuggaagauaagcacaaugggaaacuauguaagcucagaggaguggcuccccugcaucuugguaaaugcaacauagccggcuggauccuggggaauccugagugugaaucuuugucaacagcaaguagcugguccuacauuguugagaccucuucgucagacaacggaacuugcuauccaggcgauuuuaucgacuacgaagaacucagggagcagcugagcaguguguccucuuucaagcgguuugaaauuuucccgaagacaagcuccuggcccaaucacgauccuaacaaaggugucaccgccgcuuguccacaugcaggggccaagucauuuuauaaaaaucugaucuggcucgugaagaaaggaaacaguuaccccaaguuaagcaagucuuauauaaaugacaaaggcaaggagguacugguucuuuggggcauccaccacccuuccacgucagcugaucaacagagcuuguaccagaacgccgacgcguacguguucgucgggaccagucgcuauucuaaaaaguuuaaaccagaaauugcaauccgacccaaggugcgugaucaggagggaagaaugaauuacuauuggacucugguggagccuggugacaaaauuacauucgaagccacuggcaaccuagucguuccaagguacgcuuuugccauggagcggaacgcaggguccggaaucauaauuagcgauaccccggugcaugacugcaauacaaccugucaaacgcccaagggcgcuaucaacacuucgcucccuuuccagaauauucacccaaucacaaucgguaagugccccaaauauguaaagucuaccaaacugcgccuugccacugggcugagaaacgugccuuccauucagucaaggggauuguuuggcgcgauagccggcuucaucgaagggggauggacagguauggucgacggcugguacggguaucaucaccagaaugagcaaggaaguggcuacgcagcugaucucaagagcacccagaacgccauugacgaaaucacgaauaaagugaacuccguuauagagaagaugaauacccaguuuacagcuguggguaaggaguucaaccaccuggaaaaacggauugagaauuuaaacaagaaagucgaugacggguuccuggauaucuggacuuacaaugccgaacuccuugugcuguuggagaacgaacgcacccuagacuaucaugauucuaauguaaagaaccuguacgagaaaguucgaagccagcucaagaacaaugcaaaggagaucggcaacggauguuuugaguucuaucacaaaugcgacaauacauguauggagucagugaagaacggcacuuacgauuauccaaaauacagugaagaggccaagcugaauagagaagagauugacggggucaaacuugaguccaccaggaucuaucaaauucuggcuauauacagcacaguggcgucuucauugguccucgugguuagucugggagcaaucagcuuuuggaugugcuccaacgguucuuuacagugccggauuuguaucuga

SEQ ID NO: 132556 - RNA, 1701 nt, Artificial Sequence; identical to SEQ ID NO: 131515
  derived and/or modified CDS sequence (opt3) from hemagglutinin__InfluenzaA__ADE45501

SEQ ID NO: 132557 - RNA, 1701 nt, Artificial Sequence
  derived and/or modified CDS sequence (opt3) from hemagglutinin__InfluenzaA__ADE45503
augaaggccauccuggugguccuccuuuacaccuucgcuacagcaaacgccgacacucugugcauuggcuaucacgcgaauaacagcacggauaccguugacacaguguuggagaaaaauguaacugugacccauuccgucaacuuacuggaagauaagcacaaugggaaacuauguaagcucagaggaguggcuccccugcaucuugguaaaugcaacauagccggcuggauccuggggaauccugagugugaaucuuugucaacagcaaguagcugguccuacauuguugagaccucuucgucagacaacggaacuugcuauccaggcgauuuuaucgacuacgaggagcucagggagcagcugagcaguguguccucuuucgaacgguuugagauuuucccgaagacaagcuccuggcccaaucacgauccuaacaagggugucaccgccgcuuguccacaugcaggggccaaaucauuuuauaagaaucugaucuggcucgugaaaaagggaaacaguuaccccaaauuaagcaagucuuauauaaaugacaagggcaaagaaguacugguucuuuggggcauccaccacccuuccacgucagcugaucaacagagcuuguaccagaacgccgacgcguacguguucgucgggacuagccgcuauucuaagaaauuuaagccagagauugcaauccgacccaaagugcgugaucaggagggaagaaugaauuacuauuggacccugguggaaccuggugacaagauuacauucgaggccacuggcaaccuagucguuccaagguacgcuuuugccauggaacggaacgcaggguccggaaucauaauuagcgauaccccggugcaugacugcaauacaaccugucaaacgcccaaaggcgcuaucaacacuucgcucccuuuccagaauauucacccaaucacaaucgguaagugccccaaguauguaaaaucuaccaagcugcgccuugccacugggcugagaaacgugccuuccauucagucaaggggauuguuuggcgcgauagccggcuucaucgaagggggauggacagguauggucgacggcugguacggguaucaucaccagaaugaacaaggaaguggcuacgcagcugaucucaaaagcacccagaacgccauugacgagaucacgaauaaggugaacuccguuauagagaaaaugaauacccaguuuacagcuguggguaaggaguucaaccaccuggaaaagcggauugaaaauuuaaacaaaaaggucgaugacggguuccuggauaucuggacuuacaaugccgagcuccuugugcuguuggaaaacgagcgcacccuagacuaucaugauucuaauguaaagaaccuguacgagaagguucgaagccagcucaaaaacaaugcaaaggaaaucggcaacggauguuuugaguucuaucacaagugcgacaauacauguauggaaucagugaaaaacggcacuuacgauuauccaaaguacagugaggaagccaaacugaauagagaggagauugacggggucaaacuugaauccaccaggguguaucaaauccuggcuauuuacagcacagucgcgucuucauuggugcucguugugagucugggagcaauaaguuuuuggaugugcuccaacgguucuuuacagugccggaucuguauuuga

SEQ ID NO: 132558 - RNA, 1701 nt, Artificial Sequence; identical to SEQ ID NO: 130717
  derived and/or modified CDS sequence (opt3) from hemagglutinin__InfluenzaA__ADE45505

SEQ ID NO: 132559 - RNA, 1701 nt, Artificial Sequence; identical to SEQ ID NO: 131070
  derived and/or modified CDS sequence (opt3) from hemagglutinin__InfluenzaA__ADE45507

SEQ ID NO: 132560 - RNA, 1701 nt, Artificial Sequence; identical to SEQ ID NO: 131070
  derived and/or modified CDS sequence (opt3) from hemagglutinin__InfluenzaA__ADE45509

SEQ ID NO: 132561 - RNA, 1701 nt, Artificial Sequence; identical to SEQ ID NO: 131515
  derived and/or modified CDS sequence (opt3) from hemagglutinin__InfluenzaA__ADE45511

SEQ ID NO: 132562 - RNA, 1701 nt, Artificial Sequence
  derived and/or modified CDS sequence (opt3) from hemagglutinin__InfluenzaA__ADE45513
augaaggccauccuggugguccuccuuuacaccuucgcuacagcaaacgccgacacucugugcauuggcuaucacgcgaauaacagcacggauaccguugacacaguguuggagaaaaauguaacugugacccauuccgucaacuuacuggaagauaagcacaaugggaaacuauguaagcucagaggaguggcuccccugcaucuugguaaaugcaacauagccggcuggauccuggggaauccugagugugaaucuuugucaacagcaaguagcugguccuacauuguugagaccucuucgucagacaacggaacuugcuauccaggcgauuuuaucgacuacgaggagcucagggagcagcugagcaguguguccucuuucgaacgguuugagauuuucccgaagacaagcuccuggcccaaucacgauccuaacaagggugucaccgccgcuuguccacaugcaggggccaaaucauuuuauaagaaucugaucuggcucgugaaaaagggaaacaguuaccccaaauuaagcaagucuuauauaaaugacaagggcaaagaaguacugguucuuuggggcauccaccacccuuccacgucagcugaucaacagagcuuguaccagaacgccgacgcguacgcauucguggggaccagucgcuauucuaagaaauuuaagccagagauugccauccgacccaaaguccgugaucaggagggaagaauuaauuacuauuggacucugguggaaccuggugacaagaucauauucgaggcuacaggcaaccuaguggucccaagguacgccuuugcaauggaacggaacgcuggguccggaauuaucauuagcgauacuccggcccaugacugcaauaccacaugucaaacccccaaaggcgcgaucaacacgucgcucccuuuccagaauauccacccaauuacuauagguaagugccccaaguauguuaaaucuacaaagcugcgccuugccaccgggcugagaaacgugccuuccauccagucaaggggauuguuuggcgcaauugcuggcuucaucgaagggggauggacugguaugguagacggcugguacggguaucaucaccagaaugaacaaggaaguggcuacgccgcugaucucaaaagcacacagaacgccauagacgagauuaccaauaaggugaacuccgucaucgagaaaaugaauacgcaguuuaccgcaguggguaaggaguucaaccaccuggaaaagcggaucgaaaauuuaaacaaaaagguugaugacggguuccuggauauuuggacauacaaugccgagcuccuugugcuguuggaaaacgagcgcacucuagacuaucaugauucuaaugucaaaaaccuguacgagaaggugcgaagccagcucaaaaacaaugcuaaggaaaucggcaacggauguuuugaguucuaucacaagugcgacaauaccuguauggaaucaguaaagaacggcacauacgauuauccaaaguacagugaggaagcgaaacugaauagagaggagauugacgggguuaaacuugaauccacuaggauauaucaaauccuggcaauuuacagcaccguggccucuucauugguccucguggucagucugggagcuaucagcuuuuggaugugcuccaacgguucuuuacagugccggaucuguauuuga

SEQ ID NO: 132563 - RNA, 1701 nt, Artificial Sequence
  derived and/or modified CDS sequence (opt3) from hemagglutinin__InfluenzaA__ADE75388
augaaggccauccuggugguccuccuuuacaccuucgcuacagcaaacgccgacacucugugcauuggcuaucacgcgaauaacagcacggauaccguugacacaguguuggagaaaaauguaacugugacccauuccgucaacuuacuggaagauaagcacaaugggaaacuauguaagcucagaggaguggcuccccugcaucuugguaaaugcaacauagccggcuggauccuggggaauccugagugugaaucuuugucaacagcaaguagcugguccuacauuguugagaccucuucgucagaaaacggaacuugcuauccaggcgacuuuaucgauuacgaggagcucagggaacagcugagcaguguguccucuuucgagcgguuugaaauuuucccgaagacaagcuccuggcccaaucacgacucaaacaagggugucaccgccgcuuguccucaugcaggggccaaaaguuuuuauaagaaucugaucuggcucgugaaaaagggaaacagcuacccaaaauuaucuaaguccuauauaaaugauaagggcaaagagguacugguucuuuggggcauccaccaccccucaacgagcgcugaccaacagaguuuguaccagaacgccgaugcguacguguucgucgggacuucucgcuauuccaagaaauuuaagccugagauugcaauccgaccaaaagugcgugaccaggaaggaagaaugaauuacuauuggacccugguggagcccggugauaagauuacauucgaagccacuggcaaccuagucguuccuagguacgcuuuugccauggagcggaacgcagggagcggaaucauaauuucggacaccccagugcaugauugcaauacaaccugucaaacgccgaaaggcgcuaucaacacuucucuccccuuccagaauauucacccuaucacaaucgguaagugcccaaaguauguaaaauccaccaagcugcgccuugccacugggcugagaaacgugcccucaauucagaguaggggauuguuuggcgcgauagccggcuucaucgaagggggauggacagguauggucgacggcugguacggguaucaucaccagaaugagcaaggaagcggcuacgcagcugaccucaaauccacccagaacgccauugaugagaucacgaauaaggugaacucuguuauagaaaagaugaauacccaguuuacagcuguggguaaggaguucaaccaccuggaaaagcggauugagaauuuaaacaaaaaggucgacgauggguuccuggacaucuggacuuacaaugccgaacuccuugugcuguuggagaacgagcgcacccuagauuaucaugacagcaauguuaaaaaccuguacgaaaagguacgaucacagcucaaaaacaaugcaaaggagaucggcaacggauguuuugaguucuaucacaagugcgauaauacauguauggaaagugugaaaaacggcacuuacgacuauccuaaguacuccgaagaggccaaacugaauagagaggaaauugauggggucaaacuugagagcaccaggaucuaucaaauucuggcuauauacucuacaguggcgucaaguuugguccucgugguuagccugggagcaaucuccuuuuggaugugcucuaacgguucguuacagugccggauuuguaucuga

SEQ ID NO: 132564 - RNA, 1701 nt, Artificial Sequence; identical to SEQ ID NO: 130717
  derived and/or modified CDS sequence (opt3) from hemagglutinin__InfluenzaA__ADE75390

SEQ ID NO: 132565 - RNA, 1701 nt, Artificial Sequence; identical to SEQ ID NO: 130717
  derived and/or modified CDS sequence (opt3) from hemagglutinin__InfluenzaA__ADF10067

SEQ ID NO: 132566 - RNA, 1701 nt, Artificial Sequence; identical to SEQ ID NO: 130717
  derived and/or modified CDS sequence (opt3) from hemagglutinin__InfluenzaA__ADF10077

SEQ ID NO: 132567 - RNA, 1701 nt, Artificial Sequence
  derived and/or modified CDS sequence (opt3) from hemagglutinin__InfluenzaA__ADF10087
augaaggccauccuggugguccuccuuuacaccuucgcuacagcaaacgccgacacucugugcauuggcuaucacgcgaauaacagcacggauaccguugacacaguguuggagaaaaauguaacugugacccauuccgucaacuuacuggaagauaagcacaaugggaaacuauguaagcucagaggaguggcuccccugcaucuugguaaaugcaacauagccggcuggauccuggggaauccugagugugaaucuuugucaacagcaaguagcugguccuacauuguugagaccucuucgucagacaacggaacuugcuauccaggcgauuuuaucgacuacgaagaacucagggagcagcugagcaguguguccucuuucgaacgguuugagauuuucccgaagacaagcuccuggcccaaucacgauucaaacaagggugucaccgccgcuuguccucaugcaggggccaaaaguuuuuauaagaaucugaucuggcucgugaaaaagggaaacagcuacccaaaauuaucuaaguccuauauaaaugacaagggcaaagaaguacugguucuuuggggcauccaccaccccucaacgagcgcugaucaacagaguuuguaccagaacgccgacgcguacguguucgucgggacuucucgcuauuccaagaaauuuaagccugagauugcaauccgaccaaaagugcgugaucaggagggaagaaugaauuacuauuggacccugguggaacccggugacaagauuacauucgaggccacuggcaaccuagucguuccuagguacgcuuuugccaugaaacggaacgcagggagcggaaucauaauuucggauaccccagugcaugacugcaauacaaccugucaaacgccgaagggcgcuaucaacacuucucuccccuuccagaauauucacccuaucacaaucgguaagugcccaaaauauguaaaguccaccaaacugcgccuugccacugggcugagaaacgugcccucaauucagaguaggggauuguuuggcgcgauagccggcuucaucgaagggggauggacagguauggucgacggcugguacggguaucaucaccagaaugagcaaggaagcggcuacgcagcugaucucaaguccacccagaacgccauugacgaaaucacgaauaaagugaacucuguuauagagaagaugaauacccaguuuacagcuguggguaaggaguucaaccaccuggaaaaacggauugagaauuuaaacaagaaagucgaugacggguuccuggauaucuggacuuacaaugccgaacuccuugugcuguuggagaacgaacgcacccuagacuaucaugauagcaauguaaagaaccuguacgagaaaguucgaaaccagcucaagaauaacgcaaaggagaucggcaauggauguuuugaguucuaucacaaaugcgacaacacauguauggagucagugaagaauggcacuuacgauuauccuaaauacagugaagaggccaagcugaacagagaagagauugacggggucaaacuugaguccaccaggaucuaucaaauucuggcuauauacagcacaguggcgucuucauugguccucgugguuagucugggagcaaucagcuuuuggaugugcuccaaugguucuuuacagugccggauuuguaucuga

SEQ ID NO: 132568 - RNA, 1701 nt, Artificial Sequence
  derived and/or modified CDS sequence (opt3) from hemagglutinin__InfluenzaA__ADF10097
auggaggccauccuggugguccuccuuuacaccuucgcuacagcaaacgccgacacucugugcauuggcuaucacgcgaauaacagcacggauaccguugacacaguguuggaaaagaauguaacugugacccauuccgucaacuuacuggaggauaaacacaaugggaagcuauguaaacucagaggaguggcuccccugcaucuugguaagugcaacauagccggcuggauccuggggaauccugaaugugagucuuugucaacagcaaguagcugguccuacauuguugaaaccucuucgucagacaacggaacuugcuauccaggcgauuuuaucgacuacgaggagcucagggaacagcugagcaguguguccucuuucgagcgguuugaaauuuucccgaaaacaagcuccuggcccaaucacgauucaaacaagggugucaccgccgcuuguccucaugcaggggccaagaguuuuuauaaaaaucugaucuggcucgugaagaaaggaaacagcuacccaaaguuaucuaaauccuauauaaaugacaagggcaaggagguacugguucuuuggggcauccaccaccccucaacgagcgcugaucaacagaguuuguaccagaacgccgacgcguacguguucgucgggucuuccaaauauagcaagaaauuuaagccugagauugcaauccgcccaaaagugcgagaucaggaaggacguaugaauuacuauuggacucugguggagcccggugacaagauuaccuucgaagccacaggcaaccuagucguuccuagauacgcuuuugccauggagaggaacgcagggucgggaaucauaauuucugauacuccagugcaugacugcaauaccacaugucaaaccccgaaaggcgcuaucaacacgucccuccccuuccacaauauucauccuaucacuaucgguaagugcccaaaguauguaaaaucaacaaagcugcggcuugccaccgggcugcgcaacgugcccaguauucagagcagaggauuguuuggcgcgauagccggcuucaucgaagggggauggacugguauggucgacggcugguacggguaucaccaccagaaugagcagggauccggcuacgcagcugaucucaaaucuacacaaaacgccauugacgagaucaccaauaaggugaacagcguuauagaaaagaugaauacgcaguuuaccgcuguggguaaggaguucaaccaucuggaaaagaggauugagaauuuaaacaaaaaggucgaugacggguuccuggauaucuggacauacaaugccgaacuccuugugcuguuggagaacgagcggacucuagacuaucacgauucaaauguuaaaaaccuguacgaaaagguacgcagucagcucaaaaacaaugcaaaggagaucggcaacggauguuuugaguucuaucauaagugcgacaauaccuguauggaauccgugaaaaacggcacauacgauuauccuaaguacagcgaagaggccaaacugaaucgagaggaaauugacggggucaaacuugagucuacuaaaaucuaucagauucuggcuauauacucaaccguggcgaguagcuugguccucgugguuucccugggagcaaucucuuuuuggaugugcucgaacgguagcuuacaaugcagaauuuguaucuga

SEQ ID NO: 132569 - RNA, 1701 nt, Artificial Sequence
  derived and/or modified CDS sequence (opt3) from hemagglutinin__InfluenzaA__ADF10107
auggaggccauccuggugguccuccuuuacaccuucgcuacagcaaacgccgacacucugugcauuggcuaucacgcgaauaacagcacggauaccguugacacaguguuggaaaagaauguaacugugacccauuccgucaacuuacuggaggauaaacacaaugggaagcuauguaaacucagaggaguggcuccccugcaucuugguaagugcaacauagccggcuggauccuggggaauccugaaugugagucuuugucaacagcaaguagcugguccuacauuguugaaaccucuucgucagacaacggaacuugcuauccaggcgauuuuaucgacuacgaggagcucagggaacagcugagcaguguguccucuuucgagcgguuugaaauuuucccgaaaacaagcuccuggcccaaucacgauucaaacaagggugucaccgccgcuuguccucaugcaggggccaagaguuuuuauaaaaaucugaucuggcucgugaagaaaggaaacagcuacccaaaguuaucuaaauccuauauaaaugacaagggcaaggagguacugguucuuuggggcauccaccaucccccuacgucagcugaucaacagagcuuguaccagaacgccgacgcguacguguucgucgggaguucuaaauauuccaagaaauuuaagccagagauugcaauccgccccaaagugcgagaucaggaaggacguaugaauuacuauuggacucugguggagccuggugacaagauuaccuucgaagccacaggcaaccuagucguuccaagauacgcuuuugccauggagaggaacgcagggagcggaaucauaauuucggauacuccggcucacgacugcaauaccacaugucaaacccccaaaggcgccaucaacacgucucucccuuuccacaauauucauccaaucacuaucgguaagugccccaaguaugugaaauccacaaagcugcggcuugcgaccgggcugcgcaacguaccuucaauucagaguagaggauuguuuggcgccauagcaggcuucaucgaagggggauggacugguaugguggacggcugguacggguaucaccaccagaaugagcagggaagcggcuacgcugccgaucucaaauccacacaaaacgcuauugacgagaucaccaauaaggucaacucugugauagaaaagaugaauacgcaguuuaccgccguugguaaggaguucaaccaucuggaaaagaggauugagaauuuaaacaaaaagguggaugacggguuccuggauaucuggacauacaaugcagaacuccuuguccuguuggagaacgagcggacucuagacuaucacgauagcaaugugaaaaaccuguacgaaaagguacgcucacagcucaaaaacaaugccaaggagaucggcaacggauguuuugaguucuaucauaagugcgacaauaccuguauggaaaguguuaaaaacggcacauacgauuauccaaaguacuccgaagaggcuaaacugaaucgagaggaaauugacggggugaaacuugagagcacuaaaaucuaucagauucuggcgauauacucuaccgucgcaucaaguuuggugcucgucgugagccugggagccaucuccuuuuggaugugcucuaacgguucguuacaaugcagaauuuguaucuga

SEQ ID NO: 132570 - RNA, 1701 nt, Artificial Sequence; identical to SEQ ID NO: 130717
  derived and/or modified CDS sequence (opt3) from hemagglutinin__InfluenzaA__ADF10117

SEQ ID NO: 132571 - RNA, 1701 nt, Artificial Sequence; identical to SEQ ID NO: 132421
  derived and/or modified CDS sequence (opt3) from hemagglutinin__InfluenzaA__ADF10127

SEQ ID NO: 132572 - RNA, 1701 nt, Artificial Sequence; identical to SEQ ID NO: 130717
  derived and/or modified CDS sequence (opt3) from hemagglutinin__InfluenzaA__ADF10137

SEQ ID NO: 132573 - RNA, 1701 nt, Artificial Sequence
  derived and/or modified CDS sequence (opt3) from hemagglutinin__InfluenzaA__ADF10154
augaaggccauccuggugguccuccuuuacaccuucgcuacagcaaacgccgacacucugugcauuggcuaucacgcgaauaacagcacggauaccguugacacaguguuggagaaaaauguaacugugacccauuccgucaacuuacuggaagauaagcacaaugggaaacuauguaagcucagaggaguggcuccccugcaucuugguaaaugcaacauagccggcuggauccuggggaauccugagugugaaucuuugucaacagcaaguagcugguccuacauuguugagaccucuucgucagacaacggaacuugcuauccaggcgauuuuaucgacuacgaagaacucagggagcagcugagcaguguguccucuuucgaacgguuugagauuuucccgaagacaagcuccuggcccgaucacgacucaaauaagggugucaccgccgcuuguccucaugcaggggccaaaaguuuuuauaagaaccugaucuggcucgugaaaaagggaaauagcuacccaaaauuaucuaaguccuauauaaacgauaagggcaaagaaguacugguucuuuggggcauccaccaccccucaacgagcgcugaccaacagaguuuguaccagaaugccgaugcguacguguucgucgggacuucucgcuauuccaagaaauuuaagccugagauugcaauccgaccaaaagugcgugagcaggaaggaagaaugaacuacuauuggacccugguggagcccggugacaagauuacauucgaagccacuggcaaucuagucguuccuagguacgcuuuugccauggagcggaacgcagggagcggaaucauaauuucggauaccccagugcaugacugcaacacaaccugucaaacgccgaaaggcgcuaucaauacuucucuccccuuccagaacauucacccuaucacaaucgguaagugcccaaaguauguaaaauccaccaagcugcgccuugccacugggcugagaaaugugcccucaauucagaguaggggauuguuuggcgcgauagccggcuucaucgaagggggauggacagguauggucgacggcugguacggguaucaucaccagaacgagcaaggaagcggcuacgcagcugaucucaaauccacccagaaugccauugacgagaucacgaacaagguaaauucuguuauagagaaaaugaacacccaguuuacagcuguggguaaggaguucaaucaccuggaaaagcggauugagaacuuaaauaaaaaggucgaugacggguuccuggauaucuggacuuacaacgccgaacuccuugugcuguuggagaaugagcgcacccuagacuaucaugauagcaacgugaaaaaucuguacgaacgaguuagaucacagcucaagaacaacgcaaaagagaucggcaauggauguuuugaguucuaucacaagugcgacaacacauguauggaaagugugaagaauggcacuuacgauuauccuaaauacuccgaagaggccaagcugaacagggaggaaauugacggggucaaacuugagagcacccggaucuaucaaauucuggcuauauacucuacaguggcgucaaguuugguccucgugguuagccugggagcaaucuccuuuuggaugugcucuaaugguucguuacagugccguauuuguaucuga

SEQ ID NO: 132574 - RNA, 1701 nt, Artificial Sequence
  derived and/or modified CDS sequence (opt3) from hemagglutinin__InfluenzaA__ADF10174
augaaggccauccuggugguccuccuuuacaccuucgcuacagcaaacgccgacacucugugcauuggcuaucacgcgaauaacagcacggauaccguugacacaguguuggagaaaaauguaacugugacccauuccgucaacuuacuggaagauaagcacaaugggaaacuauguaagcucagaggaguggcuccccugcaucuugguaaaugcaacauagccggcuggauccuggggaauccugagugugaaucuuugucaacagcaaguagcugguccuacauuguugagaccucuucgucagacaacggaacuugcuauccaggcgauuuuaucgacuacgaagaacucagggagcagcugagcaguguguccucuuucgaacgguuugagauuuucccgaagacaagcuccuggcccaaucacgauucaaacaagggugucaccgccgcuuguccucaugcaggggccaaaaguuuuuauaagaaucugaucuggcucgugaaaaagggaaacagcuacccaaaauuaucuaaguccuauauaaaugacaagggcaaagaaguacugguucuuuggggcauccaccaccccucaacgagcgcugaucaacagaguuuguaccagaacgccgacgcguacguguucgucgggacuucucgcuauuccaagaaauuuaagccugagauugcaauccgaccaaaagugcgugagcaggaaggaagaaugaauuacuauuggacccugguggagcccggugauaagauuacauucgaagccacuggcaaccuagucguuccuagguacgcuuuugccauggagcggaacgcagggagcggaaucauaauuucggacaccccagugcaugauugcaauacaaccugucaaacgccgaaaggcgcuaucaacacuucucuccccuuccagaauauucacccuaucacaaucgguaagugcccaaaguauguaaaauccaccaagcugcgccuugccacugggcugagaaacgugcccucaauucagaguaggggauuguuuggcgcgauagccggcuucaucgaagggggauggacagguauggucgacggcugguacggguaucaucaccagaaugagcaaggaagcggcuacgcagcugaccucaaauccacccagaacgccauugaugagaucacgaauaaggugaacucuguuauagagaaaaugaauacccaguuuacagcuguggguaaggaguucaaccaccuggaaaagcggauugagaauuuaaacaaaaaggucgacgauggguuccuggacaucuggacuuacaaugccgaacuccuugugcuguuggagaacgagcgcacccuagauuaucaugacagcaauguuaaaaaccuguacgaacgaguaagaucacagcucaagaacaaugcaaaagagaucggcaacggauguuuugaguucuaucacaagugcgauaauacauguauggaaagugugaagaacggcacuuacgacuauccuaaauacuccgaagaggccaagcugaauagggaggaaauugauggggucaaacuugagagcacccggaucuaucaaauucuggcuauauacucuacaguggcgucaaguuugguccucgugguuagccugggagcaaucuccuuuuggaugugcucuaacgguucguuacagugccguauuuguaucuga

SEQ ID NO: 132575 - RNA, 1701 nt, Artificial Sequence; identical to SEQ ID NO: 132574
  derived and/or modified CDS sequence (opt3) from hemagglutinin__InfluenzaA__ADF10190

SEQ ID NO: 132576 - RNA, 1701 nt, Artificial Sequence; identical to SEQ ID NO: 132421
  derived and/or modified CDS sequence (opt3) from hemagglutinin__InfluenzaA__ADF10237

SEQ ID NO: 132577 - RNA, 1701 nt, Artificial Sequence; identical to SEQ ID NO: 132574
  derived and/or modified CDS sequence (opt3) from hemagglutinin__InfluenzaA__ADF10262

SEQ ID NO: 132578 - RNA, 1701 nt, Artificial Sequence
  derived and/or modified CDS sequence (opt3) from hemagglutinin__InfluenzaA__ADF10288
augaaggccauccuggugguccuccuuuacaccuucgcuacagcaaacgccgacacucugugcauuggcuaucacgcgaauaacagcacggauaccguugacacaguguuggagaaaaauguaacugugacccauuccgucaacuuacuggaagauaagcacaaugggaaacuauguaagcucagaggaguggcuccccugcaucuugguaaaugcaacauagccggcuggauccuggggaauccugagugugaaucuuugucaacagcaaguagcugguccuacauuguugagaccucuucgucagacaacggaacuugcuauccaggcgauuuuaucgacuacgaagaacucagggagcagcugagcaguguguccucuuucgaacgguuugagauuuucccgaagacaagcuccuggcccaaucacgauucaaacaagggugucaccgccgcuuguccucaugcaggggccaaaaguuuuuauaagaaucugaucuggcucgugaaaaagggaaacagcuacccaaaauuaucuaaguccuauauaaaugacaagggcaaagaaguacugguucuuuggggcauccaccaccccucaacgagcgcugaucaacagaguuuguaccagaacgccgacgcguacguguucgucgggacuucucgcuauuccaagaaauuuaagccugagauugcaauccgaccaaaagugcgugagcaggaaggaagaaugaauuacuauuggacccugguggagcccggugauaagauuacauucgaagccacuggcaaccuagucguuccuagguacgcuuuugccauggagcggaacgcagggagcggaaucauaauuucggacaccccagugcaugauugcaauacaaccugucaaacgccgaaaggcgcuaucaacacuucucuccccuuccagaauauucacccuaucacaaucgguaagugcccaaaguauguaaaauccaccaagcugcgccuugccacugggcugagaaacgugcccucaauucagaguaggggauuguuuggcgcgauagccggcuucaucgaagggggauggacagguauggucgacggcugguacggguaucaucaccagaaugagcaaggaagcggcuacgcagcugaccucaaauccacccagaacgccauugaugagaucacgaauaaggugaacucuguuauagagaaaaugaauacccaguuuacagcuguggguaaggaguucaaccaccuggaaaagcggauugagaauuuaaacaaaaaggucgacgauggguuccuggacaucuggacuuacaaugccgaacuccuugugcuguuggagaacgagcgcacccuagauuaucaugacagcaauguuaaaaaccuguacgaacgaguaagaucacagcucaagaacaaugcaaaagagaucggcaacggauguuuugaguucuaucacaagugcgauaauacauguauggaaagugugaagaacggcacuuacgacuauccuaaauacuccgaagaggccaagcugaauagggaggaaauugauggggucaaacuugagagcacccggaucuaucaaauucuggcuauauacucuacaguggcgucaaguuugguccucgugguuagccugggagcaaucuccuuuuggaugugcucuaacgguucguuacagugccguguguguauuuga

SEQ ID NO: 132579 - RNA, 1701 nt, Artificial Sequence; identical to SEQ ID NO: 132421
  derived and/or modified CDS sequence (opt3) from hemagglutinin__InfluenzaA__ADF10302

SEQ ID NO: 132580 - RNA, 1701 nt, Artificial Sequence; identical to SEQ ID NO: 132421
  derived and/or modified CDS sequence (opt3) from hemagglutinin__InfluenzaA__ADF10335

SEQ ID NO: 132581 - RNA, 1701 nt, Artificial Sequence; identical to SEQ ID NO: 132421
  derived and/or modified CDS sequence (opt3) from hemagglutinin__InfluenzaA__ADF10359

SEQ ID NO: 132582 - RNA, 1701 nt, Artificial Sequence; identical to SEQ ID NO: 132574
  derived and/or modified CDS sequence (opt3) from hemagglutinin__InfluenzaA__ADF10369

SEQ ID NO: 132583 - RNA, 1701 nt, Artificial Sequence; identical to SEQ ID NO: 132574
  derived and/or modified CDS sequence (opt3) from hemagglutinin__InfluenzaA__ADF10390

SEQ ID NO: 132584 - RNA, 1701 nt, Artificial Sequence; identical to SEQ ID NO: 132421
  derived and/or modified CDS sequence (opt3) from hemagglutinin__InfluenzaA__ADF10528

SEQ ID NO: 132585 - RNA, 1701 nt, Artificial Sequence; identical to SEQ ID NO: 132574
  derived and/or modified CDS sequence (opt3) from hemagglutinin__InfluenzaA__ADF10598

SEQ ID NO: 132586 - RNA, 1701 nt, Artificial Sequence; identical to SEQ ID NO: 132574
  derived and/or modified CDS sequence (opt3) from hemagglutinin__InfluenzaA__ADF10670

SEQ ID NO: 132587 - RNA, 1701 nt, Artificial Sequence; identical to SEQ ID NO: 132574
  derived and/or modified CDS sequence (opt3) from hemagglutinin__InfluenzaA__ADF10724

SEQ ID NO: 132588 - RNA, 1701 nt, Artificial Sequence; identical to SEQ ID NO: 132421
  derived and/or modified CDS sequence (opt3) from hemagglutinin__InfluenzaA__ADF10757

SEQ ID NO: 132589 - RNA, 1701 nt, Artificial Sequence
  derived and/or modified CDS sequence (opt3) from hemagglutinin__InfluenzaA__ADF10828
augaaggccauccuggugguccuccuuuacaccuucgcuacagcaaacgccgacacucugugcauuggcuaucacgcgaauaacagcacggauaccguugacacaguguuggagaaaaauguaacugugacccauuccgucaacuuacuggaagauaagcacaaugggaaacuauguaagcucagaggaguggcuccccugcaucuugguaaaugcaacauagccggcuggauccuggggaauccugagugugaaucuuugucaacagcaaguagcugguccuacauuguugagaccucuucgucagacaacggaacuugcuauccaggcgauuuuaucgacuacgaggagcucagggagcagcugagcaguguguccucuuucgaacgguuugagauuuucccgaagacaagcuccuggcccaaucacgauucaaacaagggugucaccgccgcuuguccucaugcaggggccaaaaguuuuuauaagaaucugaucuggcucgugaaaaagggaaacagcuacccaaaauuaucuaaguccuauauaaaugacaagggcaaagaaguacugguucuuuggggcauccaccaccccucaacgagcacugaucaacagaguuuguaccagaacgcugacgccuacguguucgucgggaccucucgcuauuccaagaaauuuaagccugagauugcgauccgaccaaaagugcgugaucaggagggaagaaugaauuacuauuggacacugguggaacccggugacaagauuacuuucgaggcaaccggcaaccuagucguuccuagguacgccuuugcuauggaacggaacgccgggagcggaaucauaauuucggauacaccagugcaugacugcaauaccacgugucaaacuccgaaaggcgcaaucaacacaucucuccccuuccagaauauucacccuaucaccaucgguaagugcccaaaguauguaaaauccacuaagcugcgccuugcuacagggcugagaaacgugcccucaauucagaguaggggauuguuuggcgccauagcgggcuucaucgaagggggauggaccgguauggucgacggcugguacggguaucaucaccagaaugaacaaggaagcggcuacgccgcagaucucaaauccacgcagaacgcuauugacaagaucaccaauaaagugaacucuguuauagagaagaugaauacacaguuuacugccguggguaaggaguucaaccaccuggaaaaacggauugagaauuuaaacaagaaagucgaugacggguuccuggauaucuggaccuacaaugcugaacuccuugugcuguuggagaacgaacgcacacuagacuaucaugauagcaauguaaagaaccuguacgagaaaguucgaucacagcucaagaacaaugccaaggagaucggcaacggauguuuugaguucuaucacaaaugcgacaauacuuguauggaaagugugaagaacggcaccuacgauuauccuaaauacuccgaagaggcaaagcugaauagagaagagauugacggggucaaacuugagagcacaaggaucuaucaaauucuggccauauacucuaccguggcuucaaguuugguccucgugguuagccugggagcgaucuccuuuuggaugugcucuaacgguucguuacagugccggauuuguaucuga

SEQ ID NO: 132590 - RNA, 1701 nt, Artificial Sequence; identical to SEQ ID NO: 130717
  derived and/or modified CDS sequence (opt3) from hemagglutinin__InfluenzaA__ADF10874

SEQ ID NO: 132591 - RNA, 1701 nt, Artificial Sequence; identical to SEQ ID NO: 131340
  derived and/or modified CDS sequence (opt3) from hemagglutinin__InfluenzaA__ADF10929

SEQ ID NO: 132592 - RNA, 1701 nt, Artificial Sequence; identical to SEQ ID NO: 131340
  derived and/or modified CDS sequence (opt3) from hemagglutinin__InfluenzaA__ADF10996

SEQ ID NO: 132593 - RNA, 1701 nt, Artificial Sequence; identical to SEQ ID NO: 130717
  derived and/or modified CDS sequence (opt3) from hemagglutinin__InfluenzaA__ADF27367

SEQ ID NO: 132594 - RNA, 1701 nt, Artificial Sequence; identical to SEQ ID NO: 130717
  derived and/or modified CDS sequence (opt3) from hemagglutinin__InfluenzaA__ADF27369

SEQ ID NO: 132595 - RNA, 1701 nt, Artificial Sequence
  derived and/or modified CDS sequence (opt3) from hemagglutinin__InfluenzaA__ADF27370
augaaggccauccuggugauucuccuuuacaccuucgcuacagcaaacgccgacacucugugcauaggcuaucacgcgaauaacagcacggauaccgucgacacaguuuuggagaaaaaugugacuguaacccauuccgugaacuuacuggaagauaagcacaaugggaaacuauguaagcucagaggagucgcuccccugcaucuugguaaaugcaacaucgccggcuggauucuggggaauccugagugugaaucuuugucaacagcaaguagcugguccuacaucguggagaccucuucgucagacaacggaacuugcuauccaggcgauuuuauugacuacgaggagcucagggagcagcugagcaguguuuccucuuucgaacgguuugagaucuucccgaagacaagcuccuggcccaaucacgauucaaacaagggugugaccgccgcuuguccucaugcaggggccaaaaguuuuuauaagaaucugauauggcucgucaaaaagggaaacagcuacccaaaauuaucuaaguccuauaucaaugacaagggcaaagaagugcugguacuuuggggcauucaccaccccucaacgagcgcugaucaacagaguuuguaccagaacgccgacgcguacguucugguggggacuucucgcuauuccaagaaauucaagccugagaucgcaauucgaccaaaaguccgugaucaggagggaagaaugaauuacuauuggacccuaguggaacccggugacaagaucacauuugaggccacuggcaaccucguggucccuagguacgcuuucgccauggaacggaacgcagggagcggaauaauuaucucggauaccccaguucaugacugcaauacaaccugucaaacgccgaaaggcgcuauuaacacuucucugcccuuucagaauauccacccuaucacaauugguaagugcccaaaguaugugaaauccaccaaacuucgccuggccacuggguugagaaacguacccucaauacagaguaggggacucuucggcgcgaucgccggcuuuauugaagggggauggacagguaugguggacggcugguacggguaucaucaccagaaugaacaaggaagcggcuacgcagcugaucugaaguccacccagaacgccaucgacaagauaacgaauaaagucaacucugugauugagaagaugaauacccaguucacagcuguugguaaggaguuuaaccacuuagaaaaacggaucgagaaucugaacaagaaaguggaugacggguuccucgauaucuggacuuacaaugccgaacuucuggucuugcuagagaacgaacgcacccuggacuaucaugauagcaaugugaagaaccucuacgagaaaguacgaucacagcugaagaacaaugcaaaggagauuggcaacggauguuucgaauuuuaucacaaaugcgacaauacauguauggagaguguuaagaacggcacuuacgauuauccuaaauacuccgaagaggccaaacuuaauagagaagagaucgacggggugaagcuggagagcaccaggauuuaucaaauauuggcuaucuacucuacagucgcgucaagucucgugcuggucgugagcuuaggagcaauuuccuucuggaugugcucuaacgguucgcugcagugccggaucuguaucuga

SEQ ID NO: 132596 - RNA, 1701 nt, Artificial Sequence; identical to SEQ ID NO: 131889
  derived and/or modified CDS sequence (opt3) from hemagglutinin__InfluenzaA__ADF27371

SEQ ID NO: 132597 - RNA, 1701 nt, Artificial Sequence
  derived and/or modified CDS sequence (opt3) from hemagglutinin__InfluenzaA__ADF27372
augaaggccauccuggugguccuccuuuacaccuucgcuacagcaaacgccgacacucugugcauuggcuaucacacgaauaacagcaccgauacaguugacacuguguuggagaaaaauguaaccgugacacauuccgucaacuuacuggaagauaagcacaaugggaaacuauguaagcucagaggaguggcgccccugcaucuugguaaaugcaacauagcuggcuggauccuggggaauccugagugugaaucuuugucaaccgccaguagcugguccuacauuguugagacuucuucgucagacaacggaacaugcuauccaggcgauuuuaucgacuacgaggagcucagggagcagcugagcaguguguccucuuucgaacgguuugagauuuucccgaagaccagcuccuggcccaaucacgauucaaacaagggugucacggcagccuguccucaugcuggggcaaaaaguuuuuauaagaaucugaucuggcucgugaaaaagggaaacagcuacccaaaauuaucuaaguccuauauaaaugacaagggcaaagaaguacugguucuuuggggcauccaccaccccucaacuagcgccgaucaacagaguuuguaccagaacgcugacgccuacguguucgucgggaccucucgcuauuccaagaaauuuaagccugagauugcgauccgaccaaaagugcgugaucaggagggaagaaugaauuacuauuggacacugguggaacccggugacaagauuacuuucgaggcaaccggcaaccuagucguuccuagguacgccuuugcuauggaacggaacgccgggagcggaaucauaauuucggauacaccagugcaugacugcaauaccacgugucaaacuccgaaaggcgcaaucaacacaucucuccccuuccagaauauucacccuaucaccaucgguaagugcccaaaguauguaaaauccacuaagcugcgccuugcuacagggcugagaaacgugcccucaauucagaguaggggauuguuuggcgccauagcgggcuucaucgaagggggauggaccgguauggucgacggcugguacggguaucaucaccagaaugaacaaggaagcggcuacgccgcagaucucaaauccacgcagaacgcuauugacaagaucaccaauaaagugaacucuguuauagagaagaugaauacacaguuuacugccguggguaaggaguucaaccaccuggaaaaacggauugagaauuuaaacaagaaagucgaugacggguuccuggauaucuggaccuacaaugcugaacuccuugugcuguuggagaacgaacgcacacuagacuaucaugauagcaauguaaagaaccuguacgagaaaguucgaucacagcucaagaacaaugccaaggagaucggcaacggauguuuugaguucuaucacaaaugcgacaauacuuguauggaaagugugaagaacggcaccuacgauuauccuaaauacuccgaagaggcaaagcugaauagagaagagauugacggggucaaacuugagagcacaaggaucuaucaaauucuggccauauacucuaccguggcuucaaguuugguccucgugguuagccugggagcgaucuccuuuuggaugugcucuaacgguucguuacagugccggauuuguaucuga

SEQ ID NO: 132598 - RNA, 1701 nt, Artificial Sequence
  derived and/or modified CDS sequence (opt3) from hemagglutinin__InfluenzaA__ADF27373
auggaggccauccuggugguccuccuuuacaccuucgcuacagcaaacgccgacacucugugcauuggcuaucacgcgaauaacagcacggauaccguugacacaguguuggaaaagaauguaacugugacccauuccgucaacuuacuggaggauaaacacaaugggaagcuauguaaacucagaggaguggcuccccugcaucuugguaagugcaacauagccggcuggauccuggggaauccugaaugugagucuuugucaacagcaaguagcugguccuacauuguugaaaccucuucgucagacaacggaacuugcuauccaggcgauuuuaucgacuacgaggagcucauugaacagcugagcaguguguccucuuucgagagguuugaaaucuucccgaaaacaagcuccuggcccaaucacgauucaaacaagggugucaccgccgcuuguccucaugcaggggccaagaguuuuuauaaaaaucugauauggcucgugaagaaaggaaacagcuacccaaaguuaucuaaauccuauaucaaugacaagggcaaggagguacugguucuuuggggcauucaccaccccucaacgagcgcugaucaacagaguuuguaccagaacgccgacgcguacguguucgucgggucuucccgguauagcaaaaaguuuaaaccugagaucgcaauucgcccaaaggugcgagaucaggaaggacguaugaauuacuauuggacucugguggagcccggugacaaaaucaccuucgaagccacaggcaaccuagucguuccuagauacgcuuuugccauggagaggaacgcagggucgggaauaauuaucucugauacuccagugcaugacugcaauaccacaugucaaaccccgaagggcgcuauuaacacgucccuccccuuccacaauauccauccuaucacuauugguaaaugcccaaaguauguaaagucaacaaaacugcggcuugccaccgggcugcgcaacgugcccaguauacagacuagaggauuguuuggcgcgaucgccggcuucauugaagggggauggacagguauggucgacggcugguacggguaucaccaccagaaugagcagggaagcggcuacgcagcugaucucaaguccacccaaaacgccaucgacgagauaacgaauaaagugaacucuguuauugaaaagaugaauacccaguuuacagcuguggguaaagaguucaaccaucuggaaaagaggaucgagaauuuaaacaagaaagucgaugacggguuccuggauaucuggacuuacaaugccgaacuccuugugcuguuggagaacgagcggacccuagacuaucacgauagcaauguaaagaaccuguacgaaaaaguucgcucacagcucaagaacaaugcaaaagagauuggcaacggauguuuugaguucuaucauaagugcgacaauacauguauggaaagugugaagaacggcacuuacgauuauccuaaauacuccgaagaggccaagcugaaucgagaggaaaucgacggggucaaacuugagagcaccagaauuuaucagauacuggcuaucuacucuacaguggcgucaaguuugguccucgugguuagccugggagcaauuuccuuuuggaugugcucuaacgguucguuacaaugcaggaucuguaucuga

SEQ ID NO: 132599 - RNA, 1701 nt, Artificial Sequence; identical to SEQ ID NO: 130959
  derived and/or modified CDS sequence (opt3) from hemagglutinin__InfluenzaA__ADF27374

SEQ ID NO: 132600 - RNA, 1701 nt, Artificial Sequence
  derived and/or modified CDS sequence (opt3) from hemagglutinin__InfluenzaA__ADF27375
auggaggccauccuggugguccuccuuuacaccuucgcuacagcaaacgccgacacucugugcauuggcuaucacgcgaauaacagcacggauaccguugacacaguguuggaaaagaauguaacugugacccauuccgucaacuuacuggaggauaaacacaaugggaagcuauguaaacucagaggaguggcuccccugcaucuugguaagugcaacauagccggcuggauccuggggaauccugaaugugagucuuugucaacagcaaguagcugguccuacauuguugaaaccucuucgucagacaacggaacuugcuauccaggcgauuuuaucgacuacgaggagcucagggaacagcugagcaguguguccucuuucgagcgguuugaaauuuucccgaaaacaagcuccuggcccaaucacgauucaaacaagggugucaccgccgcuuguccucaugcaggggccaagaguuuuuauaaaaaucugaucuggcucgugaagaaaggaaacagcuacccaaaguuaucuaaauccuauauaaaugacaagggcaaggagguacugguucuuuggggcauccaccaccccucaacgagcgcugaucaacagaguuuguaccagaacgccgacgcguacguguucgucgggucuucccgcuauagcaaaaaguuuaaaccugagauugcaauccgaccaaaggugcgugaucaggaaggaagaaugaauuacuauuggacucugguggagcccggugacaaaauuaccuucgaagccacaggcaaccuagucguuccuagguacgcuuuugccauggagcggaacgcagggucgggaaucauaauuucugauacuccagugcaugacugcaauaccacaugucaaaccccgaagggcgcuaucaacacgucccuccccuuccacaauauucauccuaucacuaucgguaaaugcccaaaguauguaaagucaacaaaacugcgccuugccaccgggcugagaaacgugcccaguauucagagcaggggauuguuuggcgcgauagccggcuucaucgaagggggauggacugguauggucgacggcugguacggguaucaccaccagaaugagcagggauccggcuacgcagcugaucaaaagucuacacagaacgccauugacgagaucaccaauaaaauaaacagcgugauugaaaagaugaauacgcaguuuaccgcuguugguaaagaguucaaccaucucgaaaagcggaucgagaaucugaacaagaaaguggaugacggguucuuagauaucuggacauacaaugccgaacugcucguccuucuggagaacgagcgcacuuuggacuaucacgauucaaaugugaagaaccuauacgaaaaaguacgaagucagcugaagaacaaugcaaaagagauuggcaacggauguuuugaguucuaucauaagugcgacaauaccuguauggaauccguuaagaacggcacauacgauuauccuaaauacagcgaagaggccaagcucaauagagaggaaaucgacggggugaaacuggagucuacuaggauuuaucaaauacuugcuaucuacucaaccgucgcgaguagccugguguuggucgugucccucggagcaauuucuuuuuggaugugcucgaacgguagccugcagugccggaucuguaucuga

SEQ ID NO: 132601 - RNA, 1701 nt, Artificial Sequence
  derived and/or modified CDS sequence (opt3) from hemagglutinin__InfluenzaA__ADF27376
augaaggccauccuggugguccuccuuuacaccuucguuacagcuaacgcagacacucugugcauuggcuaucacgccaauaacagcacggauaccguggacacaguauuggagaaaaaugugacugucacccauuccgugaacuuacuggaagauaagcacaaugggaaacuauguaagcucagaggaguugcgccccugcaucuugguaaaugcaacauagcuggcuggauccuggggaauccugagugugaaucuuugucaacagccaguagcugguccuacauuguggagaccucuaacucggacaauggaacuugcuauccaggcgauuuuaucgacuacgaagaacucagggagcagcugucaagcgucaguuccuucgaacgguuugagauuuucccgaagacaucuagcuggcccaaccacgauuccaauaagggugugaccgcagccuguccucaugcuggggcaaaaucauuuuauaagaaccugaucuggcucguuaaaaagggaaauaguuacccaaaauuaagcaagucuuauauaaacgacaagggcaaagaaguacuggugcuuuggggcauccaccaccccuccacgucagccgaucaacagagcuuguaccagaaugcugacgccuacgucuucguggggaccagucgcuauucuaagaaauuuaagccugagauugagauccgaccaaaagugcgugaucaggaaggaagaaugaacuacuauuggacucuggucgagcccggugacaagauuacauucgaagcgacuggcaaccuaguugugccuagguacgcauuugccauggagcggaaugcuggguccggaaucauaauuagcgauaccccaguacaugacugcaacacaaccugucaaacgccgaaaggcgccaucaauacuucgcuccccuuccagaacauucacccuaucacaaucgguaagugcccaaaguaugugaaaucuaccaagcugcgccuugcaacugggcugagaaauguccccuccauucagucaaggggauuguuuggcgcuauagccggcuucaucgaagggggauggacagguaugguggacggcugguacggguaucaucaccagaacgagcaaggaaguggcuacgcggccgaucucaaaagcacccagaaugcaauugacaagaucacgaacaaaguuaauuccgugauagagaagaugaacacccaguuuacagcugucgguaaggaguucaaucaccuggagaaacggauugaaaacuuaaauaagaaaguggaugacggguuccuggauaucuggacuuacaacgccgagcuccuuguacuguuggaaaaugagcgcacccuagacuaucaugauucuaacguuaagaaccuguacgagaaagugcgaagccagcucaagaauaacgcuaaggaaaucggcaauggauguuuugaguucuaucacaaaugcgacaacacauguauggaaucagucaagaauggcacuuacgauuauccuaaauacagugaggaagccaagcugaacagagaggagauugacggggugaaacuugaauccaccaggaucuaucaaauucuggcaauauacagcacagucgccucuucauuggugcucguugugagucugggagcuaucagcuuuuggaugugcuccaaugguucuuuacagugccggauuuguaucuga

SEQ ID NO: 132602 - RNA, 1701 nt, Artificial Sequence
  derived and/or modified CDS sequence (opt3) from hemagglutinin__InfluenzaA__ADF27378
augaaggccauccuggugguccuccuuuacaccuucguuacagcuaacgcagacacucugugcauuggcuaucacgccaauaacagcacggauaccguggacacaguauuggagaaaaaugugacugucacccauuccgugaacuuacuggaagauaagcacaaugggaaacuauguaagcucagaggaguugcgccccugcaucuugguaaaugcaacauagcuggcuggauccuggggaauccugagugugaaucuuugucaacagccaguagcugguccuacauuguggagaccucuaacucggacaauggaacuugcuauccaggcgauuuuaucgacuacgaggagcucagggagcagcugucaagcgucaguuccuucgaacgguuugagauuuucccgaagacaucuagcuggcccaaccacgauuccaauaagggugugaccgcagccuguccucaugcuggggcaaaaucauuuuauaagaaccugaucuggcucguuaaaaagggaaauaguuacccaaaauuaagcaagucuuauauaaacgacaagggcaaagaaguacuggugcuuuggggcauccaccaccccuccacgucagccgaucaacagagcuuguaccagaaugcugacgccuacgucuucguggggaccagucgcuauucuaagaaauuuaagccugagauugcgauccgaccaaaagugcgugaucaggagggaagaaugaacuacuauuggacucuggucgaacccggugacaagauuacauucgaggcaacuggcaaccuaguugugccuagguacgccuuugcuauggaacggaaugccggguccggaaucauaauuagcgauaccccaguacaugacugcaacacaaccugucaaacgccgaaaggcgcaaucaauacuucgcuccccuuccagaacauucacccuaucacaaucgguaagugcccaaaguaugugaaaucuaccaagcugcgccuugcuacugggcugagaaauguccccuccauucagucaaggggauuguuuggcgccauagcgggcuucaucgaagggggauggacagguaugguggacggcugguacggguaucaucaccagaacgaacaaggaaguggcuacgccgcagaucucaaaagcacccagaaugcuauugacaagaucacgaacaaaguuaauuccgugauagagaagaugaacacccaguuuacagccgucgguaaggaguucaaucaccuggaaaaacggauugagaacuuaaauaagaaaguggaugacggguuccuggauaucuggacuuacaacgcugaacuccuuguacuguuggagaaugaacgcacccuagacuaucaugauucuaacguuaagaaccuguacgagaaagugcgaagccagcucaagaauaacgccaaggagaucggcaauggauguuuugaguucuaucacaaaugcgacaacacauguauggaaucagucaagaauggcacuuacgauuauccuaaauacagugaagaggcaaagcugaacagagaagagauugacggggugaaacuugaguccaccaggaucuaucaaauucuggccauauacagcacagucgcuucuucauuggugcucguugugagucugggagcgaucagcuuuuggaugugcuccaaugguucuuuacagugccggauuuguaucuga

SEQ ID NO: 132603 - RNA, 1701 nt, Artificial Sequence
  derived and/or modified CDS sequence (opt3) from hemagglutinin__InfluenzaA__ADF27389
augaaggccauccuggugguccuccuuuacaccuucgcuacagcaaacgccgacacucugugcauuggcuaucacgcgaauaacagcacggauaccguugacacaguguuggagaaaaauguaacugugacccauuccgucaacuuacuggaagauaagcacaaugggaaacuauguaagcucagaggaguggcuccccugcaucuugguaaaugcaacauagccggcuggauccuggggaauccugagugugaaucuuugucaacagcaaguagcugguccuacauuguugagaccucuucgucagacaacggaacuugcuauccaggcgauuuuaucgacuacgaggagcucagggagcagcugagcaguguguccucuuucgaacgguuugagauuuucccgaagacaagcuccuggcccaaucacgauucaaacaagggugucaccgccgcuuguccucaugcaggggccaaaaguuuuuauaagaaucugaucuggcucgugaaaaagggaaacagcuacccaaaauuaucuaaguccuauauaaaugacaagggcaaagaaguacugguucuuuggggcauccaccaccccucaacgagcgcugaucaacagaguuuguaccagaacgccgacgcguacguguucgucgggacuucucgcuauuccaagaaauuuaagccugagauugcaauccgaccaaaagugcgugaucaggagggaagaaugaauuacuauuggacccugguggaacccggugacaagauuacauucgaggccacuggcaaccuagucguuccuagguacgcuuuugccauggaacggaacgcagggagcggaaucauaaccucggauacaccagugcaugacugcaauaccacgugucaaacuccgaaaggcgcuauuaacacaucucuccccuuccagaauauccacccuauuaccaucgguaagugcccaaaguauguaaaauccacuaagcugcgccuugccacagggcugagaaacgugcccucaauccagaguaggggauuguuuggcgcgauugccggcuucauagaagggggauggaccgguauggucgacggcugguacggguaucaucaccagaaugaacaaggaagcggcuacgcagcugaucucaaauccacgcagaacgccaucgacgagauuaccaauaaggugaacucuguuaucgagaaaaugaauacacaguuuacugcuguggguaaggaguucaaccaccuggaaaagcggauagaaaauuuaaacaaaaaggucgaugacggguuccuggauauuuggaccuacaaugccgagcuccuugugcuguuggaaaacgagcgcacacuagacuaucaugauagcaauguaaagaaccuguacgagaagguucgaucacagcucaaaaacaaugcaaaggaaaucggcaacggauguuuugaguucuaucacaagugcgacaauacuuguauggaaagugugaaaaacggcaccuacgauuauccuaaguacuccgaggaagccaaacugaauagagaggagaucgacggggucaaacuugaaagcacaaggauuuaucaaauccuggcuauuuacucuaccguggcgucaaguuugguccucgugguuagccugggagcaauauccuuuuggaugugcucuaacgguucguuacagugccggaucuguauuuga

SEQ ID NO: 132604 - RNA, 1701 nt, Artificial Sequence
  derived and/or modified CDS sequence (opt3) from hemagglutinin__InfluenzaA__ADF27399
augaaggccauccuggugguccuccuuuacaccuucgcuacagcaaacgccgacacucugugcauuggcuaucacgcgaauaacagcacggauaccguugacacaguguuggagaaaaauguaacugugacccauuccgucaacuuacuggaagauaagcacaaugggaaacuauguaagcucagaggaguggcuccccugcaucuugguaaaugcaacauagccggcuggauccuggggaauccugagugugaaucuuugucaacagcaaguagcugguccuacauuguugagaccucuucgucagacaacggaacuugcuauccaggcgauuuuaucgacuacgaagaacucagggagcagcugagcaguguguccucuuucgaacgguuugagauuuucccgaagacaagcuccuggcccaaucacgauucaaacaagggugucaccgccgcuuguccucaugcaggggccaaaaguuuuuauaagaaucugaucuggcucgugaaaaagggaaacagcuacccaaaauuaucuaaguccuauauaaaugacaagggcaaagaaguacugguucuuuggggcauccaccaccccucaacgagcgcugaucaacagaguuuguaccagaacgccgacgcguacguguucgucgggacuucucgcuauuccaagaaauuuaagccugagauugcaauccgaccaaaagugcgugaucaggagggaagaaugaauuacuauuggacccugguggaacccggugacaagauuacauucgaggccacuggcaaccuagucguuccuagguacgcuuuugccauggaacggaacgcagggagcggaaucauaauuucggauaccccagugcaugacugcaauacaaccugucaaacgccgaaaggcgcuaucaacacuucucuccccuuccagaauauucacccuaucacaaucggugagugcccaaaguauguaaaguccaccaaacugcgccuugccacugggcugagaaacgugcccucaauucagaguaggggauuguuuggcgcgauagccggcuucaucgaagggggauggacagguauggucgacggcugguacggguaucaucaccagaaugagcaaggaagcggcuacgcagcugaucucaaguccacccagaacgccauugacgagaucacgaauaaagugaacucuguuauagaaaagaugaauacccaguuuacagcuguggguaaagaguucaaccaccuggaaaagcggauugagaauuuaaacaagaaagucgaugacggguuccuggauaucuggacuuacaaugccgaacuccuugugcuguuggagaacgagcgcacccuagacuaucaugauagcaauguaaagaaccuguacgaaaaaguucgaucacagcucaagaacaaugcaaaagagaucggcaacggauguuuugaguucuaucacaagugcgacaauacauguauggagagugugaagaacggcacuuacgauuauccuaaauacuccgaagaggccaagcugaauagagaggaaauugacggggucaaacuugagagcaccaggaucuaucaaauucuggcuauauacucuacaguggcgucaaguuugguccucgugguuagccugggagcaaucuccuuuuggaugugcucuaacgguucguuacagugccggauuuguaucuga

SEQ ID NO: 132605 - RNA, 1701 nt, Artificial Sequence; identical to SEQ ID NO: 131881
  derived and/or modified CDS sequence (opt3) from hemagglutinin__InfluenzaA__ADF27409

SEQ ID NO: 132606 - RNA, 1701 nt, Artificial Sequence; identical to SEQ ID NO: 132589
  derived and/or modified CDS sequence (opt3) from hemagglutinin__InfluenzaA__ADF27419

SEQ ID NO: 132607 - RNA, 1701 nt, Artificial Sequence
  derived and/or modified CDS sequence (opt3) from hemagglutinin__InfluenzaA__ADF27429
augaaggccauccuggugguccuccuuuacaccuucgcuacagcaaacgccgacacucugugcauuggcuaucacgcgaauaacagcacggauaccguugacacaguguuggagaagaauguaacugugacccauuccgucaacuuacuggaagauaagcacaaugggaaacuauguaagcucagaggaguggcuccccugcaucuugguaaaugcaacauagccggcuggauccuggggaauccugagugugaaucuuugucaacagcaaguagcugguccuacauuguugagaccucuucgucagacaacggaacuugcuauccaggcgauuuuaucgacuacgaggagcucagggagcagcugagcaguguguccucuuucgaacgguuugagauuuucccgaagacaagcuccuggcccaaucacgauucaaacaagggugucaccgccgcuuguccucaugcaggggccaaaaguuuuuauaagaaucugaucuggcucgugaaaaagggaaacagcuacccaaaauuaucuaaguucuauauaaaugacaagggcaaagaaguacugguucuuuggggcauccaccaccccuccacgucagcugaucaacagagcuuguaccagaacgccgacgcguacguguuugucgggaccagucgcuauucuaagaaauucaagccugagauugcaauccgaccaaaagugcgugaucaggagggaagaaugaauuacuauuggacucugguggaacccggugacaagauuacauuugaggccacuggcaaccuagucguuccuagguacgcuuucgccauggaacggaacgcaggguccggaaucauaauuagcgauaccccagugcaugacugcaauacaaccugucaaacgccgaaaggcgcuaucaacacuucgcuccccuuucagaauauucacccuaucacaaucgguaagugcccaaaguauguaaaaucuaccaagcugcgccuugccacugggcugagaaacgugcccuccauucagucaaggggauuguucggcgcgauagccggcuuuaucgaagggggauggacagguauggucgacggcugguacggguaucaucaccagaaugaacaaggaaguggcuacgcagcugaucucaaaagcacccagaacgccauugacaagaucacgaauaaagugaacuccguuauagagaagaugaauacccaguucacagcuguggguaaggaguucaaccaccuggaaaaacggauugagaauuuaaacaagaaagucgaugacggguuucuggauaucuggacuuacaaugccgaacuccuugugcuguuggagaacgaacgcacccuagacuaucaugauucuaauguaaagaaccuguacgagaaaguucgaagccagcucaagaacaaugcaaaggagaucggcaacggauguuucgaauuuuaucacaaaugcgacaauacauguaugaagucagugaaaaacggcacuuacgauuauccuaaguacagugaggaagccaaacugaauagagaggaaauugacggggucaaacuugaguccaccaggaucuaucaaauucuggcuauauacagcacaguggcgucuucauugguccucgugguuagucugggagcaaucagcuucuggaugugcuccaacgguucuuuacagugccggauuuguaucuga

SEQ ID NO: 132608 - RNA, 1701 nt, Artificial Sequence; identical to SEQ ID NO: 130717
  derived and/or modified CDS sequence (opt3) from hemagglutinin__InfluenzaA__ADF27439

SEQ ID NO: 132609 - RNA, 1701 nt, Artificial Sequence
  derived and/or modified CDS sequence (opt3) from hemagglutinin__InfluenzaA__ADF27449
augaaggccauccuggugguccuccuuuacaccuucgcuacaguuaacgcagacacucugugcauuggcuaucacgccaauaacagcacggauaccguggacacaguauuggagaaaaaugugacugucacccauuccgugaacuuacuggaagauaagcacaaugggaaacuauguaagcucagaggaguugcgccccugcaucuugguaaaugcaacauagcuggcuggauccuggggaauccugagugugaaucuuugucaacagccaguagcugguccuacauuguggagaccucuucgucagacaacggaacuugcuauccaggcgauuuuaucgacuacgaggagcucagggagcagcugagcagugucuccucuuucgaacgguuugagauuuucccgaagacaagcuccuggcccaaucacgauucaaacaagggugugaccgcagccuguccucaugcuggggcaaaaaguuuuuauaagaaucugaucuggcucguaaagaagggaaacagcuacccaaaauuaucuaaguccuauauaaaugacaagggcaaagaaguucuggugcuuuggggcauccaccaccccucaacgagcgccgaucaacagaguuuguaccagaacgcugacgccuacgucuucguggggacuucucgcuauuccaagaaauuuaagccugagauugcgauccgaccaaaagugcgugaucaggagggaagaaugaauuacuauuggacccuggucgaacccggugacaagauuacauucgaggcaacuggcaaccuaguugugccuagguacgccuuugcuauggaacggaacgccgggagcggaaucauaauuucggauaccccaguacaugacugcaauacaaccugucaaacgccgaaaggcgcaaucaacacuucucuccccuuccagaauauucacccuaucacaaucgguaagugcccaaaguaugugaaauccaccaagcugcgccuugcuacugggcugagaaacauucccucaauacagaguaggggauuguuuggcgccaucgcgggcuucauugaagggggauggacagguauggucgacggcugguacggguaucaucaccagaaugaacaaggaagcggcuacgccgcagaucucaaauccacccagaacgcuaucgacgagauaacgaauaaggugaacucuguuauugagaaaaugaauacccaguuuacagccguggguaaggaguucaaccaccuggaaaagcggaucgaaaauuuaaacaaaaaggucgaugacggguuccuggauaucuggacuuacaaugcugagcuccuugugcuguuggaaaacgagcgcacccuagacuaucaugauagcaauguuaaaaaccuguacgagaagguacgaucacagcucaaaaacaaugccaaggaaauuggcaacggauguuuugaguucuaucacaagugcgacaauacauguauggaaagugugaaaaacggcacuuacgauuauccuaaguacuccgaggaagcaaaacugaauagagaggagaucgacggggucaaacuugaaagcaccaggauuuaucaaauacuggccaucuacucuacaguggcuucaaguuugguccucgugguuagccugggagcgauuuccuuuuggaugugcucuaacgguucguuacagugccggaucuguaucuga

SEQ ID NO: 132610 - RNA, 1701 nt, Artificial Sequence; identical to SEQ ID NO: 131877
  derived and/or modified CDS sequence (opt3) from hemagglutinin__InfluenzaA__ADF27459

SEQ ID NO: 132611 - RNA, 1701 nt, Artificial Sequence; identical to SEQ ID NO: 130717
  derived and/or modified CDS sequence (opt3) from hemagglutinin__InfluenzaA__ADF27469

SEQ ID NO: 132612 - RNA, 1701 nt, Artificial Sequence
  derived and/or modified CDS sequence (opt3) from hemagglutinin__InfluenzaA__ADF27479
augaaggccauccuggugguccuccuuuacaccuucgcuacagcaaacgccgacacucugugcauuggcuaucacgcgaauaacagcacggauaccguugacacaguguuggagaaaaauguaacugugacccauuccgucaacuuacuggaagauaagcacaaugggaaacuauguaagcucagaggaguggcuccccugcaucuugguaaaugcaacauagccggcuggauccuggggaauccugagugugaaucuuugucaacagcaaguagcugguccuacauuguugagaccucuucgucagacaacggaacuugcuauccaggcgauuuuaucgacuacgaggagcucagggagcagcugagcaguguguccucuuucgaacgguuugagauuuucccgaagacaagcuccuggcccaaucacgauucaaacaagggugucaccgccgcuuguccucaugcaggggccaaaaguuuuuauaagaaucugaucuggcucgugaaaaagggaaacagcuacccaaaauuaucuaaguccuauauaaaugacaagggcaaagaaguacugguucuuuggggcauccaccaccccucaacgagcgcugaucaacagaguuuguaccagaacgccgacgcguacguguucgucgggacuucucgcuauuccaagaaauuuaagccugagauugcaauccgaccaaaagugcgugaucaggagggaagaaugaauuacuauuggacccugguggaacccggugacaagauuacauucgaggccacuggcaaccuagucguuccuagguacgcuuuugccauggaacggaacgcagggagcggaaucauaauuucggauaccccagugcaugacugcaauacaaccugucaaacgccgaaaggcgcuaucaacacuucucuccccuuccagaauauucacccuaucacaaucgguaagugcccaaaguauguaaaauccaccaagcugcgccuugccacugggcugagaaacgugcccucaauucauaguaggggauuguuuggcgcgauagccggcuucaucgaagggggauggacagguauggucgacggcugguacggguaucaccaccagaaugaacagggaagcggcuacgcagcugaucucaaauccacccaaaacgccauugacaagaucacgaauaaagugaacucuguuauagagaagaugaauacccaguuuacagcuguggguaaggaguucaaccaucuggaaaaacggauugagaauuuaaacaagaaagucgaugacggguuccuggauaucuggacuuacaaugccgaacuccuugugcuguuggagaacgaacgcacccuagacuaucacgauagcaauguaaagaaccuguacgagaaaguucgaucacagcucaagaacaaugcaaaggagaucggcaacggauguuuugaguucuaucauaaaugcgacaauacauguauggaaagugugaagaacggcacuuacgauuauccuaaauacuccgaagaggccaagcugaauagagaagagauugacggggucaaacuugagagcaccaggaucuaucagauucuggcuauauacucuacaguggcgucaaguuugguccucgugguuagccugggagcaaucuccuuuuggaugugcucuaacgguucguuacaaugccggauuuguaucuga

SEQ ID NO: 132613 - RNA, 1701 nt, Artificial Sequence
  derived and/or modified CDS sequence (opt3) from hemagglutinin__InfluenzaA__ADF27489
augaaggccauccuggugguccuccuuuacaccuucgcuacagcaaacgccgacacucugugcauuggcuaucacgcgaauaacagcacggauaccguugacacaguguuggagaaaaauguaacugugacccauuccgucaacuuacuggaauacaagcacaaugggaaacuauguaagcucagaggaguggcuccccugcaucuugguaaaugcaacauagccggcuggauccuggggaauccugagugugaaucuuugucaacagcaaguagcugguccuauauuguugagaccucuucgucagauaacggaacuugcuacccaggcgacuuuaucgauuaugaagaacucagggagcagcugagcaguguguccucuuucgaacgguuugagauuuucccgaagacaagcuccuggcccaaucacgacucaaacaagggugucaccgccgcuuguccucaugcaggggccaaaaguuuuuacaagaaucugaucuggcucgugaaaaagggaaacagcuauccaaaauuaucuaaguccuacauaaaugauaagggcaaagaaguacugguucuuuggggcauccaccaccccucaacgagcgcugaccaacagaguuuguaccagaacgccgaugcguauguguucgucgggacuucucgcuacuccaagaaauuuaagccugagauugcaauccgaccaaaagugcgugaccaggagggaagaaugaauuauuacuggacccugguggaacccggugauaagauuacauucgaggccacuggcaaccuagucguuccuagguaugcuuuugccauggaacggaacgcagggagcggaaucauaauuucggacaccccagugcaugauugcaauacaaccugucaaacgccgaaaggcgcuaucaacacuucucuccccuuccagaauauucacccuaucacaaucggugagugcccaaaguacguaaaguccaccaaacugcgccuugccacugggcugagaaacgugcccucaauucagaguaggggauuguuuggcgcgauagccggcuucaucgaagggggauggacagguauggucgacggcugguauggguaccaucaccagaaugagcaaggaagcggcuacgcagcugaccucaaguccacccagaacgccauugaugagaucacgaauaaagugaacucuguuauagaaaagaugaauacccaguuuacagcuguggguaaagaguucaaccaccuggaaaagcggauugagaauuuaaacaagaaagucgacgauggguuccuggacaucuggacuuauaaugccgaacuccuugugcuguuggagaacgagcgcacccuagauuaccaugacagcaauguaaagaaccuguaugaaaaaguucgaucacagcucaagaacaaugcaaaagagaucggcaacggauguuuugaguucuaccacaagugcgauaauacauguauggagagugugaagaacggcacuuaugacuacccuaaauauuccgaagaggccaagcugaauagagaggaaauugauggggucaaacuugagagcaccaggaucuaccaaauucuggcuauauacucuacaguggcgucaaguuugguccucgugguuagccugggagcaaucuccuuuuggaugugcucuaacgguucguuacagugccggauuuguaucuga

SEQ ID NO: 132614 - RNA, 1701 nt, Artificial Sequence; identical to SEQ ID NO: 131881
  derived and/or modified CDS sequence (opt3) from hemagglutinin__InfluenzaA__ADF27499

SEQ ID NO: 132615 - RNA, 1701 nt, Artificial Sequence; identical to SEQ ID NO: 130717
  derived and/or modified CDS sequence (opt3) from hemagglutinin__InfluenzaA__ADF27509

SEQ ID NO: 132616 - RNA, 1701 nt, Artificial Sequence; identical to SEQ ID NO: 132314
  derived and/or modified CDS sequence (opt3) from hemagglutinin__InfluenzaA__ADF27529

SEQ ID NO: 132617 - RNA, 1701 nt, Artificial Sequence; identical to SEQ ID NO: 131889
  derived and/or modified CDS sequence (opt3) from hemagglutinin__InfluenzaA__ADF27539

SEQ ID NO: 132618 - RNA, 1701 nt, Artificial Sequence; identical to SEQ ID NO: 131889
  derived and/or modified CDS sequence (opt3) from hemagglutinin__InfluenzaA__ADF27549

SEQ ID NO: 132619 - RNA, 1701 nt, Artificial Sequence; identical to SEQ ID NO: 130717
  derived and/or modified CDS sequence (opt3) from hemagglutinin__InfluenzaA__ADF27559

SEQ ID NO: 132620 - RNA, 1701 nt, Artificial Sequence
  derived and/or modified CDS sequence (opt3) from hemagglutinin__InfluenzaA__ADF27569
augaaggccauccuggugguccuccuuuacaccuucgcuacagcaaacgccgacacucugugcauuggcuaucacgcgaauaacagcacggauaccguugacacaguguuggagaaaaauguaacugugacccauuccgucaacuuacuggaagauaagcacaaugggaaacuauguaagcucagaggaguggcuccccugcaucuugguaaaugcaacauagccggcuggauccuggggaauccugagugugaaucuuugucaacagcaaguagcugguccuacauuguugagaccucuucgucagacaacggaacuugcuauccaggcgauuuuaucgacuacgaggagcucagggagcagcugagcaguguguccucuuucgaacgguuugagauuuucccgaagacaagcuccuggcccaaucacgauucaaacaagggugucaccgccgcuuguccucaugcaggggccaaaaguuuuuauaagaaucugaucuggcucgugaaaaagggaaacagcuacccaaaauuaucuaaguccuauauaaaugacaagggcaaagaaguacugguucuuuggggcauccaccaccccucaacgagcgcugaucaacagaguuuguaccagaacgccgacgcguacguguucgucgggacuucucgcuauuccaagaaauuuaagccugagauugcaauccgaccaaaagugcgugaucaggagggaagagugaauuacuauuggacccuggucgaacccggugacaagauuacauucgaggccacuggcaaccuaguugugccuagguacgcuuuugccauggaacggaacgcagggagcggaaucauaauuucggauaccccaguacaugacugcaauacaaccugucaaacgccgaaaggcgcuaucaacacuucucuccccuuccagaauauucacccuaucacaaucgguaagugcccaaaguaugugaaauccaccaagcugcgccuugccacugggcugagaaacguccccucaauucagaguaggggauuguuuggcgcgauagccggcuucaucgaagggggauggacagguaugguggacggcugguacggguaucaucaccagaaugaacaaggaagcggcuacgcagcugaucucaaauccacccagaacgccauugacaagaucacgaauaaaguuaacucugugauagagaagaugaauacccaguuuacagcugucgguaaggaguucaaccaccuggaaaaacggauugagaauuuaaacaagaaaguggaugacggguuccuggauaucuggacuuacaaugccgaacuccuuguacuguuggagaacgaacgcacccuagacuaucaugauagcaauguuaagaaccuguacgagaaagugcgaucacagcucaagaacaaugcaaaggagaucggcaacggauguuuugaguucuaucacaaaugcgacaauacauguauggaaagugucaagaacggcacuuacgauuauccuaaauacuccgaagaggccaagcugaauagagaagagauugacggggugaaacuugagagcaccaggaucuaucaaauucuggcuauauacucuacagucgcgucaaguuuggugcucguugugagccugggagcaaucuccuuuuggaugugcucuaacgguucguuacagugccggauuuguaucuga

SEQ ID NO: 132621 - RNA, 1701 nt, Artificial Sequence; identical to SEQ ID NO: 131889
  derived and/or modified CDS sequence (opt3) from hemagglutinin__InfluenzaA__ADF27579

SEQ ID NO: 132622 - RNA, 1701 nt, Artificial Sequence
  derived and/or modified CDS sequence (opt3) from hemagglutinin__InfluenzaA__ADF27589
augaaggccauccuggugguccuccuuuacaccuucgcuacagcaaacgccgacacucugugcauuggcuaucacgcgaauaacagcacggauaccguugacacaguguuggagaaaaauguaacugugacccauuccgucaacuuacuggaagauaagcacaaugggaaacuauguaagcucagaggaguggcuccccugcaucuugguaaaugcaacauagccggcuggauccuggggaauccugagugugaaucuuugucaacagcaaguagcugguccuacauuguugagaccucuucgucagacaacggaacuugcuauccaggcgauuuuaucgacuacgaggagcucagggagcagcugagcaguguguccucuuucgaacgguuugagauuuucccgaagacaagcuccuggcccaaucacgauucaaacaagggugucaccgccgcuuguccucaugcaggggccaaaaguuuuuauaagaaucugaucuggcucgugaaaaagggaaacagcuacccaaaauuaucuaaguccuauauaaaugacaagggcaaagaaguacugguucuuuggggcauccaccaccccucaacgagcgcugaucaacagaguuuguaccagaacgccgacgcguacguguucgucgggacuucucgcuauuccaagaaauuuaagccugagauugcaauccgaccaaaagugcgugaucaggagggaagaaugaauuacuauuggacccugguggaacccggugacaagauuacauucgaggccacuggcaaccuagucguuccuagguacgcuuuugccauggaacggaacgcagggagcggaaucauaauuucggauaccucugugcaugacugcaauacaaccugucaaacgccaaaaggcgcuaucaacacuucccucccguuccagaauauucaccccaucacaaucgguaagugcccuaaguauguaaaaucaaccaagcugcgccuugccacugggcugagaaacgugccaaguauucagagcaggggauuguuuggcgcgauagccggcuucaucgaagggggauggacagguauggucgacggcugguacggguaucaucaccagaaugaacaaggauccggcuacgcagcugaucucaaaucuacccagaacgccauugacgagaucacgaauaaggugaacagcguuauagagaaaaugaauacccaguuuacagcuguggguaaggaguucaaccaccuggaaaagcggauugaaaauuuaaacaaaaaggucgaugacggguuccuggauaucuggacuuacaaugccgagcuccuugugcuguuggaaaacgagcgcacccuagacuaucaugauucaaauguaaagaaccuguacgagaagguucgaagucagcucaaaaacaaugcaaaggaaaucggcaacggauguuuugaguucuaucacaagugcgacaauacauguauggaauccgugaaaaacggcacuuacgauuaucccaaguacagcgaggaagccaaacugaauagagaggagauugacggggucaaacuugaaucuaccaggaucuaucaaauucuggcuauauacucaacaguggcgaguagcuugguccucgugguuucccugggagcaaucucuuuuuggaugugcucgaacgguagcuuacagugccggauuuguaucuga

SEQ ID NO: 132623 - RNA, 1701 nt, Artificial Sequence
  derived and/or modified CDS sequence (opt3) from hemagglutinin__InfluenzaA__ADF27599
augaaggccauccuggugguccuccuuuacaccuucgcuacagcaaacgccgacacucugugcauuggcuaucacgcgaauaacagcacggauaccguugacacaguguuggagaaaaauguaacugugacccauuccgucaacuuacuggaagauaagcacaaugggaaacuauguaagcucagaggaguggcuccccugcaucuugguaaaugcaacauagccggcuggauccuggggaauccugagugugaaucuuugucaacagcaaguagcugguccuacauuguugagaccucuucgucagacaacggaacuugcuauccaggcgauuuuaucgacuacgaggagcucagggagcagcugagcaguguguccucuuucgaacgguuugagauuuucccgaagacaagcuccuggcccaaucacgauucaaacaagggugucaccgccgcuuguccucaugcaggggccaaaaguuuuuauaagaaucugaucuggcucgugaaaaagggaaacagcuacccaaaauuaucuaaguccuauauaaaugacaagggcaaagaaguacugguucuuuggggcauccaccaccccucaacgagcgcugaucaacagaguuuguaccagaacgccgacgcguacguguucgucgggacuucucgcuauuccaagaaauuuaagccugagauugcaauccgaccaaaagugcgugaucaggagggaagaaugaauuacuauuggacccugguggaacccggugacaagauuacauucgaggccacuggcaaccuagucguuccuagguacgcuuuuaccauggaacggaacgccgggagcggaaucauaauuucggauacaccagugcaugacugcaauaccacgugucaaacuccgaaaggcgcaaucaacacaucucuccccuuccagaauauucacccuaucaccaucgguaagugcccaaaguauguaaaauccacuaagcugcgccuugcuacagggcugagaaacgugcccucaauucagaguaggggauuguuuggcgccauagcgggcuucaucgaagggggauggaccgguauggucgacggcugguacggguaucaucaccagaaugaacaaggaagcggcuacgccgcagaucucaaauccacgcagaacgcuauugacgagaucaccaauaaggugaacucuguuauagagaaaaugaauacacaguuuacugccguggguaaggaguucaaccaccuggaaaagcggauugaaaauuuaaacaaaaaggucgaugacggguuccuggauaucuggaccuacaaugcugagcuccuugugcuguuggaaaacgagcgcacacuagacuaucaugauagcaauguaaagaaccuguacgagaagguucgaucacagcucaaaaguaacgccaaggaaaucggcaauggauguuuugaguucuaucacaagugcgacaacacuuguauggaauccgugaaaaauggcaccuacgauuauccuaaguacagcgaggaagcaaaacugaacagagaggagauugacggggucaaacuugaaucuacaaggaucuaucaaauucuggccauauacucaaccguggcuaguagcuugguccucgugguuucccugggagcgaucucuuuuuggaugugcucgaaugguagcuuacagugccggauuuguaucuga

SEQ ID NO: 132624 - RNA, 1701 nt, Artificial Sequence
  derived and/or modified CDS sequence (opt3) from hemagglutinin__InfluenzaA__ADF27609
augaaggccauccuggugguccuccuuuacaccuucgcuacagcaaacgccgacacucugugcauuggcuaucacgcgaauaacagcacggauaccguugacacaguguuggagaaaaauguaacugugacccauuccgucaacuuacuggaagauaagcacaaugggaaacuauguaagcucagaggaguggcuccccugcaucuugguaaaugcaacauagccggcuggauccuggggaauccugagugugaaucuuugucaacagcaaguagcugguccuacauuguugagaccucuucgucagacaacggaacuugcuauccaggcgauuuuaucgacuacgaggagcucagggagcagcugagcaguguguccucuuucgaacgguuugagauuuucccgaagacaagcuccuggcccaaucacgauucaaacaagggugucaccgccgcuuguccucaagcaggggccaaaaguuuuuauaagaaucugaucuggcucgugaaaaagggaaacagcuacccaaaauuaucuaaguccuauauaaaugacaagggcaaagaaguacugguucuuuggggcauccaucaccccucaacgagcgcugaucagcagaguuuguaccagaacgccgacgcguacguguucgucgggacuucucgcuauuccaagaaauuuaagccugagauugcaauccgaccaaaagugcgugaucaagagggaagaaugaauuacuauuggacccugguggaacccggugacaagauuacauucgaggccacuggcaaccuagucguuccuagguacgcuuuugccauggaacggaacgcagggagcggaaucauaauuucggauaccccagugcacgacugcaauacaaccugucagacgccgaaaggcgcuaucaacacuucucuccccuuccagaauauucauccuaucacaaucgguaagugcccaaaguauguaaaauccaccaagcugcgccuugccacugggcugagaaacgugcccucaauucagaguaggggauuguuuggcgcgauagccggcuucaucgaagggggauggacagguauggucgacggcugguacggguaucaccaucaaaaugaacagggaagcggcuacgcagcugaucucaaauccacccagaacgccauugacgagaucacgaauaaggugaacucuguuauagagaaaaugaauacccaguuuacagcuguggguaaggaguucaaccaccuggaaaagcggauugaaaauuuaaacaaaaaggucgaugacggguuccuggauaucuggacuuacaaugccgagcuccuugugcuguuggaaaacgagcgcacccuagacuaucacgauagcaauguaaagaaccuguacgagaagguucgaucacaacucaaaaacaaugcaaaggaaaucggcaacggauguuuugaguucuaucauaagugcgacaauacauguauggaaagugugaaaaacggcacuuacgauuauccuaaguacuccgaggaagccaaacugaauagagaggagauugacggggucaaacuugaaagcaccaggaucuaucagauucuggcuauauacucuacaguggcgucaaguuugguccucgugguuagccugggagcaaucuccuuuuggaugugcucuaacgguucguuacagugccggauuuguaucuga

SEQ ID NO: 132625 - RNA, 1701 nt, Artificial Sequence
  derived and/or modified CDS sequence (opt3) from hemagglutinin__InfluenzaA__ADF27619
augaaggccauccuggugguccuccuuuacaccuucgcuacagcaaacgccgacacucugugcauuggcuaucacgcgaauaacagcacggauaccguugacacaguguuggagaaaaauguaacugugacccauuccgucaacuuacuggaagauaagcacaaugggaaacuauguaagcucagaggagugguuccccugcaucuugguaaaugcaacauagcuggcuggauccuggggaauccugagugugaaucuuugucaacagccaguagcugguccuacauuguggagaccucuucgucagacaacggaacuugcuauccaggcgauuuuaucgacuacgaggagcucagggagcagcugagcagugucuccucuuucgaacgguuugagauuuucccgaagacaagcuccuggcccaaucacgauucaaacaagggugugaccgcagccuguccucaugcuggggcaaaaaguuuuuauaagaaucugaucuggcucguuaaaaagggaaacagcuacccaaaauuaucuaaguccuauauaaaugacaagggcaaagaaguacuggugcuuuggggcauccaccaccccucaacgagcgccgaucaacagaguuuguaccagaacgcugacgccuacgucuucguggggacuucucgcuauuccaagaaauuuaagccugagauugcgauccgaccaaaagugcgugaucaggagggaagaaugaauuacuauuggacccuggucgaacccggugacaagauuacauucgaggcaacuggcaaccuaguugugccuagguacgccuuugcuauggaacggaacgccgggagcggaaucauaauuucggauaccccaguacaugacugcaauacaaccugucaaacgccgaaaggcgcaaucaacacuucucuccccuuccagaauauucacccuaucacaaucgguaagugcccaaaguaugugaaauccaccaagcugcgccuugcuacugggcugagaaacguccccucaauucagaguaggggauuguuuggcgccauagcgggcuucaucgaagggggauggacagguaugguggacggcugguacggguaucaucaccagaaugaacaaggaagcggcuacgccgcagaucucaaauccacccagaacgcuauugacaagaucacgaauaaaguuaacucugugauagagaagaugaauacccaguuuacagccgucgguaaggaguucaaccaccuggaaaaacggauugagaauuuaaacaagaaaguggaugacggguuccuggauaucuggacuuacaaugcugaacuccuuguacuguuggagaacgaacgcacccuagacuaucaugauagcaauguuaagaaccuguacgagaaagugcgaucacagcucaagaacaaugccaaggagaucggcaacggauguuuugaguucuaucacaaaugcgacaauacauguauggaaagugucaagaacggcacuuacgauuauccuaaauacuccgaagaggcaaagcugaauagagaagagauugacggggugaaacuugagagcaccaggaucuaucaaauucuggccauauacucuacagucgcuucaaguuuggugcucguugugagccugggagcgaucuccuuuuggaugugcucuaacgguucguuacagugccggauuuguaucuga

SEQ ID NO: 132626 - RNA, 1701 nt, Artificial Sequence; identical to SEQ ID NO: 131889
  derived and/or modified CDS sequence (opt3) from hemagglutinin__InfluenzaA__ADF27629

SEQ ID NO: 132627 - RNA, 1701 nt, Artificial Sequence
  derived and/or modified CDS sequence (opt3) from hemagglutinin__InfluenzaA__ADF27649
augaaggccauccuggugguccuccuuuacaccuucgcuacagcaaacgccgacacucugugcauuggcuaucacgcgaauaacagcacggauaccguugacacaguguuggagaaaaauguaacugugacccauuccgucaacuuacuggaagauaagcacaaugggaaacuauguaagcucagaggaguggcuccccugcaucuugguaaaugcaacauagccggcuggauccuggggaauccugagugugaaucuuugucaacagcaaguagcugguccuacauuguugagaccucuucgucagacaacggaacuugcuauccaggcgauuuuaucgacuacgaggagcucagggagcagcugagcaguguguccucuuucgaacgguuugagauuuucccgaagacaagcuccuggcccaaucacgauucaaacaagggugucaccgccgcuuguccucaugcaggggccaaaaguuuuuauaagaaucugaucuggcucgugaaaaagggaaacagcuacccaaaauuaucuaaguccuauauaaaugacaagggcaaagaaguacugguucuuuggggcauccaccaccccucaacgagcgcugaucaacagaguuuguaccagaacgccgacgcguacguguucgucgggacuucucgcuauuccaagaaauuuaagccugagauugcaauccgaccaaaagugcgugaucaggagggaagaaugaauuacuauuggacccugguggaacccggugacaagauuacauucgaggccacuggcaaccuagucguuccuagguacgcuuuugccauggaacggaacgcagggagcggaaucauaauuucggauaccccagugcaugacugcaauacaaccugucaaacgccgaaaggcgcuaucaacacuucucuccccuuccagaauauucacccuaucacaaucgguaagugcccaaaguauguaaaauccaccaagcugcgccuugccacugggcugagaaacgugcccucaauucagccuaggggauuguuuggcgcgauagccggcuucaucgaagggggauggacagguauggucgacggcugguacggguaucaucaccagaaugaacaaggaaguggcuacgcagcugaucucaaaagcacccagaacgccauugacaagaucacgaauaaagugaacuccguuauagagaagaugaauacccaguuuacagcuguggguaaggaguucaaccaccuggaaaaacggauugagaauuuaaacaagaaagucgaugacggguuccuggauaucuggacuuacaaugccgaacuccuugugcuguuggagaacgaacgcacccuagacuaucaugauucuaauguaaagaaccuguacgagaaaguucgaagccagcucaagaacaaugcaaaggagaucggcaacggauguuuugaguucuaucacaaaugcgacaauacauguauggaaucagugaagaacggcacuuacgauuauccaaaauacagugaagaggccaagcugaauagagaagagauugacggggucaaacuugaguccaccaggaucuaucaaauucuggcuauauacagcacaguggcgucuucauugguccucgugguuagucugggagcaaucagcuuuuggaugugcuccaacgguucuuuacagugccggauuuguaucuga

SEQ ID NO: 132628 - RNA, 1701 nt, Artificial Sequence; identical to SEQ ID NO: 131889
  derived and/or modified CDS sequence (opt3) from hemagglutinin__InfluenzaA__ADF27659

SEQ ID NO: 132629 - RNA, 1701 nt, Artificial Sequence; identical to SEQ ID NO: 132366
  derived and/or modified CDS sequence (opt3) from hemagglutinin__InfluenzaA__ADF27669

SEQ ID NO: 132630 - RNA, 1701 nt, Artificial Sequence; identical to SEQ ID NO: 131818
  derived and/or modified CDS sequence (opt3) from hemagglutinin__InfluenzaA__ADF27679

SEQ ID NO: 132631 - RNA, 1701 nt, Artificial Sequence; identical to SEQ ID NO: 132427
  derived and/or modified CDS sequence (opt3) from hemagglutinin__InfluenzaA__ADF27689

SEQ ID NO: 132632 - RNA, 1701 nt, Artificial Sequence
  derived and/or modified CDS sequence (opt3) from hemagglutinin__InfluenzaA__ADF27699
augaaggccauccuggugguccuccuuuacaccuucgcuacagcaaacgccgacacucugugcauuggcuaucacgcgaauaacagcacggauaccguugacacaguguuggagaagaauguaacugugacccauuccgucaacuuacuggaagauaagcacaaugggaaacuauguaagcucagaggaguggcuccccugcaucuugguaaaugcaacauagccggcuggauccuggggaauccugagugugaaucuuugucaacagcaaguagcugguccuacauuguugagaccucuucgucagacaacggaacuugcuauccaggcgauuuuaucgacuacgaggagcucagggagcagcugagcaguguguccucuuucgaacgguuugagauguucccgaagacaagcuccuggcccaaucacgauucaaacaagggugucaccgccgcuuguccucaugcaggggccaaaaguuuuuauaagaaucugauuuggcucgugaaaaagggaaacagcuacccaaaauuaucuaaguccuauaucaaugacaagggcaaagaaguacugguucuuuggggcauacaccaccccucaacgagcgcugaucaacagaguuuguaccagaacgccgacgcguacguguucgucgggacuucucgcuauuccaagaaauuuaagccugagaucgcaauucgaccaaaagugcgugaucaggagggaagaaugaauuacuauuggacccugguggaacccggugacaagaucacauucgaggccacuggcaaccuagucguuccuagguacgcuuuugccauggaacggaacgcagggagcggaauuaucauaucggauaccccagugcauaauugcaacacaaccugucaaacgccgaaaggcgcuauuaauacuucucuccccuuccagaacauccacccuauuacaaucgguaagugcccaaaguauguaaaauccaccaagcugcgccuugccacugggcugagaaaugugcccucaauccagaguaggggauuguuuggcgcgauugccggcuucauagaagggggauggacagguauggucgacggcugguacggguaucaucaccagaacgaacaaggaagcggcuacgcagcugaccucaaauccacccagaaugccaucgaugagauuacgaacaagguaaauucuguuaucgagaaaaugaacacccaguuuacagcuguggguaaggaguucaaucaccuggaaaagcggauagaaaacuuaaauaaaaaggucgacgauggguuccuggacauuuggacuuacaacgccgagcuccuugugcuguuggaaaaugagcgcacccuagauuaucaugacagcaacgugaaaaaccuguacgagaagguucgaucacagcucaaaaauaacgcaaaggaagugggcaauggauguuuugaguucuaucacaagugcgauaacacauguauggaaagugucaaaaauggcacuuacgacuauccuaaguacuccgaggaagccaaacugaacagagaggagaucgauggggugaaacuugaaagcaccaggaucuaucaaauucuggcuaucuacucuacagucgcgucaaguuuggugcucguugugagccugggagcaauuuccuuuuggaugugcucuaaugguucguuacagugccggauauguaucuga

SEQ ID NO: 132633 - RNA, 1701 nt, Artificial Sequence
  derived and/or modified CDS sequence (opt3) from hemagglutinin__InfluenzaA__ADF27709
augaaggccauccuggugguccuccuuuacaccuucgcuacagcaaacgccgacacucugugcauuggcuaucacgcgaauaacagcacggauaccguugacacaguguuggagaaaaauguaacugugacccauuccgucaacuuacuggaagauaagcacaaugggaaacuauguaagcucagaggaguggcuccccugcaucuugguaaaugcaacauagccggcuggauccuggggaauccugagugugaaucuuugucaacagcaaguagcugguccuacauuguugagaucucuucgucagacaacggaaccugcuauccaggcgauuuuauuaauuacgaggagcucagggagcagcugagcaguguguccucuuucgaacgguuugagaucuucccgaagacuagcuccuggcccaaccacgacucaaauaagggugucacagccgcuuguccucaugcaggggccaaaaguuuuuauaagaaccugauauggcucgugaaaaagggaaauagcuacccaaaauuaucuaaguccuauaucaacgauaagggcaaagaaguacugguucuuuggggcauucaccaccccucaaccagcgcugaccaacagaguuuguaccagaaugccgaugcguacguguucgucgggacgucucgcuauuccaagaaauuuaagccugagaucgcaauucgaccaaaagugcgugaccaggagggaagaaugaacuacuauuggacucugguggaacccggugauaagaucaccuucgaggccacaggcaaccuagucguuccuagguacgcuuuugccauggaacggaaugcagggagcggaauaauuaucucggacacuccagugcaugauugcaacaccacaugucaaaccccgaaaggcgcuauuaauacgucucuccccuuccagaacauccacccuaucacuauugguaagugcccaaaguauguaaaauccacaaagcugcgccuugccaccgggcugagaaaugugcccucaauacagaguaggggauuguuuggcgcgaucgccggcuucauugaagggggauggacugguauggucgacggcugguacggguaucaucaccagaacgaacaaggaagcggcuacgcagcugaccucaaauccacacagaaugccaucgauaagauaaccaacaaaguuaauucugugauugagaagaugaacacgcaguuuaccgcuguggguaaggaguucaaucaccuggaaaaacggaucgagaacuuaaauaagaaagucgacgauggguuccuggacaucuggacauacaacgccgaacuccuugugcuguuggagaaugaacgcacucuagauuaucaugacagcaacguaaagaaccuguacgagaaaguucgaucacagcucaagaauaacgcaaaggagauuggcaauggauguuuugaguucuaucacaaaugcgauaacaccuguauggaaagugugaagaauggcacauacgacuauccuaaauacuccgaagaggccaagcugaacagagaagagaucgauggggucaaacuugagagcacuaggauuuaucaaauacuggcuaucuacucuaccguggcgucaaguuugguccucgugguuagccugggagcaauuuccuuuuggaugugcucuaaugguucguuacagugccggaucuguaucuga

SEQ ID NO: 132634 - RNA, 1701 nt, Artificial Sequence; identical to SEQ ID NO: 131881
  derived and/or modified CDS sequence (opt3) from hemagglutinin__InfluenzaA__ADF27785

SEQ ID NO: 132635 - RNA, 1701 nt, Artificial Sequence
  derived and/or modified CDS sequence (opt3) from hemagglutinin__InfluenzaA__ADF27795
augaaggccauccuggugguccuccuuuacaccuucgcuacagcaaacgccgacacucugugcauuggcuaucacgcgaauaacagcacggauaccguugacacaguguuggagaaaaauguaacugugacccauuccgucaacuuacuggaagauaagcacaaugggaaacuauguaagcucagaggaguggcuccccugcaucuugguaaaugcaacauagccggcuggauccuggggaauccugagugugaaucuuugucaacagcaaguagcugguccuacauuguugagaccucuucgucagacaacggaacuugcuauccaggcgauuuuaucgacuacgaagaacucagggagcagcugagcaguguguccucuuucgaacgguuugagauuuucccgaagacaagcuccuggcccaaucacgauucaaacaagggugucaccgccgcuuguccucaugcaggggccaaaaguuuuuauaagaaucugaucuggcucgugaaaaagggaaacagcuacccaaaauuaucuaaguccuauauaaaugacaagggcaaagaaguacugguucuuuggggcauccaccaccccucaacgagcgcugaucaacagaguuuguaccagaacgccgacgcguacguguucgucgggacuucucgcuauuccaagaaauuuaagccugagauugcaauccgaccaaaagugcgugaucaggagggaagaaugaauuacuauuggacccuggugaagcccggugacaaaauuacauucgaagccacuggcaaccuagucguuccuagguacgcuuuugccauggagcggaacgcagggagcggaaucauaauuucggauaccccagugcaugacugcaauacaaccugucaaacgccgaagggcgcuaucaacacuucucuccccuuccagaauauucacccuaucacaaucgguaagugcccaaaauauguaaaguccaccaaacugcgccuugccacugggcugagaaacgugcccucaauucagaguaggggauuguuuggcgcgauagccggcuucaucgaagggggauggacagguauggucgacggcugguacggguaucaucaccagaaugagcaaggaagcggcuacgcagcugaucucaaguccacccagaacgccauugacgaaaucacgaauaaagugaacucuguuauagagaagaugaauacccaguuuacagcuguggguaaggaguucaaccaccuggaaaaacggauugagaauuuaaacaagaaagucgaugacggguuccuggauaucuggacuuacaaugccgaacuccuugugcuguuggagaacgaacgcacccuagacuaucaugauagcaauguaaagaaccuguacgagaaaguucgaucacagcucaagaacaaugcaaaggagaucggcaacggauguuuugaguucuaucacaaaugcgacaauacauguauggagagugugaagaacggcacuuacgauuauccuaaauacuccgaagaggccaagcugaauagagaagagauugacggggucaaacuugagagcaccaggaucuaucaaauucuggcuauauacucuacaguggcgucaaguuugguccucgugguuagccugggagcaaucuccuuuuggaugugcucuaacgguucguuacagugccggauuuguaucuga

SEQ ID NO: 132636 - RNA, 1701 nt, Artificial Sequence; identical to SEQ ID NO: 131889
  derived and/or modified CDS sequence (opt3) from hemagglutinin__InfluenzaA__ADF27805

SEQ ID NO: 132637 - RNA, 1701 nt, Artificial Sequence
  derived and/or modified CDS sequence (opt3) from hemagglutinin__InfluenzaA__ADF27815
augaaggccauccuggugguccuccuuuacaccuucgcuacagcaaacgccgacacucugugcauuggcuaucacgcgaauaacagcacggauaccguugacacaguguuggagaaaaauguaacugugacccauuccgucaacuuacuggaagauaagcacaaugggaaacuauguaagcucagaggaguggcuccccugcaucuugguaaaugcaacauagccggcuggauccuggggaauccugagugugaaucuuugucaacagcaaguagcugguccuacauuguugagaccucuucgucagacaacggaacuugcuauccaggcgauuuuaucgacuacgaggagcucagggagcagcugagcaguguguccucuuucgaacgguuugagauuuucccgaagacaagcuccuggcccaaucacgauucaaacaagggugucaccgccgcuuguccucaugacggggcaaaaaguuuuuauaagaaucugaucuggcucgugaaaaagggaaacagcuacccaaaauuaucuaaguccuauauaaaugauaagggcaaagaaguacugguucuuuggggcauccaccaccccucaacgagcgccgaccaacagaguuuguaccagaacgcugaugccuacguguucgucgggacuucucgcuauuccaagaaauuuaagccugagauugcgauccgaccaaaagugcgugaccaggagggaagaaugaauuacuauuggacccugguggaacccggugauaagauuacauucgaggcaacuggcaaccuagucguuccuagguacgccuuugcuauggaacggaacgccgggagcggaaucauaauuucggacaccccagugcaugacugcaauacaaccugucaaacgccgaaaggcgcaaucaacacuucucuccccuuccagaauauucacccuaucacaaucgguaagugcccaaaguauguaaaauccaccaagcugcgccuugcuacugggcugagaaacgugcccucaauucagaguaggggauuguuuggcgccauagcgggcuucaucgaagggggauggacagguauggucgauggcugguacggguaucaucaccagaaugaacaaggaagcggcuacgccgcagaccucaaauccacccagaacgcuauugauaagaucacgaauaaagugaacucuguuauagagaagaugaauacccaguuuacagccguggguaaggaguucaaccaccuggaaaaacggauugagaauuuaaacaagaaagucgacgauggguuccuggacaucuggacuuacaaugcugaacuccuugugcuguuggagaacgaacgcacccuagauuaucaugacagcaauguaaagaaccuguacgagaaaguucgaucacagcucaagaacaaugccaaggagaucggcaacggauguuuugaguucuaucacaaaugcgauaauacauguauggaaagugugaagaacggcacuuacgacuauccuaaauacuccgaagaggcaaagcugaauagagaagagauugauggggucaaacuugagagcaccaggaucuaucaaauucuggccauauacucuacaguggcuucaaguuugguccucgugguuagccugggagcgaucuccuuuuggaugugcucuaacgguucguuacagugccggauuuguaucuga

SEQ ID NO: 132638 - RNA, 1701 nt, Artificial Sequence
  derived and/or modified CDS sequence (opt3) from hemagglutinin__InfluenzaA__ADF27825
augaaggccauccuggugguccuccuuuacaccuucgcuacagcaaacgccgacacucugugcauuggcuaucacgcgaauaacagcacggauaccguugacacaguguuggagagaaauguaacugugacccauuccgucaacuuacuggaagauaaacacaaugggaagcuauguaaacucaggggaguggcuccccugcaucuugguaagugcaacauagccggcuggauccuggggaauccugagugugaaucuuugucaacagcaaguagcugguccuacauuguugagaccucuucgucagacaacggaacuugcuauccaggcgauuuuaucgacagcgaggagcuccgggagcagcugaguuccgugucuagcuucgaacgcuuugagauuuucccgaaaacauccucauggcccaaucacgauaguaacaagggugucaccgccgcuuguccucaugcaggggccaagagcuuuuacaaaaaucugaucuggcucgugaagaaaggaaacucuuauccaaaguuauccaaaucauacauaaaugacaagggcaaggaaguacugguucuuuggggcauccaccaccccagcacgagugcugaucaacagucuuuguaucagaacgccgacgcguacguguucgucgggacuucccgauacagcaaaaaguuuaaaccugagauugcaauccguccaaaggugagagaucaggagggaaggaugaauuauuacuggacccugguggaacccggugacaaaauuacauucgaggccacuggcaaccuagucguuccucgguaugcuuuugccauggaacgcaacgcagggucgggaaucauaauuucugauaccccagugcaugacugcaauacaaccugucaaacgccgaagggcgcuaucaacacuucccuccccuuccagaauauucacccuaucacaaucgguaaaugcccaaaguacguaaagucaaccaaacugagacuugccacugggcugaggaacgugcccaguauucagagccggggauuguuuggcgcgauagccggcuucaucgaagggggauggacagguauggucgacggcugguauggguaccaucaccagaaugaacaaggauccggcuaugcagcugaucucaagucuacccagaacgccauugacgagaucacgaauaaagugaacagcguuauagagaagaugaauacccaguuuacagcuguggguaaagaguucaaccaccuggaaaagcgcauugaaaauuuaaacaagaaagucgaugacggguuccuggauaucuggacuuacaaugccgagcuccuugugcuguuggaaaacgagcgaacccuagacuaccaugauucaaauguaaagaaccuguaugagaaaguuagaagucagcucaagaacaaugcaaaagaaaucggcaacggauguuuugaguucuaccacaagugcgacaauacauguauggaauccgugaagaacggcacuuaugauuacccuaaauauagcgaggaagccaagcugaauagggaggagauugacggggucaaacuugaaucuacccggaucuaccaaauucuggcuauauauucaacaguggcgaguagcuugguccucgugguuucccugggagcaaucucuuuuuggaugugcucgaacgguagcuuacagugccguauuuguaucuga

SEQ ID NO: 132639 - RNA, 1701 nt, Artificial Sequence
  derived and/or modified CDS sequence (opt3) from hemagglutinin__InfluenzaA__ADF27845
augaaggccauccuggugguccuccuuuacaccuucgcuacagcaaacgccgacacucugugcauuggcuaucacgcgaauaacagcacggauaccguugacacaguguuggagaagaauguaacugugacccauuccgcuaacuuacuggaagauaagcacaaugggaaacuauguaagcucagaggagucgcaccccugcaucuugguaaaugcaacauagccggcuggauccuggggaauccugagugugaaucuuugucaacagccaguagcugguccuacauuguggagaccucuucgucagacaacggaacuugcuauccaggcgauuuuaucgacuacgaggagcucagggagcagcugagcaguguuuccucuuucgaacgguuugagauuuucccgaagacaagcuccuggcccaaucacgauucaaacaagggugugaccgcugcauguccucaugccggggcuaaaaguuuuuauaagaaucugaucuggcucgucaaaaagggaaacagcuacccaaaauuaucuaaguccuauauaaaugacaagggcaaagaagugcugguacuuuggggcauccaccaccccucaacgaacgccgaucaacagagcuuguaccagaaugcggacgcauacguuuucguggggaccagucgcuauucuaagaaauuuaagccugagauugccauccgaccaaaaguccgugaucaggagggaagaaugaacuacuauuggacucugguggaacccggugacaagauuacauucgaggcuacuggcaaccuaguggucccuagguacgccuuugcaauggaacggaaugcuggguccggaaucauaauuagcgauaccccaguucaugacugcaacacaaccugucaaacgccgaaaggcgccaucaauacuucgcuccccuuccagaacauucacccuaucacaaucgguaagugcccaaaguaugugaaaucuaccaagcugcgccuugcgacugggcugagaaauguacccuccauucagucaaggggauuguuuggcgccauagcaggcuucaucgaagggggauggacagguaugguggacggcugguacggguaucaucaccagaacgaacaaggaaguggcuacgcugccgaucucaaaagcacccagaaugcuauugacgagaucacgaacaaggucaauuccgugauagagaaaaugaacacccaguuuacagccguugguaaggaguucaaucaccuggaaaagcggauugaaaacuuaaauaaaaagguggaugacggguuccuggauaucuggacuuacaacgcagagcuccuuguccuguuggaaaaugagcgcacccuagacuaucaugauucuaacgugaaaaaccuguacgagaagguacgaagccagcucaaaaauaacgccaaggaaaucggcaauggauguuuugaguucuaucacaagugcgacaacacauguauggaaucaguuaaaaauggcacuuacgauuauccuaaguacagugaggaagcuaaacugaacagagaggagauugacggggugaaacuugaauccaccaggaucuaucaaauucuggcgauauacagcacagucgcaucuucauuggugcucgucgugagucugggagccaucagcuuuuggaugugcuccaaugguucuuuacagugccggauuuguaucuga

SEQ ID NO: 132640 - RNA, 1701 nt, Artificial Sequence; identical to SEQ ID NO: 131881
  derived and/or modified CDS sequence (opt3) from hemagglutinin__InfluenzaA__ADF27855

SEQ ID NO: 132641 - RNA, 1701 nt, Artificial Sequence; identical to SEQ ID NO: 131881
  derived and/or modified CDS sequence (opt3) from hemagglutinin__InfluenzaA__ADF27865

SEQ ID NO: 132642 - RNA, 1701 nt, Artificial Sequence; identical to SEQ ID NO: 131881
  derived and/or modified CDS sequence (opt3) from hemagglutinin__InfluenzaA__ADF27875

SEQ ID NO: 132643 - RNA, 1701 nt, Artificial Sequence; identical to SEQ ID NO: 131881
  derived and/or modified CDS sequence (opt3) from hemagglutinin__InfluenzaA__ADF27885

SEQ ID NO: 132644 - RNA, 1701 nt, Artificial Sequence; identical to SEQ ID NO: 130717
  derived and/or modified CDS sequence (opt3) from hemagglutinin__InfluenzaA__ADF27895

SEQ ID NO: 132645 - RNA, 1701 nt, Artificial Sequence
  derived and/or modified CDS sequence (opt3) from hemagglutinin__InfluenzaA__ADF27915
augaaggccauccuggugguccuccuuuacaccuucgcuacagcaaacgccgacacucugugcauuggcuaucacgcgaauaacagcacggauaccguugacacaguguuggagaaaaauguaacugugacccauuccgucaacuuacuggaagauaagcacaaugggaaacuauguaagcucagaggaguggcuccccugcaucuugguaaaugcaacauagccggcuggauccuggggaauccugagugugaaucuuugucaacagcaaguagcugguccuacauuguugagaccucuucgucagacaacggaacuugcuauccaggcgauuuuaucgacuacgaggagcucagggagcagcugagcaguguguccucuuucgaacgguuugagauuuucccgaagacaagcuccuggcccaaucacgauucaaacaagggugucaccgccgcuuguccucaugcaggggccaaaaguuuuuauaagaaucugaucuggcucgugaaaaagggaaacagcuacccaaaauuaucuaaguccuauauaaaugacaagggcaaagaaguacugguucuuuggggcauccaccaccccucagcuagcgccgaucaacagaguuuguaccagaacgcggacgcauacguguucgucgggacgucucgcuauuccaagaaauuuaagccugagauugccauccgaccaaaagugcgugaucaggagggaagaaugaauuacuauuggacucugguggaacccggugacaagauuaccuucgaggcuacaggcaaccuagucguuccuagguacgccuuugcaauggaacggaacgcugggagcggaaucauaauuucggauacuccagugcaugacugcaauaccacaugucaaaccccgaaaggcgccaucaacacgucucuccccuuccagaauauucacccuaucacuaucgguaagugcccaaaguauguaaaauccacaaagcugcgccuugcgaccgggcugagaaacgugcccucaauucagaguaggggauuguuuggcgccauagcaggcuucaucgaagggggauggacugguauggucgacggcugguacggguaucaucaccagaaugaacaaggaagcggcuacgcugccgaucucaaauccacacagaacgcuauugacaagaucaccaauaaagugaacucuguuauagagaagaugaauacgcaguuuaccgccguggguaaggaguucaaccaccuggaaaaacggauugagaauuuaaacaagaaagucgaugacggguuccuggauaucuggacauacaaugcagaacuccuugugcuguuggagaacgaacgcacucuagacuaucaugauagcaauguaaagaaccuguacgagaaaguucgaucacagcucaagaacaaugccaaggagaucggcaacggauguuuugaguucuaucacaaaugcgacaauaccuguauggaaagugugaagaacggcacauacgauuauccuaaauacuccgaagaggcuaagcugaauagagaagagauugacggggucaaacuugagagcacuaggaucuaucaaauucuggcgauauacucuaccguggcaucaaguuugguccucgugguuagccugggagccaucuccuuuuggaugugcucuaacgguucguuacagugccggauuuguaucuga

SEQ ID NO: 132646 - RNA, 1701 nt, Artificial Sequence
  derived and/or modified CDS sequence (opt3) from hemagglutinin__InfluenzaA__ADF27925
augaaggccauccuggugguccuccuuuacaccuucgcuacagcaaacgccgacacucugugcauuggcuaucacgcgaauaacagcacggauaccguugacacaguguuggagaaaaauguaacugugacccauuccgucaacuuacuggaagauaagcacaaugggaaacuauguaagcucagaggaguggcuccccugcaucuugguaaaugcaacauagccggcuggauccuggggaauccugagugugaaucuuugucaacagcaaguagcugguccuacauuguugagaccucuucgucagacaacggaacuugcuauccaggcgauuuuaucgacuacgaggagcucagggagcagcugagcaguguguccucuuucgaacgguuugagauuuucccgaagacaagcuccuggcccaaucacgauucaaacaagggugucaccgccgcuuguccucaugcaggggccaaaaguuuuuauaagaaucugaucuggcucgugaaaaagggaaacagcuacccaaaauuaucuaauuccuauauaaacgacaagggcaaggaaguacugguucuuuggggcauccaccaccccucaacgagcgcugaucaacagaguuuguaccagaaugccgacgcguacguguucgucgggacuucucgcuauuccaaaaaguuuaaaccugagauugcaauccgaccaaaggugcgugaucaggagggaagaaugaacuacuauuggacccugguggaacccggugacaaaauuacauucgaggccacuggcaaccuagucguuccuagguacgcuuuugccauggaacggaaugcagggagcggaaucauaauuucggauaccccagcucaugacugcaacacaaccugucaaacgccgaagggcgccaucaauacuucucuccccuuccagaacauucacccuaucacaaucgguaaaugcccaaaguaugugaaguccaccaaacugcgcauggcgacugggcuuagaaauguacccucaauucagaguaggggacuguuuggcgccauagcaggcuucaucgaagggggauggacagguaugguggacggcugguacggguaucaucaccagaacgaacaaggaagcggcuacgcugccgauuugaaguccacccagaaugcuauugacgagaucacgaacaaagucaauucugugauagagaagaugaacacccaguuuacagccguugguaaagaguucaaucaccucgaaaagcggauugaaaaccugaauaagaaaguggaugacggguucuuagauaucuggacuuacaacgcagagcugcucguccuucuggaaaaugagcgcaccuuggacuaucaugauagcaacgugaagaaccuauacgagaaaguacgaucacagcugaagaauaacgccaaagaaaucggcaauggauguuuugaguucuaucacaagugcgacaacacauguauggaaaguguuaagaauggcacuuacgauuauccuaaauacuccgaggaagcuaagcucaacagagaggagauugacggggugaaacuggaaagcaccaggaucuaucaaauucuugcgauauacucuacagucgcaucaagucugguguuggucgugagccucggagccaucuccuuuuggaugugcucuaaugguucgcugcagugccggauuuguaucuga

SEQ ID NO: 132647 - RNA, 1701 nt, Artificial Sequence
  derived and/or modified CDS sequence (opt3) from hemagglutinin__InfluenzaA__ADF27935
augaaggccauccuggugguccuccuuuacaccuucgcuacagcaaacgccgacacucugugcauuggcuaucacgcgaauaacagcacggauaccguugacacaguguuggagaagaauguaacugugacccauuccgucaacuuacuggaagauaagcacaaugggaaacuauguaagcucagaggaguggcuccccugcaucuugguaaaugcaacauagccggcuggauccuggggaauccuaagugugagucuuugucaacagaaaguagcugguccuacauuguugagaccucuucgucagacaacggaacuugcuauccaggcgauuuuaucaauuacgaggagcucagggagcagcugagcaguguguccucuuucgaacgguuugagauuuucccgaagacaagcuccuggcccaaccacgacucaaauaaaggugucaccgcagccuguccucaugcuggggcaaagaguuuuuauaaaaaccugaucuggcucgugaagaaaggaaauagcuacccaaaguuaucuaaguccuauauaaacgauaaaggcaaggaaguacugguucuuuggggcauccaccaccccucaacgagcgccgaccaacagaguuuguaccagaaugcugaugccuacguguucgucgggacuucucgcuauuccaaaaaguuuaaaccugagauugcgauccgaccaaaggugcgugaccaggagggaagaaugaacuacuauuggacccugguggaacccggugauaaaauuacauucgaggcaacuggcaaccuagucguuccuagguacgccuuugcuauggaacggaaugccgggagcggaaucauaauuucggacaccccagugcaugauugcaacacaaccugucaaacgccgaagggcgcaaucaauacuucucuccccuuccagaacauucacccuaucacaaucgguaagugcccaaaauauguaaaguccaccaaacugcgccuugcuacugggcugagaaaugugcccucaauucagaguaggggauuguuuggcgccauagcgggcuucaucgaagggggauggacagguauggucgacggcugguacggguaucaucaccagaacgaacaaggaagcggcuacgccgcagaccucaaguccacccagaaugcuauugauaaaaucacgaacaagguaaauucuguuauagagaagaugaacacccaguuuacagccguggguaaagaguucaaucaccuggaaaagcggauugagaacuuaaauaaaaaggucgacgauggguuccuggacaucuggacuuacaacgcugaacuccuugugcuguuggagaaugaacgcacccuagauuaucaugacagcaacgugaaaaaccuguacgagaagguucgaucacagcucaagaauaacgccaaagagaucggcaauggauguuuugaguucuaucacaagugcgauaacacauguauggaaagugugaaaaauggcacuuacgacuauccuaaguacuccgaagaggcaaaacugaacagagaagagauugauggggucaaacuugagagcaccaggaucuaucaaauucuggccauauacucuacaguggcuucaaguuugguccucgugguuagccugggagcgaucuccuuuuggaugugcucuaaugguucguuacagugccggauuuguaucuga

SEQ ID NO: 132648 - RNA, 1701 nt, Artificial Sequence
  derived and/or modified CDS sequence (opt3) from hemagglutinin__InfluenzaA__ADF27955
augaaggccauccuggugguccuccuuuacaccuucgcuacagcaaacgccgacacucugugcauuggcuaucacgcgaauaacagcacggauaccguugacacaguguuggagaagaauguaacugugacccauuccgucaacuuacuggaagauaagcacaaugggaaacuauguaagcucagaggaguggcuccccugcaucuugguaaaugcaacauagccggcuggauccuggggaauccugagugugaaucuuugucaacagcaaguagcugguccuacauuguugagaccucuucgucagacaacggaacuugcuauccaggcgauuuuaucgacuacgaggagcucagggagcagcugagcaguguguccucuuucgaacgguuugagauuuucccgaagacaagcuccuggcccaaucacgauucaaacaagggugucaccgccgcuuguccucaugcaggggccaaaaguuuuuauaagaaucugaucuggcucgugaaaaagggaaacagcuacccaaaauuaucuaauuccuauauaaacgacaagggcaaggaaguacugguucuuuggggcauccaccaccccucaacgagcgcugaucaacagaguuuguaccagaaugccgacgcguacguguucgucgggacuucucgcuauuccaaaaaguuuaaaccugagauugcaauccgaccaaaggugcgugaucaggagggaagaaugaacuacuauuggacccugguggaacccggugacaaaauuacauucgaggccacuggcaaccuagucguuccuagguacgcuuuugccauggaacggaaugcagggagcggaaucauaauuucggauaccccagugcaugacugcaacacaaccugucaaacgccgaagggcgcuaucaauacuucucuccccuuccagaacauucacccuaucacaaucgguaaaugcccaaaguauguaaaguccaccaaacugcgccuugccacugggcugagaaaugugcccucaauucagaguaggggauuguuuggcgcgauagccggcuucaucgaagggggauggacagguauggucgacggcugguacggguaucaucaccagaacgaacaaggaagcggcuacgcagcugaucucaaguccacccagaaugccauugacaaaaucacgaacaagguaaauucuguuauagagaaaaugaacacccaguuuacagcuguggguaaggaguucaaucaccuggaaaagcggauugagaacuuaaauaaaaaggucgaugacggguuccuggauaucuggacuuacaacgccgaacuccuugugcuguuggagaaugaacgcacccuagacuaucaugauagcaacgugaaaaaccuguacgagaagguucgaucacagcucaaaaauaacgcaaaggagaucggcaauggauguuuugaguucuaucacaagugcgacaacacauguauggaaagugugaaaaauggcacuuacgauuauccuaaguacuccgaagaggccaaacugaacagagaagagauugacggggucaaacuugagagcaccaggaucuaucaaauucuggcuauauacucuacaguggcgucaaguuugguccucgugguuagccugggagcaaucuccuuuuggaugugcucuaaugguucguuacagugccggauuuguaucuga

SEQ ID NO: 132649 - RNA, 1701 nt, Artificial Sequence
  derived and/or modified CDS sequence (opt3) from hemagglutinin__InfluenzaA__ADF27965
augaaggccauccuggugguccuccuuuacaccuucgcuacagcaaacgccgacacucugugcauuggcuaucacgcgaauaacagcacggauaccguugacacaguguuggagaagaauguaacugugacccauuccgucaacuuacuggaagauaagcacaaugggaaacuauguaagcucagaggaguggcuccccugcaucuugguaaaugcaacauagccggcuggauccuggggaauccugagugugaaucuuugucaacagcaaguagcugguccuacauuguugagaccucuucgucagacaacggaacuugcuauccaggcgauuuuaucgacuacgaggaacucagggagcagcugagcaguguguccucuuucgaacgguuugagauuuucccgaagacaagcuccuggcccaaucacgauucaaacaagggugucaccgccgcuuguccucaugcaggggccaaaaguuuuuauaagaaucugaucuggcucgugaaaaagggaaacagcuacccaaaauuaucuaaguccuauauaaaugacaagggcaaaaagguacugguucuuuggggcauccaccaccccucaacgagcgcugaucaacagaguuuguaccagaacgccgacgcguacguguucgucgggacuucucgcuauuccaaaaaguuuaaaccugaaauugcaauccgaccaaaggugcgugaucaggagggaagaaugaauuacuauuggacccugguggagcccggugacaaaauuacauucgaagccacuggcaaccuagucguuccuagguacgcuuuugccauggagcggaacgcagggagcggaaucauaauuucggauaccccagugaaugacugcaacacaaccugucaaacgccgaagggcgcuaucaauacuucucuccccuuccagaacauucauccuaucacaaucgguaagugcccaaaauauguaaaguccaccaaacugcgccuugccacugggcugagaaaugugcccucaauucagaguaggggauuguuuggcgcgauagccggcuucaucgaagggggauggacagguauggucgacggcugguacggguaucaccaucagaacgagcaaggaagcggcuacgcagcugaucucaaguccacccagaaugccauugacaaaaucacgaacaagguaaauucuguuauagaaaagaugaacacccaguuuacagcuguggguaaagaguucaaucaccuggagaagcggauugaaaacuuaaauaaaaaggucgaugacggguuccuggauaucuggacuuacaacgccgagcuccuugugcuguuggaaaaugagcgcacccuagacuaucacgauagcaacgugaaaaaccuguacgaaaagguucgaucacagcucaagaauaacgcaaaagagaucggcaauggauguuuugaguucuaucauaagugcgacaacacauguauggaaagugugaaaaauggcacuuacgauuauccuaaguacuccgaggaagccaaacugaacagagaggaaauugacggggucaaacuugagagcaccaggaucuaucaaauucuggcuauauacucuacaguggcgucaaguuugguccucgugguuagccugggagcaaucuccuuuuggaugugcucuaaugguucguuacagugccggauuuguaucuga

SEQ ID NO: 132650 - RNA, 1701 nt, Artificial Sequence; identical to SEQ ID NO: 131881
  derived and/or modified CDS sequence (opt3) from hemagglutinin__InfluenzaA__ADF27975

SEQ ID NO: 132651 - RNA, 1701 nt, Artificial Sequence; identical to SEQ ID NO: 131889
  derived and/or modified CDS sequence (opt3) from hemagglutinin__InfluenzaA__ADF27985

SEQ ID NO: 132652 - RNA, 1701 nt, Artificial Sequence
  derived and/or modified CDS sequence (opt3) from hemagglutinin__InfluenzaA__ADF27995
augaaggccauccuggugguccuccuuuacaccuucgcuacagcaaacgccgacacucugugcauuggcuaucacgcgaauaacagcacggauaccguugacacaguguuggagaagaauguaacugugacccauuccgcuaacuuacuggaagauaagcacaaugggaaacuauguaagcucagaggagucgcaccccugcaucuugguaaaugcaacauagccggcuggauccuggggaauccugagugugaaucuuugucaacagccaguagcugguccuacauuguggagaccucuucgucagacaacggaacuugcuauccaggcgauuuuaucgacuacgaggagcucagggagcagcugagcaguguuuccucuuucgaacgguuugagauuuucccgaagacaagcuccuggcccaaucacgauucaaacaagggugugaccgcugcauguccucaugccggggcuaaaaguuuuuauaagaaucugaucuggcucgucaaaaagggaaacagcuacccaaaauuaucuaaguccuauauaaaugacaagggcaaagaagugcugguacuuuggggcauccaccaccccucaacgaacgccgaucaacagagcuuguaccagaaugcggacgcauacguuuucguggggaccagucgcuauucuaagaaauuuaagccugagauugccauccgaccaaaaguccgugaucaggagggaagaaugaacuacuauuggacucugguggaacccggugacaagauuacauucgaggcuacuggcaaccuaguggucccuagguacgccuuugcaauggaacggaaugcuggguccggaaucauaauuagcgauaccccagcccaugacugcaacacaaccugucaaacgccgaaaggcgcgaucaauacuucgcuccccuuccagaacauucacccuaucacaaucgguaagugcccaaaguauguuaaaucuaccaagcugcgccuugccacugggcugagaaauauucccuccauacagucaaggggauuguuuggcgcaaucgcuggcuucauugaagggggauggacagguaugguggacggcugguacggguaucaucaccagaacgaacaaggaaguggcuacgccgcugaucucaaaagcacccagaaugccaucgacgagauaacgaacaagguaaauuccgugauugagaaaaugaacacccaguuuacagcagucgguaaggaguucaaucaccuggaaaagcggaucgaaaacuuaaauaaaaagguggaugacggguuccuggauaucuggacuuacaacgccgagcuccuuguucuguuggaaaaugagcgcacccuagacuaucaugauucuaacgugaaaaaccuguacgagaagguccgaagccagcucaaaaauaacgcuaaggaaauuggcaauggauguuuugaguucuaucacaagugcgacaacacauguauggaaucagugaaaaauggcacuuacgauuauccuaaguacagugaggaagcgaaacugaacagagaggagaucgacgggguaaaacuugaauccaccaggauuuaucaaauacuggcaaucuacagcacaguugccucuucauuggugcucgucgugagucugggagcuauuagcuuuuggaugugcuccaaugguucuuuacagugccggaucuguaucuga

SEQ ID NO: 132653 - RNA, 1701 nt, Artificial Sequence; identical to SEQ ID NO: 132269
  derived and/or modified CDS sequence (opt3) from hemagglutinin__InfluenzaA__ADF28005

SEQ ID NO: 132654 - RNA, 1701 nt, Artificial Sequence; identical to SEQ ID NO: 132269
  derived and/or modified CDS sequence (opt3) from hemagglutinin__InfluenzaA__ADF28015

SEQ ID NO: 132655 - RNA, 1701 nt, Artificial Sequence; identical to SEQ ID NO: 131881
  derived and/or modified CDS sequence (opt3) from hemagglutinin__InfluenzaA__ADF28025

SEQ ID NO: 132656 - RNA, 1701 nt, Artificial Sequence; identical to SEQ ID NO: 131881
  derived and/or modified CDS sequence (opt3) from hemagglutinin__InfluenzaA__ADF28045

SEQ ID NO: 132657 - RNA, 1701 nt, Artificial Sequence
  derived and/or modified CDS sequence (opt3) from hemagglutinin__InfluenzaA__ADF28055
augaaggccauccuggugguccuccuuuacaccuucgcuacagcaaacgccgacacucugugcauuggcuaucacgcgaauaacagcacggauaccguugacacaguguuggagaaaaauguaacugugacccauuccgucaacuuacuggaagauaagcacaaugggaaacuauguaagcucagaggaguggcuccccugcaucuugguaaaugcaacauagccggcuggauccuggggaauccugagugugaaucuuugucaacagcaaguagcugguccuacauuguugagaccucuucgucagacaacggaacuugcuauccaggcgauuuuaucgacuacgaggagcucagggagcagcugagcaguguguccucuuucgaacgguuugagauuuucccgaagacaagcuccuggcccaauuaugauucaaacaagggugucaccgccgcuuguccucacgcaggggccaaaaguuuuuacaagaaucugaucuggcucgugaaaaagggaaacagcuauccaaaauuaucuaaguccuacauaaaugacaagggcaaagaaguacugguucuuuggggcauccaucaccccucaacgagcgcugaucaacagaguuuguaccagaacgccgacgcguauguguucgucgggacuucucgcuacuccaagaaauuuaagccugagauugcaauccgaccaaaagugcgugaucaggagggaagaaugaauuauuacuggacccugguggaacccggugacaagauuacauucgaggccacuggcaaccuagucguuccuagguaugcuuuugccauggaacggaacgcagggagcggaaucauaauuucggauaccccagugcacgacugcaauacaaccugucaaacgccgaaaggcgcuaucaacacuucucuccccuuccagaauauucauccuaucacaaucgguaagugcccaaaguacguaaaauccaccaagcugcgccuugccacugggcugagaaacgugcccucaauucagaguaggggauuguuuggcgcgauagccggcuucaucgaagggggauggacagguauggucgacggcugguauggguaccaccaucagaaugaacaaggaagcggcuacgcagcugaucucaaauccacccagaacgccauugacaagaucacgaauaaagugaacucuguuauagagaagaugaauacccaguuuacagcuguggguaaggaguucaaccaccuggaaaaacggauugagaauuuaaacaagaaagucgaugacggguuccuggauaucuggacuuauaaugccgaacuccuugugcuguuggagaacgaacgcacccuagacuaccacgauagcaauguaaagaaccuguaugagaaaguucgaucacagcucaagaacaaugcaaaggagaucggcaacggauguuuugaguucuaccauaaaugcgacaauacauguauggaaagugugaagaacggcacuuaugauuacccuaaauauuccgaagaggccaagcugaauagagaagagauugacggggucaaacuugagagcaccaggaucuaccaaauucuggcuauauacucuacaguggcgucaaguuugguccucgugguuagccugggagcaaucuccuuuuggaugugcucuaacgguucguuacagugccggauuuguaucuga

SEQ ID NO: 132658 - RNA, 1701 nt, Artificial Sequence; identical to SEQ ID NO: 131881
  derived and/or modified CDS sequence (opt3) from hemagglutinin__InfluenzaA__ADF28065

SEQ ID NO: 132659 - RNA, 1701 nt, Artificial Sequence; identical to SEQ ID NO: 130899
  derived and/or modified CDS sequence (opt3) from hemagglutinin__InfluenzaA__ADF28075

SEQ ID NO: 132660 - RNA, 1701 nt, Artificial Sequence; identical to SEQ ID NO: 131818
  derived and/or modified CDS sequence (opt3) from hemagglutinin__InfluenzaA__ADF28085

SEQ ID NO: 132661 - RNA, 1701 nt, Artificial Sequence; identical to SEQ ID NO: 130897
  derived and/or modified CDS sequence (opt3) from hemagglutinin__InfluenzaA__ADF28107

SEQ ID NO: 132662 - RNA, 1701 nt, Artificial Sequence; identical to SEQ ID NO: 132269
  derived and/or modified CDS sequence (opt3) from hemagglutinin__InfluenzaA__ADF28117

SEQ ID NO: 132663 - RNA, 1701 nt, Artificial Sequence
  derived and/or modified CDS sequence (opt3) from hemagglutinin__InfluenzaA__ADF29918
augaaggccauccuggugguccuccuuuacaccuucgcuacagcaaacgccgacacucugugcauuggcuaucacgcgaauaacagcacggauaccguugacacaguguuggagaaaaauguaacugugacccauuccgucaacuuacuggaagauaagcacaaugggaaacuauguaagcucagaggaguggcuccccugcaucuugguaaaugcaacauagccggcuggauccuggggaauccugagugugaaucuuugucaacagcaaguagcugguccuacauuguugagaccucuucgucagacaacggaacuugcuauccaggcgauuuuaucgacuacgaggagcucagggagcagcugagcaguguguccucuuucgaacgguuugagauuuucccgaagacaagcuccuggcccaaucacgauucaaacaagggugucaccgccgcuuguccucaugcaggggccaaaaguuuuuauaagaaucugaucuggcucgugaaaaagggaaacagcuacccaaaauuaucucgcuccuauauaaaugacaagggcaaggaaguacugguucuuuggggcauccaccaccccucaacgagcgcugaucaacagaguuuguaccagaacgccgacgcguacguguucgucgggacuucucgauauuccaaaaaguuuaaaccugagauugcaauccguccaaaggugagaaaucaggagggaaggaugaacuacuauuggacccugguggaacccggugauaaaauuacauucgaggccacuggcaaccuagucguuccucgguacgcuuuugccauggaacgcaaugcagggagcggaaucauaauuucggacaccccagugcaugauugcaacacaaccugucaaacgccgaagggcgcuaucaauacuucucuccccuuccagaacauucacccuaucacaaucgguaaaugcccaaaguauguaaaguccaccaaacugagacuugccacugggcugaggaaugugcccucaauucagagucggggauuguuuggcgcgauagccggcuucaucgaagggggauggacagguauggucgacggcugguacggguaucaucaccagaacgaacaaggaagcggcuacgcagcugaccucaaguccacccagaaugccauugaugagaucacgaacaaaguuaauucugugauagagaagaugaacacccaguuuacagcuguggguaaagaguucaaucaccuggaaaagcgcauugaaaacuuaaauaagaaagucgacgauggguuccuggacaucuggacuuacaacgccgagcuccuugugcuguuggaaaaugagcgaacccuagauuaucaugacagcaacguaaagaaccuguacgagaaaguuagaucacagcucaagaauaacgcaaaagaaaucggcaauggauguuuugaguucuaucacaagugcgauaacacauguauggaaagugugaagaauggcacuuacgacuauccuaaauacuccgaggaagccaagcugaacagggaggagauugauggggucaaacuugaaagcacccggaucuaucaaauucuggcuauauacucuacaguggcgucaaguuugguccucgugguuagccugggagcaaucuccuuuuggaugugcucuaaugguucguuacagugccguauuuguaucuga

SEQ ID NO: 132664 - RNA, 1701 nt, Artificial Sequence
  derived and/or modified CDS sequence (opt3) from hemagglutinin__InfluenzaA__ADF42689
augaaggccauccuggugguccuccuuuacaccuucgcuacagcaaacgccgacacucugugcauuggcuaucacgcgaauaacagcacggauaccguugacacaguguuggagaaaaauguaacugugacccauuccgucaacuuacuggaagauaagcacaaugggaaacuauguaagcucagaggaguggcuccccugcaucuugguaaaugcaacauagccggcuggauccuggggaauccugagugugaaucuuugucaacagcaaguagcugguccuacauuguugagaccucuucgucagacaacggaacuugcuauccaggcgauuuuaucgacuacgaggagcucagggagcagcugagcaguguguccucuuucgaacgguuugagauuuucccgaagacaagcuccuggcccaaucacgauucaaacaagggugucaccgccgcuuguccucaugcaggggccaaaaguuuuuauaagaaucugaucuggcucgugaaaaagggaaacagcuacccaaaauuaucuaaguccuauauaaaugacaagggcaaagaaguacugguucuuuggggcauccaccaccccucaacgagcgcugaucaacagaguuuguaccagaacgccgacgcguacguguucgucgggacuucucgcuauuccaagaaauuuaagccugagauugcaauccgaccaaaagugcgugaucaggagggaagaaugaauuacuauuggacccugguggaacccggugacaagauuacauucgaggccacuggcaaccuagucguuccuagguacgcuuuugccauggaacggaacgcagggagcggaaucauaauuucggauaccccagugcaugacugcaauacaaccugucaaacgccgaaaggcgcuaucaacacuucucuccccuuccagaauauucacccuaucacaaucgguaagugcccaaaguauguaaaauccaccaagcugcgccuugccacugggcugagaaacgugcccucaauucagaguaggggauuguuuggcgcgauagccggcuucaucgaagggggauggacagguauggucgacggcugguacggguaucaucaccagaaugaacaaggaagcggcuacgcagcugaucucaaauccacccagaacgccauugacgagaucacgaauaaggugaacucuguuauagagaaaaugaauacccaguuuacagcuguggguaaggaguucaaccaccuggaaaagcggauugaaaauuuaaacaaaaaggucgaugacggguuccuggauaucuggacuuacaaugccgagcuccuugugcuguuggaaaacgagcgcacccuagacuaucaugauagcaauguaaagaaccuguacgagaagguucgaucacagcucaaaaacaaugcaaaggaaaucggcaacggauguuuugaguucuaucacaagugcgacaauacauguauggaaagugugaaaaacggcacuuacgauuauccuaaguacuccgaggaagccaaacugaauagagaggagauugacggggucaaacuugaaagcaccaggaucuaucaaauucuggcuauauacucuacaguggcgucaaguuugguccucgcagugagccugggagccaucgguuuuuggaugugcuccaacggcucuuuacagugccggauuuguaucuga

SEQ ID NO: 132665 - RNA, 1701 nt, Artificial Sequence
  derived and/or modified CDS sequence (opt3) from hemagglutinin__InfluenzaA__ADF42699
augaaggccauccuggugguccuccuuuacaccuucgcuacagcaaacgccgacacucugugcauuggcuaucacgcgaauaacagcacggauaccguugacacaguguuggagaaaaauguaacugugacccauuccgucaacuuacuggaagauaagcacaaugggacacuauguaaacucagaggaguggcuccccugcaucuugguaagugcaacauagccggcuggauccuggggaauccugagugugaaucuuugucaaccgcaaguagcugguccuacauuguugagacuucuucgucagacaacggaacaugcuauccaggcgauuuuaucgacuacgaggagcucagggagcagcugagcaguguguccucuuucgaacgguuugagauguucccgaaaaccagcuccuggcccaaucacgauucaaacaagggugucacggccgcuuguccucaugcaggggccaagaguuuuuauaaaaaucugauuuggcucgugaagaaaggaaacagcuacccaaaguuaucuaaauccuauaucaaugacaagggcaaggaaguacugguucuuuggggcauacaccaccccucaacuagcgcugaucaacagaguuuguaccagaacgccgacgcguacguguucgucgggaccucucgcuauuccaaaaaguuuaaaccugagaucgcaauucgaccaaaggugcgugaucaggagggaagaaugaauuacuauuggacacugguggaacccggugacaaaaucacuuucgaggccaccggcaaccuagucguuccuagguacgcuuuugccauggaacggaacgcagggagcggaauuaucauaucggauacaccagugcaugacugcaauaccacgugucaaacuccgaagggcgcuauuaacacaucucuccccuuccagaauauccacccuauuaccaucgguaaaugcccaaaguauguaaaguccacuaaacugcgccuugccacagggcugagaaacgugcccucaauccagaguaggggauuguuuggcgcgauugccggcuucauagaagggggauggaccgguauggucgacggcugguacggguaucaucaccagaaugaacaaggaagcggcuacgcagcugaucucaaguccacgcagaacgccaucgacgagauuaccaauaaagugaacucuguuaucgagaagaugaauacacaguuuacugcuguggguaaagaguucaaccaccuggaaaagcggauagaaaauuuaaacaagaaagucgaugacggguuccuggauauuuggaccuacaaugccgagcuccuugugcuguuggaaaacgagcgcacacuagacuaucaugauagcaauguaaagaaccuguacgagaaaguucgaucacagcucaagaacaaugcaaaagaaaucggcaacggauguuuugaguucuaucacaagugcgacaauacuuguauggaaagugugaagaacggcaccuacgauuauccuaaauacuccgaggaagccaagcugaauagagaggagaucgacggggucaaacuugaaagcacaaggauuuaucaaauccuggcuauuuacucuaccguggcgucaaguuugguccucgugguuagccugggagcaauauccuuuuggaugugcucuaacgguucguuacagugccggaucuguauuuga

SEQ ID NO: 132666 - RNA, 1701 nt, Artificial Sequence; identical to SEQ ID NO: 131881
  derived and/or modified CDS sequence (opt3) from hemagglutinin__InfluenzaA__ADF42709

SEQ ID NO: 132667 - RNA, 1701 nt, Artificial Sequence; identical to SEQ ID NO: 131881
  derived and/or modified CDS sequence (opt3) from hemagglutinin__InfluenzaA__ADF42719

SEQ ID NO: 132668 - RNA, 1701 nt, Artificial Sequence; identical to SEQ ID NO: 131881
  derived and/or modified CDS sequence (opt3) from hemagglutinin__InfluenzaA__ADF42729

SEQ ID NO: 132669 - RNA, 1701 nt, Artificial Sequence; identical to SEQ ID NO: 131881
  derived and/or modified CDS sequence (opt3) from hemagglutinin__InfluenzaA__ADF42739

SEQ ID NO: 132670 - RNA, 1701 nt, Artificial Sequence
  derived and/or modified CDS sequence (opt3) from hemagglutinin__InfluenzaA__ADF58349
augaaggccauccuggugguccuccuuuacaccuucgcuacagcaaacgccgacacucugugcauuggcuaucacgcgaauaacagcacggauaccguugacacaguguuggagaaaaauguaacugugacccauuccgucaacuuacuggaagauaagcacaaugggaaacuauguaagcucagaggaguggcuccccugcaucuugguaaaugcaacauagccggcuggauccuggggaauccugagugugaaucuuugucaacagcaaguagcugguccuacauuguugagaccucuucgucagacaacggaacuugcuauccaggcgauuuuaucgacuacgaagaacucagggagcagcugagcaguguguccucuuucgaacgguuugagauuuucccgaagacaagcuccuggcccgaucacgacucaaauaagggugucaccgccgcuuguccucaugcaggggccaaaaguuuuuauaagaaccugaucuggcucgugaaaaagggaaauagcuacccaaaauuaucuaaguccuauauaaacgauaagggcaaagaaguacugguucuuuggggcauccaccaccccucaacgagcgcugaccaacagaguuuguaccagaaugccgaugcguacguguucgucgggacuucucgcuauuccaagaaauuuaagccugagauugcaauccgaccaaaagugcgugagagagaaggaaggaugaacuacuauuggacccugguggagcccggugacaagauuacauucgaagccacuggcaaucuagucguuccucgguacgcuuuugccauggagcgcaacgcagggagcggaaucauaauuucggauaccccagugcaugacugcaacacaaccugucagacgccgaaaggcgcuaucaauacuucucuccccuuccaaaacauucacccuaucacaaucgguaagugcccaaaguauguaaaauccaccaagcugagacuugccacugggcugaggaaugugcccucaauucagagucggggauuguuuggcgcgauagccggcuucaucgaagggggauggacagguauggucgacggcugguacggguaucaucaccagaacgagcagggaagcggcuacgcagcugaucucaaauccacccaaaaugccauugacgagaucacgaacaagguaaauucuguuauagaaaagaugaacacccaguuuacagcuguggguaaggaguucaaucaccuggaaaagcgcauugagaacuuaaauaaaaaggucgaugacggguuccuggauaucuggacuuacaacgccgaacuccuugugcuguuggagaaugagcgaacccuagacuaucaugauagcaacgugaaaaaucuguacgaaaagguuagaucacagcucaaaaacaacgcaaaggagaucggcaauggauguuuugaguucuaucacaagugcgacaacacauguauggagagugugaaaaauggcacuuacgauuauccuaaguacuccgaagaggccaaacugaacagggaggaaauugacggggucaaacuugagagcacccggaucuaucagauucuggcuauauacucuacaguggcgucaaguuugguccucgugguuagccugggagcaaucuccuuuuggaugugcucuaaugguucguuacaaugccguauuuguaucuga

SEQ ID NO: 132671 - RNA, 1701 nt, Artificial Sequence; identical to SEQ ID NO: 132314
  derived and/or modified CDS sequence (opt3) from hemagglutinin__InfluenzaA__ADF58351

SEQ ID NO: 132672 - RNA, 1701 nt, Artificial Sequence
  derived and/or modified CDS sequence (opt3) from hemagglutinin__InfluenzaA__ADF80454
augaaggccauccuggugguccuccuuuacaccuucgcuacagcaaacgccgacacucugugcauuggcuaucacgcgaauaacagcacggauaccguugacacaguguuggagaaaaauguaacugugacccauuccgucaacuuacuggaagauaagcacaaugggaaacuauguaagcucagaggaguggcuccccugcaucuugguaaaugcaacauagccggcuggauccuggggaauccugagugugaaucuuugucaacagcaaguagcugguccuacauuguugagaccucuucgucagacaacggaacuugcuauccaggcgauuuuaucgacuacgaagaacucagggagcagcugagcaguguguccucuuucgaacgguuugagauuuucccgaagacaagcuccuggcccaaucacgauucaaacaagggugucaccgccgcuuguccucaugcaggggccaaaaguuuuuauaagaaucugaucuggcucgugaaaaagggaaacagcuacccaaaauuaucuaaguccuauauaaaugacaagggcaaagaaguacugguucuuuggggcauccaccaccccucaacgagcgcugaucaacagaguuuguaccagaacgccgacgcguacguguucgucgggacuucucgcuauuccaagaaauuuaagccugagauugcaauccgaccaaaagugcgugaucaggagggaagaaugaauuacuauuggacccugguggaacccggugacaagauuacauucgaggccacuggcaaccuagucguuccuagguacgcuuuugccauggaacggaacgcagggagcggaaucauaauuucggauaccccagugcaugacugcaauacaaccugucaaacgccggagggcgcuaucaacacuucucuccccuuccagaauauucacccuaucacaaucgguaaaugcccaaaguauguaaaguccaccaaacugcgccuugccacugggcugagaaacgugcccucaauucagaguaggggauuguuuggcgcgauagccggcuucaucgaagggggauggacagguauggucgacggcugguacggguaucaucaccagaaugagcaaggaagcggcuacgcagcugaucucaaguccacccagaacgccauugacgagaucacgaauaaagugaacucuauaauugaaaagaugaauacccaguuuacagcuguugguaaagaguucaaccaccuggaaaagcggaucgagaauuuaaacaagaaaguggaugacggguuccuggauaucuggacuuacaaugccgaacuccuuguccuguuggagaacgagcgcacccuagacuaucaugauagcaaugugaagaaccuguacgaaaaaguacgaucacagcucaagaacaaugcaaaagagauuggcaacggauguuuugaguucuaucacaagugcgacgauacauguauggagaguguuaagaauggcacuuacgacuauccuaaauacuccgaagaggccaagcugaacagagaggaaaucgauggggugaaacuugagagcaccaggauuuaucaaauacuggcuaucuacucuacagucgcgucaaguuuggugcucgucgugagccugggagcaauuuccuuuuggaugugcucuaaugguucguuacagugccggaucuguaucuga

SEQ ID NO: 132673 - RNA, 1701 nt, Artificial Sequence
  derived and/or modified CDS sequence (opt3) from hemagglutinin__InfluenzaA__ADF80462
augaaggccauccuggugguccuccuuuacaccuucgcuacagcaaacgccgacacucugugcauuggcuaucacgcgaauaacagcacggauaccguugacacaguguuggagaagaauguaacugugacccauuccgucaacuuacuggaagauaagcacaaugggaaacuauguaagcucagaggaguggcuccccugcaucuugguaaaugcaacauagccggcuggauccuggggaauccugagugugaaucuuugucaacagcaaguagcugguccuacauuguugagaccucuaacucggacaauggaacuugcuauccaggcgauuuuaucgacuacgaggagcucagggagcagcugucaagcgugaguuccuucgaacgguuugagauuuucccgaagaucucuagcuggcccaaccacgauuccaauaagggugucacagccgcuuguccucaugcaggggccaaaucauuuuauaagaaccugauauggcucgugaaaaagggaaauaguuacccaaaauuaagcaagucuuauaucaacgacaagggcaaagaaguacugguucuuuggggcauucaccaccccuccaccucagcugaucaacagagcuuguaccagaaugccgacgcguacguguucgucgggacgagucgcuauucuaagaaauuuaagccugagaucgcaauucgaccaaaagugcgugaucaggagggaagaaugaacuacuauuggacucugguggaacccggugacaagaucaccuucgaggccacaggcaaccuagucguuccuagguacgcuuuugccauggaacggaaugcaggguccggaauaauuaucagcgauacuccagugcaugacugcaacaccacaugucaaaccccgaaaggcgcuauuaauacgucgcuccccuuccagaacauccacccuaucacuauugguaagugcccaaaguauguaaaaucuacaaagcugcgccuugccaccgggcugagaaaugugcccuccauacagucaaggggauuguuuggcgcgaucgccggcuucauugaagggggauggacugguauggucgacggcugguacggguaucaucaccagaacgaacaaggaaguggcuacgcagcugaucucaaaagcacacagaaugccaucgacgagauaaccaacaagguaaauuccguuauugagaaaaugaacacgcaguuuaccgcuguggguaaggaguucaaucaccuggaaaagcggaucgaaaacuuaaauaaaaaggucgaugacggguuccuggauaucuggacauacaacgccgagcuccuugugcuguuggaaaaugagcgcacucuagacuaucaugauucuaacgugaaaaaccuguacgagaagguucgaagccagcucaaaaauaacgcaaaggaaauuggcaauggauguuuugaguucuaucacaagugcgacaacaccuguauggaaucagugaaaaauggcacauacgauuauccuaaguacagugaggaagccaaacugaacagagaggagaucgacggggucaaacuugaauccacuaggauuuaucaaauacuggcuaucuacagcaccguggcgucuucauugguccucgugguuagucugggagcaauuagcuuuuggaugugcuccaaugguucuuuacagugccggaucuguaucuga

SEQ ID NO: 132674 - RNA, 1701 nt, Artificial Sequence; identical to SEQ ID NO: 130717
  derived and/or modified CDS sequence (opt3) from hemagglutinin__InfluenzaA__ADF80470

SEQ ID NO: 132675 - RNA, 1701 nt, Artificial Sequence
  derived and/or modified CDS sequence (opt3) from hemagglutinin__InfluenzaA__ADF80478
augaaggccauccuggugguccuccuuuacaccuucgcuacagcaaacgccgacacucugugcauuggcuaucacgcgaauaacagcacggauaccguugacacaguguuggagaagaauguaacugugacccauuccgucaacuuacuggaagauaagcacaaugggaaacuauguaagcucagaggaguggcuccccugcaucuugguaaaugcaacauagccggcuggauccuggggaauccugagugugaaucuuugucaacagcaaguagcugguccuacauuguugagaccucuucgucagacaacggaacuugcuauccaggcgauuuuaucgacuacgaggagcucagggagcagcugagcaguguguccucuuucgaacgguuugagauuuucccgaagacaagcuccuggcccaaucacgauccuaacaagggugucaccgccgcuuguccacaugcaggggccaaaucauuuuauaagaaucugaucuggcucgugaaaaagggaaacaguuaccccaaauuaagcaagucuuauauaaaugacaagggcaaagaaguacugguucuuuggggcauccaccacccuuccacgucagcugaucaacagagcuuguaccagaacgccgacgcguacguguucgucgggaccagucgcuauucuaagaaauuuaagccagagauugcaauccgacccaaagugcgugaucaggagggaagaaugaauuacuauuggacucugguggaaccuggugacaagauuacauucgaggccacuggcaaccuaauggucccaagguacgcuuuugccauggaacggaacgcaggguccggaaucauaauuagcgauaccccgguucaugacugcaauacaaccugucaaacgcccaaaggcgcuaucaacacuucgcucccuuuccagaauauucacccaaucacaaucgguaagugccccaaguaugugaaaucuaccaagcugcgccuugccacugggcugagaaacguaccuuccauucagucaaggggauuguuuggcgcgauagccggcuucaucgaagggggauggacagguaugguggacggcugguacggguaucaucaccagaaugaacaaggaaguggcuacgcagcugaucucaaaagcacccagaacgccauugacgagaucacgaauaaggucaacuccgugauagagaaaaugaauacccaguuuacagcuguugguaaggaguucaaccaccuggaaaagcggauugaaaauuuaaacaaaaagguggaugacggguuccuggauaucuggacuuacaaugccgagcuccuuguccuguuggaaaacgagcgcacccuagacuaucaugauucuaaugugaaaaaccuguacgagaagguacgaagccagcucaaaaacaaugcaaaggaaaucggcaacggauguuuugaguucuaucacaagugcgacaauacauguauggaaucaguuaaaaacggcacuuacgauuauccaaaguacagugaggaagccaaacugaauagagaggagauugacggggugaaacuugaauccaccaggaucuaucaaauucuggcuauauacagcacagucgcgucuucauuggugcucgucgugagucugggagcaaucagcuuuuggaugugcuccaacgguucuuuacagugccggauuuguaucuga

SEQ ID NO: 132676 - RNA, 1701 nt, Artificial Sequence
  derived and/or modified CDS sequence (opt3) from hemagglutinin__InfluenzaA__ADF80494
augaaggccauccuggugguccuccuuuacaccuucgcuacagcaaacgccgacacucugugcauuggcuaucacgcgaauaacagcacggauaccguugacacaguguuggagaaaaauguaacugugacccauuccgucaacuuacuggaagauaagcacaaugggaaacuauguaagcucagaggaguggcuccccugcaucuugguaaaugcaacauagccggcuggauccuggggaauccugagugugaaucuuugucaacagcaaguagcugguccuacauuguugagaccucuucgucagacaacggaacuugcuauccaggcgauuuuaucgacuacgaggagcucagggagcagcugagcaguguguccucuuucgaacgguuugagauuuucccgaagacaagcuccuggcccaaucacgauucaaacaagggugucaccgccgcuuguccucaugcaggggccaaaaguuuuuauaagaaucugaucuggcucgugaaaaagggaaacagcuacccaaaauuaucuaaguccuauauaaaugacaagggcaaagaaguacugguucuuuggggcauccaccaccccucaacgagcgcugaucaacagaguuuguaccagaacgccgacgcguacguguucgucgggacuucucgcuauuccaagaaauuuaagccugagauugcaauccgaccaaaagugcgugaucaggagggaagaaugaauuacuauuggacccugguggaacccggugacaagauuacauucgaggccacuggcaaccuacucgucccuagguacgcuuuugccauggaacggaacgcagggagcggaaucauaauuucggauaccccaguucaugacugcaauacaaccugucaaacgccgaaaggcgcuaucaacacuucucugcccuuccagaauauucacccuaucacaaucgguaagugcccaaaguaugugaaauccaccaaacuucgccuggccacuggguugagaaacguacccucaauucagaguaggggacucuuuggcgcgauagccggcuucaucgaagggggauggacagguaugguggacggcugguacggguaucaucaccagaaugaacaaggaagcggcuacgcagcugaucugaaguccacccagaacgccauugacgagaucacgaauaaggucaacucugugauagagaaaaugaauacccaguuuacagcuguugguaaggaguucaaccacuuagaaaagcggauugaaaaucugaacaaaaagguggaugacggguuccucgauaucuggacuuacaaugccgagcuucuggucuugcuagaaaacgagcgcacccuggacuaucaugauagcaaugugaaaaaccucuacgagaagguacgaucacagcugaaaacaaacgcaaaggaaaucggcaauggauguuuugaguucuaucacaagugcgacaacacuuguauggaaaguguuaaaaauggcaccuacgauuauccuaaguacuccgaggaagccaaacuuaacagagaggagauugacggggugaagcuggaaagcacaaggaucuaucaaauuuuggcuauauacucuaccgucgcgucaagucucgugcuggucgugagcuuaggagcaaucuccuuuuggaugugcucuaaugguucgcugcagugccggauuuguaucuga

SEQ ID NO: 132677 - RNA, 1701 nt, Artificial Sequence; identical to SEQ ID NO: 132676
  derived and/or modified CDS sequence (opt3) from hemagglutinin__InfluenzaA__ADF80498

SEQ ID NO: 132678 - RNA, 1701 nt, Artificial Sequence; identical to SEQ ID NO: 131341
  derived and/or modified CDS sequence (opt3) from hemagglutinin__InfluenzaA__ADF80502

SEQ ID NO: 132679 - RNA, 1701 nt, Artificial Sequence
  derived and/or modified CDS sequence (opt3) from hemagglutinin__InfluenzaA__ADF80506
augaaggccauccuggugguccuccuuuacaccuucgcuacagcaaacgccgacacucugugcauuggcuaucacgcgaauaacagcacggauaccguugacacaguguuggagagaaauguaacugugacccauuccgucaacuuacuggaagauaaacacaaugggaagcuauguaaacucaggggaguggcuccccugcaucuugguaagugcucuauagccggcuggauccuggggaacccugagugugaaucauugaguacagcaagcuccuggucuuacauuguugagaccucgucaagcgacaauggaacuugcuauccaggcgauuuuaucgacuacgaagaacuccgggagcagcugaguuccgugucuagcuucgaacgcuuugagauuuucccgaaaacauccucauggcccaaccacgauccuaauaagggugucaccgccgcuuguccacaugcaggggccaagaguuuuuauaaaaaccugaucuggcucgugaagaaagaaaauagcuaccccaaguuaucuaaauccuauauaaacgacaagggaaaggagguacugguucuuuggggcauccaccacccuucaacgagcgcugaucaacagaguuuguaccagaaugccgacgcguacguguucgucggcacuucucgauauuccaaaaaguuuaaaccagagauugcaauccgucccaaggugagagaucaggaagggaggaugaacuacuauuggacccugguggagccuggagacaaaauuacauucgaagccacugguaaucuagucguuccacgguacgcuuuugccauggagcgcaacgcaggcagcgggaucauaauuucggauaccccggugcaugacugcaacacaaccugucaaacgcccaagggagcuaucaauacuucucucccuuuccagaacauucacccaaucacaaucggcaaaugccccaaguauguaaaguccaccaaacugagacuugccacuggucugaggaaugugccuucaauucagagucggggguuguuuggagcgauagccggcuucaucgaaggcggguggacaggaauggucgacgguugguacggcuaucaucaccagaacgagcaagggagcggauacgcagcugaucucaaguccacccagaaugccauugacgagaucacgaacaaaguuaauucugugauagaaaagaugaacacccaguuuacagcugugggcaaagaguucaaucaccuggaaaagcgcauugagaacuuaaauaagaaagucgaugacgguuuccuggauaucuggacuuacaacgccgaacuccuugugcuguuggagaaugagcgaacccuagacuaucaugauagcaacguaaagaaucuguacgaaaaaguuagaucacagcucaagaacaacgcaaaagagaucgggaauggcuguuuugaguucuaucacaagugcgacaacacauguauggagagugugaagaauggaacuuacgauuauccaaaauacuccgaagaggccaagcugaacagggaggaaauugacggcgucaaacuugagagcacccggaucuaucaaauucuggcuauauacucuacaguggcgucaaguuugguccucgugguuagccugggggcaaucuccuuuuggaugugcucuaauggaucguuacagugccguauuuguaucuga

SEQ ID NO: 132680 - RNA, 1701 nt, Artificial Sequence
  derived and/or modified CDS sequence (opt3) from hemagglutinin__InfluenzaA__ADF83741
augaagaccaucauugcccugagcuacauacucugccuuguguucgcucagaaacugcccggcaacgacaauuccacagcaacuuuguguuuagggcaccaugccgucccuaacggaacgaucguuaagaccauuacaaaugaucaaaucgaggugacuaacgcgaccgaacugguacagucuucaaguacaggugagauuugcgacagcccacaccagauccuagauggcaaaaauuguacccucauagacgcucugcuuggggauccgcagugcgacggauuucaaaacaagaaaugggaucuguucguggaaagauccaaggccuauucuaauuguuaccccuaugacgucccugauuacgcaucguugaggucacucguggccagcaguggcacucuggaguuuaacaaugaauccuucaacuggacagguguuacccagaaugggacgucuagcgcuugcauccggcgcuccaagaacucauuuuucagucgacugaauuggcucacucauuuaaacuuuaaauauccagcacugaaugugaccaugcccaacaacgagcaguucgacaagcuguacauuuggggaguccaccauccuggcacagauaaagaccagaucuuuuuguaugcccaagcuagcggccguauuacugugucuaccaagagaucccagcagacagccaucccaaauauagggucaaggccccggguacgcaacauuccuagcagaaucaguauuuacuggaccaucguuaaaccaggagauauccugcuaauuaauucuacggguaaccucauagcgccgaggggcuacuucaagauccgguccggaaagagcucggugaugcgcucugacgcacccauugggaaauguaauuccgacugcaucacuccuaacggcucaauaccaaaugauaagcccuuucagaacgucaaucgaauuacauauggugccuguccuagauacgugaaacaaaacacccugaaacuugcuacugggaugaggaaugugccagagaagcagacacggggaaucuucggcgccaucgcaggcuuuauugaaaacgggugggagggaauggucgacgguugguauggcuuccgucaccagaauagugaagggcgcggacaagcugccgaucuuaagagcacccaggcggccaucgaccagauuaacggcaaauugaauagacucauagguaagacgaacgagaaguuccaccagaucgagaaagaauuuuccgagguugaagggaggauucaagaucuggagaaguacguggaagacaccaaaaucgauuuauggucuuauaacgcagagcugcucguagcucuugagaaucagcauacaaucgaccugacugauagcgaaaugaacaaguuguucgagaaaaccaagaagcagcuacgggaaaaugccgaggacaugggcaacggaugcuuuaaaauuuaccacaagugugauaaugcuugcauaggcucaauccgaaacgggacauaugaccaugacguguaccgcgaugaagcccugaauaacagauuccagauuaaaggagucgagcucaagagugguuacaaagacuggauccuguggauuuccuuugcaaucagcugcuuccuucuguguguggccuugcucggcuuuauaaugugggcuugccaaaaggggaauaucagguguaacauuugcaucuga

SEQ ID NO: 132681 - RNA, 1701 nt, Artificial Sequence; identical to SEQ ID NO: 131459
  derived and/or modified CDS sequence (opt3) from hemagglutinin__InfluenzaA__ADF83752

SEQ ID NO: 132682 - RNA, 1701 nt, Artificial Sequence; identical to SEQ ID NO: 132269
  derived and/or modified CDS sequence (opt3) from hemagglutinin__InfluenzaA__ADF83763

SEQ ID NO: 132683 - RNA, 1701 nt, Artificial Sequence; identical to SEQ ID NO: 132269
  derived and/or modified CDS sequence (opt3) from hemagglutinin__InfluenzaA__ADF83773

SEQ ID NO: 132684 - RNA, 1701 nt, Artificial Sequence
  derived and/or modified CDS sequence (opt3) from hemagglutinin__InfluenzaA__ADF83783
augaaggccauccuggugguccuccuuuacaccuucgcuacagcaaacgccgacacucugugcauuggcuaucacgcgaauaacagcacggauaccguugacacaguguuggagaaaaauguaacugugacccauuccgucaacuuacuggaagauaagcacaaugggaaacuauguaagcucagaggaguggcuccccugcaucuugguaaaugcaacauagccggcuggauccuggggaauccugagugugaaucuuugucaacagcaaguagcugguccuacauuguugagaccucuucgucagacaacggaacuugcuauccaggcgauuuuaucgacuacgaggagcucagggagcagcugagcaguguguccucuuucgaacgguuugagauuuucccgaagacaagcuccuggcccaaucacgauucaaacaagggugucaccgccgcuuguccucaugcaggggccaaaaguuuuuauaagaaucugaucuggcucgugaaaaagggaaacagcuacccaaaauuaucuaaguccuauauaaaugacaagggcaaagaaguacugguucuuuggggcauccaccaccccucaacgagcgcugaucaacagaguuuguaccagaacgccgacgcguacguguucgucgggacuucucgcuauuccaagaaauuuaagccugagauugcaauccgaccaaaagugcgugaucaggagggaagaaugaauuacuauuggacccugguggaacccggugacaagauuacauucgaggccacuggcaaccuagucguuccuagguacgcuuuugccauggaacggaacgcagggagcggaaucauaauuucggauaccccagugcaugacugcaauacaaccugucaaacgccgaaaggcgcuaucaacacuucucuccccuuccagaauauucacccuacaaccaucgguaagugcccaaaguauguaaaauccacuaagcugcgccuugccacagggcugagaaacgugcccucaauccagaguaggggauuguuuggcgcgauugccggcuucauagaagggggauggaccgguauggucgacggcugguacggguaucaucaccagaaugaacaaggaagcggcuacgcagcugaucucaaauccacgcagaacgccaucgacgagauuaccaauaaggugaacucuguuaucgagaaaaugaauacacaguuuacugcuguggguaaggaguucaaccaccuggaaaagcggauagaaaauuuaaacaaaaaggucgaugacggguuccuggauauuuggaccuacaaugccgagcuccuugugcuguuggaaaacgagcgcacacuagacuaucaugauagcaauguaaagaaccuguacgagaagguucgaucacagcucaaaaacaaugcaaaggaaaucggcaacggauguuuugaguucuaucacaagugcgacaauacuuguauggaaagugugaaaaacggcaccuacgauuauccuaaguacuccgaggaagccaaacugaauagagaggagaucgacggggucaaacuugaaagcacaaggauuuaucaaauccuggcuauuuacucuaccguggcgucaaguuugguccucgugguuagccugggagcaauauccuuuuggaugugcucuaacgguucguuacagugccggaucuguauuuga

SEQ ID NO: 132685 - RNA, 1701 nt, Artificial Sequence; identical to SEQ ID NO: 132344
  derived and/or modified CDS sequence (opt3) from hemagglutinin__InfluenzaA__ADF83793

SEQ ID NO: 132686 - RNA, 1701 nt, Artificial Sequence
  derived and/or modified CDS sequence (opt3) from hemagglutinin__InfluenzaA__ADF83803
augaaggccauccuggugguccuccuuuacaccuucgcuacagcaaacgccgacacucugugcauuggcuaucacgcgaauaacagcacggauaccguugacacaguguuggagaagaauguaacugugacccauuccgucaacuuacuggaagauaagcacaaugggaaacuauguaagcucagaggaguggcuccccugcaucuugguaaaugcaacauagccggcuggauccuggggaauccugagugugaaacauugucuaccgcaucaaguuggagcuacauuguugagacuuccucuucggacaacggaacaugcuauccaggcgauuuuaucgacuacgaggagcucagggagcagcugucaagcgugaguuccuucgaacgguuugagauuuucccgaagaccucuagcuggcccaaucacgauuccaacaagggugucacggccgcuuguccucaugcaggggccaaaucauuuuauaagaaucugaucuggcucgugaaaaagggaaacaguuacccaaaauuaagcaagucuuauauaaaugacaagggcaaagaaguacugguucuuuggggcauccaccaccccuccacuucagcugaucaacagagcuuguaccagaacgccgacgcguacguguucgucgggaccagucgcuauucuaagaaauuuaagccugagauugcaauccgaccaaaagugcgugaucaggagggaagaaugaauuacuauuggacacugguggaacccggugacaagauuacuuucgaggccaccggcaaccuagucguuccuagguacgcuuuugccauggaacggaacgcaggguccggaaucauaauuagcgauacaccagugcaugacugcaauaccacgugucaaacuccgaaaggcgcuaucaacacaucgcuccccuuccagaauguacacccuauuaccaucgguaagugcccaaaguaugugaaaucuacuaagcugcgccuugccacagggcugagaaacguccccuccauccagucaaggggauuguuuggcgcgauugccggcuucauagaagggggauggaccgguaugguggacggcugguacggguaucaucaccagaaugaacaaggaaguggcuacgcagcugaucucaaaagcacgcagaacgccaucgacgagauuaccaauaagguuaacuccgugaucgagaaaaugaauacacaguuuacugcugucgguaaggaguucaaccaccuggaaaagcggauagaaaauuuaaacaaaaagguggaugacggguuccuggauauuuggaccuacaaugccgagcuccuuguacuguuggaaaacgagcgcacacuagacuaucaugauucuaauguuaaaaaccuguacgagaaggugcgaagccagcucaaaaacaaugcaaaggaaacuggcaacggauguuuugaguucuaucacaagugcgacaauaccuguauggaaucagucaaaaacggcacauacgauuauccuaaguacagugaggaagccaaacugaauagagaggagaucgacggggugaaacuugaauccaccaggaucuaucaaauucuggcuaucuacagcacugucgcgucuucauuggugcucguugugagucugggagcaauuagcuuuuggaugugcuccaacgguucuuuacagugccggauauguaucuga

SEQ ID NO: 132687 - RNA, 1701 nt, Artificial Sequence
  derived and/or modified CDS sequence (opt3) from hemagglutinin__InfluenzaA__ADF83813
augaaggccauccuggugguccuccuuuacaccuucgcuacagcaaacgccgacacucugugcauuggcuaucacgcgaauaacagcacggauaccguugacacaguguuggagaaaaauguaacugugacccauuccgucaacuuacuggaagauaagcacaaugggaaacuauguaagcucagaggaguggcuccccugcaucuugguaaaugcaacauagccggcuggauccuggggaauccugagugugaaucuuugucaacagcaaguagcugguccuacauuguugagaccucuucgucagacaacggaacuugcuauccaggcgauuuuaucgacuacgaggagcucagggagcagcugagcaguguguccucuuucgaacgguuugagauuuucccgaagacaagcuccuggcccaaucacgauucaaacaagggugucaccgccgcuuguccucaugcaggggccaaaaguuuuuauaagaaucugaucuggcucgugaaaaagggaaacagcuacccaaaauuaucuaaguccuauauaaaugacaagggcaaagaaguacugguucuuuggggcauccaccaccccucaacgagcacugaucaacagaguuuguaccagaacgcugacgccuacguguucgucgggaccucucgcuauuccaagaaauuuaagccugagauugcgauccgaccaaaagugcgugaucaggagggaagaaugaauuacuauuggacacugguggaacccggugacaagauuacuuucgaggcaaccggcaaccuagucguuccuagguacgccuuugcuauggaacggaacgccgggagcggaaucauaauuucggauacaccagugcaugacugcaauaccacgugucaaacuccgaaaggcgcaaucaacacaucucuccccuuccagaauauucacccuaucaccaucgguaagugcccaaaguauguaaaauccacuaagcugcgccuugcuacagggcugagaaacgugcccucaauucagaguaggggauuguuuggcgccauagcgggcuucaucgaagggggauggaccgguauggucgacggcugguacggguaucaucaccagaaugaacaaggaagcggcuacgccgcagaucucaaauccacgcagaacgcuauugacgagaucaccaauaaggugaacucuguuauagagaaaaugaauacacaguuuacugccguggguaaggaguucaaccaccuggaaaagcggauugaaaauuuaaacaaaaaggucgaugacggguuccuggauaucuggaccuacaaugcugagcuccuugugcuguuggaaaacgagcgcacacuagacuaucaugauagcaauguaaagaaccuguacgagaagguucgaucacagcucaaaaacaaugccaaggaaaucggcaacggauguuuugaguucuaucacaagugcgacaauacuuguauggaaagugugaaaaacggcaccuacgauuauccuaaguacuccgaggaagcaaaacugaauagagaggagauugacggggucaaacuugaaagcacaaggaucuaucaaauucuggccauauacucuaccguggcuucaaguuugguccucgugguuagccugggagcgaucuccuuuuggaugugcucuaacgguucguuacagugccggauuuguaucuga

SEQ ID NO: 132688 - RNA, 1701 nt, Artificial Sequence
  derived and/or modified CDS sequence (opt3) from hemagglutinin__InfluenzaA__ADF83823
augaaggccauccuggugguccuccuuuacaccuucgcuacagcaaacgccgacacucugugcauuggcuaucacgcgaauaacagcacggauaccguugacacaguguuggagaagaauguaacugugacccauuccgucaacuuacuggaagauaagcacaaugggaaacuauguaagcucagaggaguggcuccccugcaucuugguaaaugcaacauagccggcuggauccuggggaauccugagugugaaucuuugucaacagcaaguagcugguccuacauuguugagaccucuucgucagacaacggaacuugcuauccaggcgauuuuaucgacuacgaggagcucagggagcagcugagcaguguguccucuuucgaacgguuugagauuuucccgaagacaagcuccuggcccaaucacgauucaaacaagggugucaccgccgcuuguccucaugcaggggccaaaaguuuuuauaagaaucugaucuggcucgugaaaaagggaaacagcuacccaaaauuaucuaaguccuauauaaaugacaagggcaaagaaguacugguucuuuggggcauccaccaccccucaacgagcgcugaucaacagaguuuguaccagaacgccgacucuuacguguucgucgggacuucccgcuauagcaagaaauuuaagccugagauugcgauccgaccaaaagugcgugaucaggagggaagaaugaauuacuauuggacccugguggaacccggugacaagauuacauucgaggcaacuggcaaccuagucguuccuagguacgccuuugcuauggaacggaacgccgggucgggaaucauaauuucugauaccccagugcaugacugcaauacaaccugucaaacgccgaaaggcgcaaucaacacuucccuccccuuccagaauauucacccuaucacaaucgguaagugcccaaaguauguaaaaucaaccaagcugcgccuugcuacugggcugagaaacauucccaguauacagagcaggggauuguuuggcgccaucgcgggcuucauugaagggggauggacagguaugguggacggcugguacggguaucaucaccagaaugaacaaggauccggcuacgccgcagaucucaaaucuacccagaacgcuaucgacgagauaacgaauaaggucaacagcgugauugagaaaaugaauacccaguuuacagccguugguaaggaguucaaccaccuggaaaagcggaucgaaaauuuaaacaaaaagguggaugacggguuccuggauaucuggacuuacaaugcugagcuccuuguccuguuggaaaacgagcgcacccuagacuaucaugauucaaaugugaaaaaccuguacgagaagguacgaagucagcucaaaaacaaugccaaggaaauuggcaacggauguuuugaguucuaucacaagugcgacaauacauguauggaauccguuaaaaacggcacuuacgauuauccuaaguacagcgaggaagcaaaacugaauagagaggagaucgacggggugaaacuugaaucuaccaggauuuaucaaauacuggccaucuacucaacagucgcuaguagcuuggugcucgucgugucccugggagcgauuucuuuuuggaugugcucgaacgguagcuuacagugccggaucuguaucuga

SEQ ID NO: 132689 - RNA, 1701 nt, Artificial Sequence; identical to SEQ ID NO: 132269
  derived and/or modified CDS sequence (opt3) from hemagglutinin__InfluenzaA__ADF83833

SEQ ID NO: 132690 - RNA, 1701 nt, Artificial Sequence; identical to SEQ ID NO: 132269
  derived and/or modified CDS sequence (opt3) from hemagglutinin__InfluenzaA__ADF83843

SEQ ID NO: 132691 - RNA, 1701 nt, Artificial Sequence; identical to SEQ ID NO: 132269
  derived and/or modified CDS sequence (opt3) from hemagglutinin__InfluenzaA__ADF83853

SEQ ID NO: 132692 - RNA, 1701 nt, Artificial Sequence
  derived and/or modified CDS sequence (opt3) from hemagglutinin__InfluenzaA__ADF83873
augaaggccauccuggugguccuccuuuacaccuucgcuacagcaaacgccgacacucugugcauuggcuaucacgcgaauaacagcacggauaccguugacacaguguuggagaaaaauguaacugugacccauuccgucaacuuacuggaagauaagcacaaugggaaacuauguaagcucagaggaguggcuccccugcaucuugguaaaugcaacauagccggcuggauccuggggaauccugagugugaaucuuugucaacagcaaacaguuggagcuacauuguugagaccuccucuucggacaauggaacuugcuauccaggcgauuuuaucgacuacgaggagcucagggagcagcugucaagcgugaguuccuucgaacgguuugagauuuucccgaagacaucuagcuggcccaaccacgauuccaauaagggugucaccgccgcuuguccucaugcaggggccaaaucauuuuauaagaaccugaucuggcucgugaaaaagggaaauaguuacccaaaauuaagcaagucuuauauaaacgacaagggcaaagaaguacugguucuuuggggcauccaccaccccuccacgucaacugaucaacagagcuuguaccagaaugcugacgccuacguguucgucgggaccagucgcuauucuaagaaauuuaagccugagauugcgauccgaccaaaagugcgugaucaggagggaagaaugaacuacuauuggacacugguggaacccggugacaagauuacuuucgaggcaaccggcaaccuagucguuccuagguacgccuuugcuauggaacggaaugccggguccggaaucauaauuagcgauacaccagugcaugacugcaacaccacgugucaaacuccgaaaggcgcaaucaauacaucgcuccccuuccagaacauucacccuaucaccaucgguaagugcccaaaguauguaaaaucuacuaagcugcgccuugcuacagggcugagaaaugugcccuccauucagucaaggggauuguuuggcgccauagcgggcuucaucgaagggggauggaccgguauggucgacggcugguacggguaucaucaccagaacgaacaaggaaguggcuacgccgcagaucucaaaagcacgcagaaugcuauugacaagaucaccaacaaaguuaauuccgugauagagaagaugaacacacaguuuacugccguggguaaggaguucaaucaccuggaaaaacggauugagaacuuaaauaagaaagucgaugacggguuccuggauaucuggaccuacaacgcugaacuccuugugcuguuggagaaugaacgcacacuagacuaucaugauucuaacguaaagaaccuguacgagaaaguucgaagccagcucaagaauaacgccaaggagaucggcaauggauguuuugaguucuaucacaaaugcgacaacacuuguauggaaucagugaagaauggcaccuacgauuauccuaaauacagugaagaggcaaagcugaacagagaagagauugacggggucaaacuugaguccacaaggaucuaucaaauucuggccauauacagcaccguggcuucuucauugguccucgugguuagucugggagcgaucagcuuuuggaugugcuccaaugguucuuuacagugccggauuuguaucuga

SEQ ID NO: 132693 - RNA, 1701 nt, Artificial Sequence; identical to SEQ ID NO: 131881
  derived and/or modified CDS sequence (opt3) from hemagglutinin__InfluenzaA__ADF83885

SEQ ID NO: 132694 - RNA, 1701 nt, Artificial Sequence
  derived and/or modified CDS sequence (opt3) from hemagglutinin__InfluenzaA__ADF83895
augaaggccauccuggugguccuccuuuacaccuucgcuacaguuaacgcagacacucugugcauuggcuaucacgccaauaacagcacggauaccguggacacaguauuggagaaaaaugugacugucacccauuccgugaacuuacuggaagauaagcacaaugggaaacuauguaagcucagaggaguugcgccccugcaucuugguaaaugcaacauagcuggcuggauccuggggaauccugagugugaaucuuugucaacagccaguagcugguccuacauuguggagaccucuucgucagacaacggaacuugcuauccaggcgauuuuaucgacuacgaggagcucagggagcagcugagcagugucuccucuuucgaacgguuugagauuuucccgaagacaagcuccuggcccaaucacgauucaaacaagggugugaccgcagccuguccucaugcuggggcaaaaaguuuuuauaagaaucugaucuggcucguuaaaaagggaaacagcuacccaaaauuaucuaaguccuauauaaaugacaagggcaaagaaguacuggugcuuuggggcauccaccaccccucaacgagcgccgaucaacagaguuuguaccagaacgcugacgccuacgucuucguggggacuucucgcuauuccaagaaauuuaagccugagauugcgauccgaccaaaagugcgugaucaggagggaagaaugaauuacuauuggacccuggucgaacccggugacaagauuacauucgaggcaacuggcaaccuaguugugccuagguacgccuuugcuauggaacggaacgccgggagcggaaucauaauuucggauaccccaguacaugacugcaauacaaccugucaaacgccgaaaggcgcaaucaacacuucucuccccuuccagaauauucacccuaucacaaucgguaagugcccaaaguaugugaaauccaccaagcugcgccuugcuacugggcugagaaacguccccucaauucagaguaggggauuguuuggcgccauagcgggcuucaucgaagggggauggacagguaugguggacggcugguacggguaucaucaccagaaugaacaaggaagcggcuacgccgcagaucucaaauccacccagaacgcuauugacaagaucacgaauaaaguuaacucugugauagagaagaugaauacccaguuuacagccgucgguaaggaguucaaccaccuggaaaaacggauugagaauuuaaacaagaaaguggaugacggguuccuggauaucuggacuuacaaugcugaacuccuuguacuguuggagaacgaacgcacccuagacuaucaugauagcaauguuaagaaccuguacgagaaaauccgaucacagcucaagaacaaugccaaggagauuggcaacggauguuuugaguucuaucacaaaugcgacaauacauguauggaaagugugaagaacggcacuuacgauuauccuaaauacuccgaagaggcaaagcugaauagagaagagaucgacggggucaaacuugagagcaccaggauuuaucaaauacuggccaucuacucuacaguggcuucaaguuugguccucgugguuagccugggagcgauuuccuuuuggaugugcucuaacgguucguuacagugccggaucuguaucuga

SEQ ID NO: 132695 - RNA, 1701 nt, Artificial Sequence; identical to SEQ ID NO: 132269
  derived and/or modified CDS sequence (opt3) from hemagglutinin__InfluenzaA__ADF83915

SEQ ID NO: 132696 - RNA, 1701 nt, Artificial Sequence
  derived and/or modified CDS sequence (opt3) from hemagglutinin__InfluenzaA__ADF84441
augaaggccauccuggugguccuccuuuacaccuucgcuacagcaaacgccgacacucugugcauuggcuaucacgcgaauaacagcacggauaccguugacacaguguuggagaaaaauguaacugugacccauuccgucaacuuacuggaagauaagcacaaugggaaacuauguaagcucagaggaguggcuccccugcaucuugguaaaugcaacauagccggcuggauccuggggaauccugagugugaaucuuugucaacagcaaguagcugguccuacauuguugagaccucuucgucagacaacggaacuugcuauccaggcgauuuuaucaauuacgaggagcucagggagcagcugagcaguguguccucuuucgaacgguuugagauuuucccgaagacaagcuccuggcccucacacgacaguaacaagggugucaccgccgcuuguccucaugcaggggccaagagcuuuuauaaaaaucugaucuggcucgugaaaaagggaaacucuuacccaaaauuauccaagucauauauaaaugauaagggcaaagaaguacugguucuuuggggcauccaccaccccagcacgagugcugaccaacagucuuuguaccagaacgccgaugcguacguguucgucgggacuucccgcuauagcaagaaauuuaagccugagauugcaauccgaccaaaagugcgugaccaggagggaagaaugaauuacuauuggacccugguggaacccggugauaagauuacauucgaggccacuggcaaccuagucguuccuagguacgcuuuugccauggaacggaacgcagggucgggaaucauaauuucugacaccccagugcaugauugcaauacaaccugucaaacgccgaaaggcgcuaucaacacuucccuccccuuccagaauauucacccuaucacaaucgguaagugcccaaaguauguaaaaucaaccaagcugcgccuugccacugggcugagaaacgugcccaguauucagagcaggggauuguuuggcgcgauagccggcuucaucgaagggggauggacagguauggucgacggcugguacggguaucaucaccagaaugaacaaggauccggcuacgcagcugaccucaaaucuacccagaacgccauugauaagaucacgaauaaagugaacagcguuauagagaagaugaauauucaguuuaccgcuguggguaaggaguucaaccaccuggaaaaacggaucgagaauuuaaacaagaaagucgacgauggguuccuggacaucuggacauacaaugccgaacuccuugugcuguuggagaacgaacgcacucuagauuaucaugacucaaauguaaagaaccuguacgagaaaguucgaagucagcucaagaacaaugcaaaggagauuggcaacggauguuuugaguucuaucacaaaugcgauaauaccuguauggaauccgugaagaacggcacauacgacuauccuaaauacagcgaagaggccaagcugaauagagaagagaucgauggggucaaacuugagucuacuaggauuuaucaaauacuggcuaucuacucaaccguggcgaguagcuugguccucgugguuucccugggagcaauuucuuuuuggaugugcucgaacgguagcuuacagugccggaucuguaucuga

SEQ ID NO: 132697 - RNA, 1701 nt, Artificial Sequence; identical to SEQ ID NO: 131881
  derived and/or modified CDS sequence (opt3) from hemagglutinin__InfluenzaA__ADF84459

SEQ ID NO: 132698 - RNA, 1701 nt, Artificial Sequence; identical to SEQ ID NO: 132269
  derived and/or modified CDS sequence (opt3) from hemagglutinin__InfluenzaA__ADF84469

SEQ ID NO: 132699 - RNA, 1701 nt, Artificial Sequence; identical to SEQ ID NO: 132330
  derived and/or modified CDS sequence (opt3) from hemagglutinin__InfluenzaA__ADF84479

SEQ ID NO: 132700 - RNA, 1701 nt, Artificial Sequence; identical to SEQ ID NO: 132269
  derived and/or modified CDS sequence (opt3) from hemagglutinin__InfluenzaA__ADF84489

SEQ ID NO: 132701 - RNA, 1701 nt, Artificial Sequence; identical to SEQ ID NO: 132269
  derived and/or modified CDS sequence (opt3) from hemagglutinin__InfluenzaA__ADF85017

SEQ ID NO: 132702 - RNA, 1701 nt, Artificial Sequence; identical to SEQ ID NO: 132269
  derived and/or modified CDS sequence (opt3) from hemagglutinin__InfluenzaA__ADF87152

SEQ ID NO: 132703 - RNA, 1701 nt, Artificial Sequence
  derived and/or modified CDS sequence (opt3) from hemagglutinin__InfluenzaA__ADF87162
augaaggccauccuggugguccuccuuuacaccuucgcuacagcaaacgccgacacucugugcauuggcuaucacgcgaauaacagcacggauaccguugacacaguguuggagaaaaauguaacugugacccauuccgucaacuuacuggaagauaagcacaaugggaaacuauguaagcucagaggaguggcuccccugcaucuugguaaaugcaacauagccggcuggauccuggggaauccugagugugaaucuuugucaacagcaaguagcugguccuacauuguugagaccucuucgucagacaacggaacuugcuauccaggcgauuuuaucgacuacgaagaacucagggagcagcugagcaguguguccucuuucgaacgguuugagauuuucccgaagacaagcuccuggcccaaucacgauucaaacaagggugucaccgccgcuuguccucaugcaggggccaaaaguuuuuauaagaaucugaucuggcucgugaaaaagggaaacagcuacccaaaauuaucuaaguccuauauaaaugacaagggcaaagaaguacugguucuuuggggcauccaccaccccucaacgagcgcugaucaacagaguuuguaccagaacgccgacucuuacguguucgucgggacuuccaaguauagcaaaaaguuuaaaccugagauugcgauccgcccaaaggugcgagaucaggagggacguaugaauuacuauuggacccugguggaacccggugacaaaauuacauucgaggcaacuggcaaccuagucguuccuagauacgccuuugcuauggaaaggaacgccgggucgggaaucauaauuucugauaccccagugcaugacugcaauacaaccugucaaacgccggagggcgcaaucaacacuucccuccccuuccagaauauucacccuaucacaaucgguaagugcccaaaguauguaaaaucaaccaagcugcggcuugcuacugggcugcgcaacgugcccaguauucagagcagaggauuguuuggcgccauagcgggcuucaucgaagggggauggacagguauggucgacggcugguacggguaucaucaccagaaugagcaaggauccggcuacgccgcagaucucaaaucuacccagaacgcuauugacgagaucacgaauaaggugaacagcguuauagaaaagaugaauacccaguuuacagccguggguaaggaguucaaccaccuggaaaagaggauugagaauuuaaacaaaaaggucgaugacggguuccuggauaucuggacuuacaaugcugaacuccuugugcuguuggagaacgagcggacccuagacuaucaugauucaaauguuaaaaaccuguacgaaaagguacgcagucagcucaaaaacaaugccaaggagaucggcaacggauguuuugaguucuaucacaagugcgacaauacauguauggaguccgugaaaaacggcacuuacgauuauccuaaguacagcgaagaggcaaaacugaaucgagaggaaauugacggggucaaacuugagucuaccagaaucuaucaaauucuggccauauacucaacaguggcuaguagcuugguccucgugguuucccugggagcgaucucuuuuuggaugugcucgaacgguagcuuacagugcaggauuuguaucuga

SEQ ID NO: 132704 - RNA, 1701 nt, Artificial Sequence; identical to SEQ ID NO: 132269
  derived and/or modified CDS sequence (opt3) from hemagglutinin__InfluenzaA__ADF87172

SEQ ID NO: 132705 - RNA, 1701 nt, Artificial Sequence
  derived and/or modified CDS sequence (opt3) from hemagglutinin__InfluenzaA__ADF87182
augaacgccauccuggugguccuccuuuacaccuucgcuacagcaaaugccgacacucugugcauuggcuaucacgcgaacaauagcacggauaccguugacacauuguuagagaagaacgugacuguaacccauuccgugaaucugcuagaagauaaacacaacgggaagcucuguaaacugagaggagucgcuccccuucaucuggguaagugcaauauagccggcuggaucuuggggaacccugagugugaaucucucucaacagcaaguagcugguccuacauuguggagaccucuucgucagacaauggaacuugcuauccaggcgauuuuaucgacuacgaggagcugagggagcagcugagcaguguuuccucuuucgaacgguuugagauuuucccgaaaacaagcuccuggcccaaccacgauucaaauaagggugugaccgccgcuuguccucaugcaggggccaagaguuuuuauaaaaaccucaucugguuagucaagaaaggaaauagcuacccaaagcugucuaaauccuauauaaacgacaagggcaaggaagugcuuguauuguggggcauccaccaccccucaacgagcgcugaucaacagagucuguaccagaaugccgacgcguacguuuucguggggacuucucgcuauuccaaaaaguuuaaaccugagauugcaauccgaccaaagguccgugaucaggagggaagaaugaacuaccauuggacccuaguggaacccggugacaaaauuacauucgaggccacuggcaaccucguggucccuagguaugcuuuugccauggaacggaaugcagggagcggaaucauaauuucggaugcuccaguucacgacugcaacaccacaugucaaaccccgaagggcgccaucaauacgucucugcccuuccagaacauucauccuaucacuaucgguaaaugcccaaaguacgugaaguccacaaaacuucgccuggcgaccggguugagaaauguacccucaauucagaguaggggacucuuuggcgccauagcaggcuucaucgaagggggauggacugguaugguggacggcugguauggguaccaccaccagaacgaacaaggaagcggcuaugcugccgaucugaaguccacacagaaugcuauugacgagaucaccaacaaaauaaauucugucauugagaagaugaacacgcaguuuaccgccguggguaaagaguucaaucauuuagaaaagcggaucgaaaaccugaauaagaaaguugaugacggguuccucgauaucuggacauacaacgcagagcuucugguguugcuagaaaaugagcgcacucuggacuaccacgauagcaacgucaagaaccucuaugagaaagugcgaucacagcugaagaauaacgccaaagaaauuggcaauggauguuuugaguucuaccauaagugcgacaacaccuguauggaaaguguaaagaauggcacauaugauuacccuaaauauuccgaggaagcuaaacuuaacagagaggagaucgacgggguuaagcuggaaagcacuaggauuuaccaaauauuggcgaucuauucuaccguggcaucaagucucguccugguggucagcuuaggagccauuuccuuuuggaugugcucuaaugguucgcugcagugccggaucuguaucuga

SEQ ID NO: 132706 - RNA, 1701 nt, Artificial Sequence; identical to SEQ ID NO: 132269
  derived and/or modified CDS sequence (opt3) from hemagglutinin__InfluenzaA__ADF87192

SEQ ID NO: 132707 - RNA, 1701 nt, Artificial Sequence
  derived and/or modified CDS sequence (opt3) from hemagglutinin__InfluenzaA__ADF87202
augaaggccauccuggugguccuccuuuacaccuucgcuacagcaaacgccgacacucugugcauuggcuaucacgcgaauaacagcacggauaccguugacacaguguuggagaaaaauguaacugugacccauuccgucaacuuacuggaagauaagcacaaugggaaacuauguaagcucagaggaguggcuccccugcaucuugguaaaugcaacauagccggcuggauccuggggaauccugagugugaaucuuugucaacagcaaguagcugguccuacauuguugagaccucuucgucagacaacggaacuugcuauccaggcgauuuuaucgacuacgaggagcucagggagcagcugagcaguguguccucuuucgaacgguuugagauuuucccgaagacaagcuccuggcccaaucacgauucaaacaagggugucaccgccgcuuguccucaugcaggggccaaaaguuuuuauaagaaucugaucuggcucgugaaaaagggaaacagcuacccaaaauuaucuaaguccuauauaaaugacaagggcaaagaaguacugguucuuuggggcauccaccaccccucaacgagcgcugaucaacagaguuuguaccagaacgccgacgcguacguguucgucgggacuucucgcuauuccaagaaauuuaagccugagauugcaauccgaccaaaagugcgugaucaggagggaagaaugaauuacuauuggacccugguggaacccggugacaagauuacauucgaggccacuggcaaccuagucguuccuagguacgcuuuugccauggaacggaacgcagggagcggaaucauaauuucggauaccccagugcaugacugcaauacaaccugucaaacgccgaaaggcgcuaucaacacuucucuccccuuccagaauauucacccuaucacaaucgguaagugcccaaaguauguaaaauccaccaagcugcgccuugccacugggcugagaaacgugcccucaauucagaguaggggauuguuuggcgcgauagccggcuucaucgaagggggauggacagguauggucgacggcugguacggguaucaucaccagaaugaacaaggaagcggcuuugcagcugaucucaaauccacccagaacgccauugacaagaucacgaauaaagugaacucuguuauagagaagaugaauacccaguucacagcuguggguaaggaguucaaccaccuggaaaaacggauugagaauuuaaacaagaaagucgaugacggguuucuggauaucuggacuuacaaugccgaacuccuugugcuguuggagaacgaacgcacccuagacuaccaugauagcaauguaaagaaccuguaugagaaaguucgaucacagcucaagaacaaugcaaaggagaucggcaacggauguuucgaauuuuaccacaaaugcgacaauacauguauggagagugugaagaacggcacuuaugauuacccuaaauauuccgaagaggccaagcugaauagagaagagauugacggggucaaacuugagagcaccaggaucuaccaaauucuggcuauauauucuacaguggcgucaaguuugguccucgugguuagccugggagcaaucuccuucuggaugugcucuaacgguucguuacagugccggauuuguaucuga

SEQ ID NO: 132708 - RNA, 1701 nt, Artificial Sequence; identical to SEQ ID NO: 132269
  derived and/or modified CDS sequence (opt3) from hemagglutinin__InfluenzaA__ADF87212

SEQ ID NO: 132709 - RNA, 1701 nt, Artificial Sequence; identical to SEQ ID NO: 132432
  derived and/or modified CDS sequence (opt3) from hemagglutinin__InfluenzaA__ADF87232

SEQ ID NO: 132710 - RNA, 1701 nt, Artificial Sequence; identical to SEQ ID NO: 132269
  derived and/or modified CDS sequence (opt3) from hemagglutinin__InfluenzaA__ADF87242

SEQ ID NO: 132711 - RNA, 1701 nt, Artificial Sequence
  derived and/or modified CDS sequence (opt3) from hemagglutinin__InfluenzaA__ADF87252
augaaggccauccuggugguccuccuuuacaccuucgcuacagcaaacgccgacacucugugcauuggcuaucacgcgaauaacagcacggauaccguugacacaguguuggagaaaaauguaacugugacccauuccgucaacuuacuggaagauaagcacaaugggaaacuauguaagcucagaggaguggcuccccugcaucuugguaaaugcaacauagccggcuggauccuggggaauccugagugugaaucuuugucaacagcaaguagcugguccuacauuguugagaccucuucgucagacaacggaacuugcuauccaggcgauuuuaucaauuacgaggagcucagggagcagcugagcaguguguccucuuucgaacgguuugagauuuucccgaagacaagcuccuggcccaaccacgacucaaauaagggugucaccgccgcuuguccucaugcaggggccaaaaguuuuuauaagaaccugaucuggcucgugaaaaagggaaaaagcuacccaaaguuaucuaaguccuauauaaaugauaaaggcaaggaaguacugguucuuuggggcauccaccaccccucaacgagcgcugaccaacagaguuuguaccagaacgccgaugcguacguguucgucgggacuucucgcuauuccaaaaaguuuaaaccugagauugcaauccgaccaaaggugcgugaccaggagggaagaaugaauuacuauuggacccugguggaacccggugauaaaauuacauucgaggccacuggcaaccuagucguuccuagguacgcuuuugccauggaacggaacgcagggagcggaaucauaauuucggacaccccagugcaugauugcaauacaaccugucaaacgccgaagggcgcuaucaacacuucucuccccuuccagaauauucacccuaucacaaucgguaagugcccaaaauauguaaaguccaccaaacugcgccuugccacugggcugagaaacgugcccucaauucagaguaggggauuguuuggcgcgauagccggcuucaucgaagggggauggacagguauggucgacggcugguacggguaucaucaccagaaugaacaaggaagcggcuacgcagcugaccucaaguccacccagaacgccauugauaaaaucacgaauaaggugaacucuguuauagagaagaugaauacccaguuuacagcuguggguaaagaguucaaccaccuggaaaagcggauugagaauuuaaacaaaaaggucgacgauggguuccuggacaucuggacuuacaaugccgaacuccuugugcuguuggagaacgaacgcacccuagauuaucaugacagcaauguaaagaaccuguacgagaagguucgaucacagcucaagaacaaugcaaaagagaucggcaacggauguuuugaguucuaucacaagugcgauaauacauguauggaaagugugaaaaacggcacuuacgacuauccuaaguacuccgaagaggccaaacugaauagagaagagauugauggggucaaacuugagagcaccaggaucuaucaaauucuggcuauauacucuacaguggcgucaaguuugguccucgugguuagccugggagcaaucuccuuuuggaugugcucuaacgguucguuacagugccggauuuguaucuga

SEQ ID NO: 132712 - RNA, 1701 nt, Artificial Sequence; identical to SEQ ID NO: 132269
  derived and/or modified CDS sequence (opt3) from hemagglutinin__InfluenzaA__ADF87262

SEQ ID NO: 132713 - RNA, 1701 nt, Artificial Sequence; identical to SEQ ID NO: 131881
  derived and/or modified CDS sequence (opt3) from hemagglutinin__InfluenzaA__ADF87272

SEQ ID NO: 132714 - RNA, 1701 nt, Artificial Sequence; identical to SEQ ID NO: 131881
  derived and/or modified CDS sequence (opt3) from hemagglutinin__InfluenzaA__ADF87282

SEQ ID NO: 132715 - RNA, 1701 nt, Artificial Sequence
  derived and/or modified CDS sequence (opt3) from hemagglutinin__InfluenzaA__ADF87292
augaaggccauccuggugguccuccuuuacaccuucgcuacagcaaacgccgacacucugugcauuggcuaucacgcgaauaacagcacggauaccguugacacaguguugaaaaagaauguaacugugacccauuccgucaacuuacuggaggauaaacacaaugggaagcuauguaaacucagaggaguggcuccccugcaucuugguaagugcaacauagccggcuggauccuggggaauccugaaugugagucuuugucaacagcaggaaguuggagcuacauuguugaaaccuccucuucggacaacggcacuugcuauccaggugauuuuaucgacuacgaggaacucagggagcagcugucaagcgugaguuccuucgagcgguuugaaauuuucccgaagacaucuagcuggcccaaucacgauuccaacaaaggggucaccgccgcuuguccucaugcaggagccaagucauuuuauaaaaaucugaucuggcucgugaagaaaggcaacaguuacccaaaguuaagcaagucuuauauaaaugacaaaggcaaggagguacugguucuuugggggauccaccaccccuccacgucagcugaucaacagagcuuguaccagaacgccgacgcguacguguucgucggaaccagucgcuauucuaaaaaguuuaaaccugaaauugcaauccgaccaaaggugcgugaucaggaggguagaaugaauuacuauuggacucugguggagcccggcgacaaaauuacauucgaagccacugggaaccuagucguuccuagguacgcuuuugccauggagcggaacgcaggauccggcaucauaauuagcgauaccccagugcaugacugcaauacaaccugucaaacgccgaagggugcuaucaacacuucgcuccccuuccagaauauucacccuaucacaaucgggaagugcccaaaauauguaaagucuaccaaacugcgccuugccacuggacugagaaacgugcccuccauucagucaaggggcuuguuuggcgcgauagccggguucaucgaaggagguuggacaggcauggucgacgggugguacggauaucaucaccagaaugagcaaggcagugguuacgcagcugaucucaagagcacccagaacgccauugacgaaaucacgaauaaagugaacuccguuauagagaagaugaauacccaguuuacagcuguggggaaggaguucaaccaccuggaaaaacggauugagaauuuaaacaagaaagucgaugacggcuuccuggauaucuggacuuacaaugccgaacuccuugugcuguuggagaacgaacgcacccuagacuaucaugauucuaauguaaagaaccuguacgagaaaguucgaagccagcucaagaacaaugcaaaggagaucggaaacggcuguuuugaguucuaucacaaaugcgacaauauguguauggaaucagugaagaacgggacauacgauuauccuaaauacagugaagaggccaagcugaauagagaagagauugacggagucaaacuugaguccacuaggaucuaucaaauucuggcuauauacagcaccguggcgucuucauugguccucgugguuagucugggugcaaucagcuuuuggaugugcuccaacggcucuuuacagugccggauuuguaucuga

SEQ ID NO: 132716 - RNA, 1701 nt, Artificial Sequence; identical to SEQ ID NO: 131881
  derived and/or modified CDS sequence (opt3) from hemagglutinin__InfluenzaA__ADF87302

SEQ ID NO: 132717 - RNA, 1701 nt, Artificial Sequence
  derived and/or modified CDS sequence (opt3) from hemagglutinin__InfluenzaA__ADF87331
augaaggccauccuggugguccuccuuuacaccuucgcuacagcaaacgccgacacucugugcauuggcuaucacgcgaauaacagcacggauaccguugacacaguguuggagaaaaauguaacugugacccauuccgucaacuuacuggaagauaagcacaaugggaaacuauguaagcucagaggaguggcuccccugcaucuugguaaaugcaacauagccggcuggauccuggggaauccugagugugaaucuuugucaacagcaaguagcugguccuacauuguugagaccucuaacucggacaauggaacuugcuauccaggcgauuuuaucaacuacgaggagcucagggagcagcugucaagcgugaguuccuucgaacgguuugagauuuucccgaagacaucuagcuggcccaaucacgacuccaacaaggguaucaccgccgcuuguccucaugcaggggccaaaucauuuuauaagaaucugauauggcucgucaaaaagggaaacaguuacccaaaauuaagcaagucuuauaucaaugauaagggcaaagaagugcugguacuuuggggcauucaccaccccuccacgucagcugaccaacagagcuuguaccagaacgccgaugcguacguuuucguggggaguucucgcuauuccaagaaauuuaagccugagaucgcaauucgaccaaaaguccgugaccaggagggaagaaugaacuacuauuggacucugguggaacccggugauaagaucaccuucgaggccacaggcaaucuaguggucccuagguacgcuuuugccauggaacggaacgcagggagcggaauaauuaucucggacacuccaguucaugauugcaauaccacaugucaaaccccgaaaggcgcuauuaacacgucucuccccuuccagaauauccacccuaucacuauugguaagugcccaaaguaugugaaauccacaaagcugcgccuugccaccgggcugagaaacguacccucaauacagaguaggggauuguuuggcgcgaucgccggcuucauugaagggggauggacugguaugguggacggcugguacggguaucaucaccagaaugaacaaggaagcggcuacgcagcugaccucaaauccacacagaacgccaucgauaagauaaccaauaaagucaacucugugauugagaagaugaauacgcaguuuaccgcuguugguaaggaguucaaccaccuggaaaaacggaucgagaauuuaaacaagaaaguggacgauggguuccuggacaucuggacauacaaugccgaacuccuuguccuguuggagaacgaacgcacucuagauuaucaugacagcaacgugaagaaucuguacgagaaaguacgaucacagcucaagaacaaugcaaaggagauuggcaacggauguuuugaguucuaucacaaaugcgauaauaccuguauggaaaguguuaagaacggcacauacgacuauccuaaauacuccgaagaggccaagcugaauagagaagagaucgauggggugaaacuugagagcacuaggauuuaucaaauacuggcuaucuacucuaccgucgcgucaaguuuggugcucgucgugagccugggagcaauuuccuuuuggaugugcucuaacgguucguuacagugccggaucuguaucuga

SEQ ID NO: 132718 - RNA, 1701 nt, Artificial Sequence; identical to SEQ ID NO: 130717
  derived and/or modified CDS sequence (opt3) from hemagglutinin__InfluenzaA__ADF87341

SEQ ID NO: 132719 - RNA, 1701 nt, Artificial Sequence
  derived and/or modified CDS sequence (opt3) from hemagglutinin__InfluenzaA__ADF87351
augaaggccauccuggugguccuccuuuacaccuucgcuacagcaaacgccgacacucugugcauuggcuaucacgcgaauaacagcacggauaccguugacacaguguuggagaaaaauguaacugugacccauuccgucaacuuacuggaagauaagcacaaugggaaacuauguaagcucagaggaguggcuccccugcaucuugguaaaugcaacauagccggcuggauccuggggaauccugagugugacucuuugucaacagcaaguagcugguccuacauuguugaaaccucuucgucagauaacggaacuugcuauccaggcgacuuuaucgauuacgaggaacucagggagcagcugagcaguguguccucuuucgagcgguuugaaauguucccgaagacaagcuccuggcccaaucacgacucaaacaagggugucaccgccgcuuguccucaugcaggggccaaaaguuuuuauaagaaucugauuuggcucgugaaaaagggaaacagcuacccaaaauuaucuaaguccuauaucaaugauaagggcaaagagguacugguucuuuggggcauacaccaccccucaacgagcgcugaccaacagaguuuguaccagaacgccgaugcguacguguucgucgggacuucucgcuauuccaagaaauuuaagccugaaaucgcaauucgaccaaaagugcgugaccaggagggaagaaugaauuacuauuggacccugguggagcccggugauaagaucacauucgaagccacuggcaaccuagucguuccuagguacgcuuuugccauggagcggaacgcagggagcggaauuaucauaucggacaccccagugcaugacugcaauacaaccugucaaacgccgaaaggcgcuauuaacacuucucuccccuuccagaauauccacccuauuacaaucgguaagugcccaaaguauguaaaauccaccaagcugcgccuugccacugggcugagaaacgugcccucaauccagaguaggggauuguuuggcgcgauugccggcuucauagaagggggauggacagguauggucgauggcugguacggguaucaucaccagaaugagcaaggaagcggcuacgcagcugaccucaaauccacccagaacgccaucgaugaaauuacgaauaaggugaacucuguuaucgagaaaaugaauacccaguuuacagcuguggguaaggaguucaaccaccuggaaaagcggauagagaauuuaaacaaaaaggucgacgauggguuccuggacauuuggacuuacaaugccgaacuccuugugcuguuggagaacgaacgcacccuagauuaucaugacagcaauguaaagaaccuguacgagaagguucgaucacagcucaaaaacaaugcaaaggagaucggcaacggauguuuugaguucuaucacaagugcgauaauacauguauggaaagugugaaaaacggcacuuacgacuauccuaaguacuccgaagaggccaaacugaauagagaagagaucgauggggucaaacuugagagcaccaggauuuaucaaauccuggcuauuuacucuacaguggcgucaaguuugguccucgugguuagccugggagcaauauccuuuuggaugugcucuaacgguucguuacagugccggaucuguauuuga

SEQ ID NO: 132720 - RNA, 1701 nt, Artificial Sequence; identical to SEQ ID NO: 132344
  derived and/or modified CDS sequence (opt3) from hemagglutinin__InfluenzaA__ADF87361

SEQ ID NO: 132721 - RNA, 1701 nt, Artificial Sequence; identical to SEQ ID NO: 131881
  derived and/or modified CDS sequence (opt3) from hemagglutinin__InfluenzaA__ADF87371

SEQ ID NO: 132722 - RNA, 1701 nt, Artificial Sequence
  derived and/or modified CDS sequence (opt3) from hemagglutinin__InfluenzaA__ADG08115
augaaggccauccuggugguccuccuuuacaccuucgcuacagcaaacgccgacacucugugcauuggcuaucacgcgaauaacagcacggauaccguugacacaguguuggagaaaaauguaacugugacccauuccgucaacuuacuggaagauaagcacaaugggaaacuauguaagcucagaggaguggcuccccugcaucuugguaaaugcaacauagccggcuggauccuggggaauccugagugugaaucuuugucaacagcaaguagcugguccuacauuguugagaccucuucgucaggaaacggcacuugcuauccaggugacuuuaucgauuacgaagaacucagggagcagcugagcaguguguccucuuucgaacgguuugagauuuucccgaagacaagcuccuggcccaaucacgacucaaacaagggggucaccgccgcuuguccucaugcaggagccaaaaguuuuuauaagaaucugaucuggcucgugaaaaagggcaacagcuacccaaaauuaucuaaguccuauauaaaugauaagggcaaagaaguacugguucuuugggggauccaccaccccucaacgagcgcugaccaacagaguuuguaccagaacgccgaugcguacguguucgucggaacuucucgcuauuccaagaaauuuaagccugagauugcaauccgaccaaaagugcguggucaggagggcagaaugaauuacuauuggacccugguggaacccggggacaagauuacauucgaggccacuggaaaccuagucguuccuagguacgcuuuugccauggaacggaacgcaggcagcgguaucauaauuucggauaccccagugcaugacugcaauacaaccugucaaacgccgaaaggggcuaucaacacuucucuccccuuccagaauauucacccuaucacaaucggaaagugcccaaaguauguaaaauccaccaagcugcgccuugccacuggccugagaaacgugcccucaauucagaguaggggcuuguuuggggcgauagccggauucaucgaggguggcuggacagggauggucgauggaugguacggcuaucaucaccagaaugaacaagguagcggguacgcagcugaccucaaauccacccagaacgccauugacgagaucacgaauaaggugaacucuguuauagagaaaaugaauacccaguuuacagcugugggcaaggaguucaaccaccuggagaagcggauugaaaauuuaaacaaaaaggucgaugacggauuccuggauaucuggacuuacaaugccgagcuccuugugcuguuggaaaacgagcgcacccuagacuaucaugauagcaauguaaagaaccuguacgagaagguucgaucacagcucaaaaacaaugcaaaggaaaucggcaacggguguuuugaguucuaucacaagugcgacaauacauguauggaaagugugaaaaacggaacuuacgauuauccuaaguacuccgaggaagccaaacugaauagagaggagauugacggugucaaacuugaaagcaccaggaucuaucaaauucuggcuauauacucuacaguggcgucaaguuugguccucgugguuagccugggcgcaaucuccuuuuggaugugcucuaacgggucguuacagugccggauuuguaucuga

SEQ ID NO: 132723 - RNA, 1701 nt, Artificial Sequence; identical to SEQ ID NO: 131459
  derived and/or modified CDS sequence (opt3) from hemagglutinin__InfluenzaA__ADG21004

SEQ ID NO: 132724 - RNA, 1701 nt, Artificial Sequence; identical to SEQ ID NO: 131459
  derived and/or modified CDS sequence (opt3) from hemagglutinin__InfluenzaA__ADG21006

SEQ ID NO: 132725 - RNA, 1701 nt, Artificial Sequence
  derived and/or modified CDS sequence (opt3) from hemagglutinin__InfluenzaA__ADG21008
augaagaccaucauugcccugagcuacauacucugccuuguguucgcucagaaaauccccggcaacgacaauuccacagcaacucuguguuuggggcaccaugccgucccuaacggaacgauuguuaagaccaucacaaaugaucaaauugaggugacuaacgcgaccgaauuaguacagucuucaaguacaggugagaucugcgacagcccacaccagauacuggauggcgaaaauuguacccuaaucgacgcucuccugggggauccgcagugcgacggauuucaaaacaaaaagugggaucuuuucguggagagauccaaaucuuauucgaauuguuaccccuaugacgucccugauuacgccucacugaggagcuugguggcaaguuccggcacucucgaauuuaacaaugagucuuucaacuggacagguguuacccagaaugggacgagcuccgccugcauucggaagucaaacaauagcuuuuucagccgccugaacuggcugacucaucucaaguuuaaauauccagcuuuaaaugugaccaugcccaacaacgagcaguucgacaagcuguacaucuggggaguccaccauccuggcacagauaaugaccagauuuuucuuuaugcacaagccucuggccgaaucacuguguccaccaaacguucacagcagacaguaauaccaaacauugggagcagacccaggguucggaauaucccuagucgcauuucuaucuacuggaccaucgugaagccaggagauauuuugcugauaaacuccacggguaaucuaaucgcuccgagaggcuacuucaaaauuaggagcgggaagucgucuaucaugcgguccgacgcccccauaggaaaguguaacucagaaugcauuacuccuaauggcaguaucccaaacgacaaacccuuucagaaugucaaccgcaucacauauggugcguguccucgauacgugaagcaaaauacccucaaacuggcaacugggaugagaaacgugccagagaagcagacaaggggaauuuucggcgccaucgcuggcuuuauugaaaaugggugggagggaauggucgaugguugguauggcuuccggcaccagaacagcgaggggcguggacaagccgcagaccuuaaauccacccaggcugccauagaucagaucaauggcaagcugaaccgcuugauugguaaaacgaacgaaaaguuccaccagaucgagaaggaauuuucugagguugaagggagaauccaagaccucgagaaauacguggaggauaccaagauugaccuguggagcuauaaugcggaauuacugguagcccucgagaaccagcauacaauagaucuuacugacucagaaaugaauaaacuguucgagaagaccaaaaagcaguugagggaaaacgcagaggauaugggcaauggaugcuuuaagaucuaccacaaaugugacaacgcuugcauuggcaguauccggaaugggacauaugaucaugacguguaccgagacgaggcccuaaacaaucgcuuccagauuaagggagucgaacugaaauccgguuacaaggauuggauccucuggauaaguuuugcuaucucuugcuuccugcuuuguguggcccuguugggcuuuauuaugugggcaugccaaaaagggaacaucagauguaauauuugcaucuga

SEQ ID NO: 132726 - RNA, 1701 nt, Artificial Sequence
  derived and/or modified CDS sequence (opt3) from hemagglutinin__InfluenzaA__ADG21009
augaagaccaucauugcccugagcuacauacucugccuuguguucgcucagaaacugcccggcaacgacaauuccacagcaacuuuguguuuagggcaccaugccgucccuaacggaacgaucguuaagaccauuacaaaugaucaaaucgaggugacuaacgcgaccgaacugguacagucuucaaguacaggugagauuugcaauagcccacaccagauccuagacggcgaaaacuguacccucauagaugcucugcuuggggacccgcagugcgauggauuucaaaauaaaaagugggaccuguucguggagagauccaaagccuauucuaacuguuaccccuaugaugucccugacuacgcaucguugaggucacucguggccagcaguggcacucuggaauuuaauaacgaguccuucaauuggacagguguuacccagaacgggacgucuagcgcuugcauccggcgcuccaauaacucauuuuucagucgacugaauuggcucacucauuuacguuuuaaguauccagcacugaacgugaccaugcccaacaaugagcaguucgauaaacuuuacauuuggggaguccaccauccuggcacagacaacgaucagaucuuuuuguaugcccaagcuagcggcagaauuacugugucuaccaagaggucccagcagacaguaaucccaaauauagggucacggccccgcguuagaaacauuccuagcaggaucaguauuuacuggaccaucgugaagccaggagacauccugcuaauuaauucuacggguaaccucauagccccgcggggcuacuucaaaauccgcuccggaaagagcucgauuaugcgaucugaugcgcccaucgggaaauguaauuccgaaugcauaacuccuaacggcucaauuccaaaugacaagcccuuucagaacgucaauagaaucacauauggugcauguccuagguacgugaagcaaaacacccugaaacuugccacugggaugcggaaugugccagagaagcagacacguggaaucuucggcgcuauugccggcuuuaucgaaaacgggugggagggaauggucgacgguugguauggcuuccgccaccagaauagugaggggagaggacaagcagcugaucugaaaagcacccaggccgcgauugaccagauaaacggcaaguugaacaggcucaucgguaaaacgaaugaaaaguuccaccagauugagaaagaauuuuccgagguugaagggcggauccaagaucuggagaaguacguggaggacaccaagaucgauuuauggucuuauaacgccgaacugcucguagcacuugagaaucagcauacaauugaccugacugauagcgaaaugaacaaauuguucgagaagaccaaaaagcagcuacgagaaaaugcugaggacaugggcaacggaugcuuuaaaauauaccacaagugugauaaugccugcaucggcucaauucgcaacgggacauaugaccaugauguguacagagacgaggcucugaauaacagguuccagaucaagggagucgaacucaaaagugguuacaaggacuggauucuguggaucuccuuugccauaagcugcuuccuucuguguguggcauugcucggcuuuaucaugugggccugccaaaaagggaauauucgguguaacaucugcauuuga

SEQ ID NO: 132727 - RNA, 1701 nt, Artificial Sequence; identical to SEQ ID NO: 131459
  derived and/or modified CDS sequence (opt3) from hemagglutinin__InfluenzaA__ADG21010

SEQ ID NO: 132728 - RNA, 1701 nt, Artificial Sequence
  derived and/or modified CDS sequence (opt3) from hemagglutinin__InfluenzaA__ADG21011
augaagaccaucauugcccugagcuacauacucugccuuguguucgcucagaaacugcccggcaacgacaauuccacagcaacuuuguguuuagggcaccaugccgucccuaacggaacgaucguuaagaccauuacaaaugaucaaaucgaggugacuaacgcgaccgaacugguacagucuucaaguacaggugagauuugcgacagcccacaccagauccuagauggcgaaaauuguacccucauagacgcucugcuuggggauccgcagugcgacggauuucaaaacaaaaagugggaucuguucguggagagauccaaagccuauucuaauuguuaccccuaugacgucccugauuacgcaucguugaggucacucguggccagcaguggcacucuggaauuuaacaaugaguccuucaacuggacagguguuacccagaaugggacgucuagcgcuugcauccggcgcuccaacaauucauuuuucagucgacugaacuggcucacucauuuaaauuuuaaguauccagcacugaacgugaccaugcccaacaaugagcaguucgacaagcuguacauuuggggaguccaccauccuggcacagauaaagaccagaucuuuuuguaugcccaagcuagcggccguauuacugugucuaccaagagaucccagcaggccguaaucccaaacauagggucaaggccccggguucgcgauauuccuagcagaaucaguauuuacuggacaaucgugaaaccaggagacauccugcuaauuaauucuaccgguaaccucauagcgccgaggggcuacuucaagauccgguccgggaaaagcucgauuaugcgcucugacgcacccaucggaaaguguaauuccgaaugcauaacgccuaacggcucaauuccaaaugauaagcccuuucagaacgucaaucgaaucacuuauggugccuguccuagauacgugaaacaaaacacacugaaacuugcuaccgggaugaggaaugugccagagaagcagacucggggaaucuucggcgccauugcaggcuuuaucgaaaacgggugggagggaauggucgacgguugguauggcuuccgucaccagaauagugaggggcgcggacaagcugccgaucuuaagagcacacaggcggccauugaccagauaaacggcaaauugaauagacucaucgguaagaccaacgaaaaauuccaccagauugagaaggaauuuuccgagguugaagggaggauccaagaucuggagaaguacguggaggacacgaaaaucgauuuauggucuuauaacgcagaacugcucguagcucuugagaaucagcauaccauugaccugacagauagcgaaaugaacaaguuguucgagaaaacuaagaaacagcuacgggaaaaugccgaggacaugggcaacggaugcuuuaagauauaccacaagugugauaaugcuugcaucggcucaauucgaaacgggaccuaugaccaugacguguaccgcgaugaggcccugaauaacagauuccagaucaaaggagucgaacucaagagugguuacaaagacuggauucuguggaucuccuuugcaauaagcugcuuccuucuguguguggccuugcucggcuuuaucaugugggcuugccaaaaggggaauauuagguguaacaucugcauuuga

SEQ ID NO: 132729 - RNA, 1701 nt, Artificial Sequence; identical to SEQ ID NO: 131459
  derived and/or modified CDS sequence (opt3) from hemagglutinin__InfluenzaA__ADG21012

SEQ ID NO: 132730 - RNA, 1701 nt, Artificial Sequence; identical to SEQ ID NO: 131459
  derived and/or modified CDS sequence (opt3) from hemagglutinin__InfluenzaA__ADG21013

SEQ ID NO: 132731 - RNA, 1701 nt, Artificial Sequence
  derived and/or modified CDS sequence (opt3) from hemagglutinin__InfluenzaA__ADG21014
augaagaccaucauugcccugagcuacauacucugccuuguguucgcucagaaaauccccggcaacgacaauuccacagcaacucuguguuuggggcaccaugccgucccuaacggaacgauuguuaagaccaucacaaaugaucaaauugaggugacuaacgcgaccgaauuaguacagucuucaaguacaggugagaucugcgacagcccacaccagauacuggauggcgaaaauuguacccuaaucgacgcucuccugggggauccgcagugcgacggauuucaaaacaaaaagugggaucuuuucguggagagauccaaagccuauucuaauuguuaccccuaugacgucccugauuacgcaucgcugaggucauugguggccagcaguggcacucucgaauuuaacaaugaguccuucaacuggacagguguuacccagaaugggacgucuagcgcuugcauucggcgcuccaacaauucauuuuucagucgacugaacuggcugacucaucucaauuuuaaguauccagcauuaaacgugaccaugcccaacaaugagcaguucgacaagcuguacaucuggggaguccaccauccuggcacagauaaagaccagauuuuucuuuaugcccaagcuagcggccguaucacugugucuaccaagagaucccagcaggccguaauaccaaacauugggucaaggccccggguucgcaauaucccuagcagaauuaguaucuacuggacaaucgugaaaccaggagauauuuugcugauaaacucuaccgguaaucuaaucgcgccgaggggcuacuucaagauucgguccgggaaaagcucgaucaugcgcucugacgcacccauaggaaaguguaacuccgaaugcauuacgccuaauggcucaaucccaaacgacaagcccuuucagaaugucaaccgaaucacuuauggugccuguccuagauacgugaaacaaaauacacucaagcuggcuaccgggaugaggaacgugccagagaaacagacucggggaauuuucggcgccaucgcaggcuuuauugaaaaugggugggagggaauggucgaugguugguauggcuuccgucaccagaacagugaggggcgcggacaagcugccgaccuuaagagcacacaggcggccauagaucagaucaauggcaaacugaacagauugauugguaagaccaacgaaaaauuccaccagaucgagaaggaauuuuccgagguugaagggaggauccaagaccucgagaaguacguggaggauacgaaaauugaccuguggucuuauaaugcagaauuacugguagcucucgagaaccagcauaccauagaucuuacagacagcgaaaugaauaagcuguucgagaaaacuaagaaacaguugcgggaaaacgccgaggauaugggcaauggaugcuuuaagaucuaccacaagugugacaacgcuugcauuggcucaauccgaaaugggaccuaugaucaugacguguaccgcgacgaggcccuaaacaauagauuccagauuaaaggagucgaacugaagagugguuacaaagauuggauccucuggauauccuuugcaaucagcugcuuccugcuuuguguggcccuguugggcuuuauuaugugggcuugccaaaaggggaacaucagguguaauauuugcaucuga

SEQ ID NO: 132732 - RNA, 1701 nt, Artificial Sequence
  derived and/or modified CDS sequence (opt3) from hemagglutinin__InfluenzaA__ADG21017
augaagaccaucauugcccugagcuacauacucuaucuuguguucgcucagaaacugcccggcaacgacaauuccacagcaacuuugugcuuagggcaccaugccgucccuaacggaacgaucguuaagaccauuacaaaugaucaaaucgaggugacuaacgcgaccgaacugguacagucuucaaguacaggugagauuugugacagcccacaccagauccuagauggcgaaaauugcacccucauagacgcucugcuuggggauccgcagugugacggauuucaaaacaaaaagugggaucuguucaucgagagauccaaagccuacucuaauugcuaucccuacgacgugccugauuaugcaucguugaggucacucgucgccagcaguggcacucuggaauuuaacaaugaguccuucaacuggacaggugugacccagaaugggacgucuagcgcuuguauucggcgcuccaacaauucauuuuucagucgacugaacuggcucacucauuuaaauuuuaaguacccagcacugaacguuaccaugcccaacaaugagcaguucgacaagcuguauaucuggggagugcaccauccuggcacagauaaagaccagauuuuucuuuacgcccaagcuagcggccguaucacugucucuaccaagagaucccagcaggccgugauaccaaacauugggucaaggccccggguacgcaauaucccuagcagaauuaguaucuacuggacaaucguuaaaccaggagauauucugcuaauaaacucuaccgguaaucucaucgcgccgaggggcuauuucaagauucgguccgggaaaagcucgaucaugcgcucugacgcacccauaggaaagugcaacuccgaauguauuacgccuaauggcucaaucccaaacgacaagcccuuucagaaugugaaccgaaucacuuacggugccugcccuagauaugucaaacaaaauacacugaaguuggcuaccgggaugaggaacgugccagagaaacagacucggggaauuuucggcgccaucgcaggcuuuauugaaaaugggugggagggaaugguggaugguugguacggcuuccgucaccagaacagugaggggcgcggacaagcugccgaccuuaagagcacacaggcggccauagaucagaucaauggcaaauugaacagacucauugguaagaccaacgaaaaauuccaccagaucgagaaggaauuuuccgaggucgaagggaggauccaagaccuggagaaguauguugaggauacgaaaauugacuuauggucuuacaaugcagaacugcucguggcucuugagaaccagcauaccauagaucugacagacagcgaaaugaauaaguuguucgagaaaacuaagaaacagcuacgggaaaacgccgaggauaugggcaauggauguuuuaagaucuaucacaagugcgacaacgcuuguauuggcucaauccgaaaugggaccuacgaucaugacguauaccgcgacgaggcccugaacaauagauuccagauuaaaggaguggaacucaagagugguuauaaagauuggauccuguggauauccuuugcaaucagcugcuuccuucugugcgucgccuugcucggcuuuauuaugugggcuugucaaaaggggaacaucaggugcaauauuuguaucuga

SEQ ID NO: 132733 - RNA, 1701 nt, Artificial Sequence
  derived and/or modified CDS sequence (opt3) from hemagglutinin__InfluenzaA__ADG21018
augaagaccaucauugcccugagcuacauacucugccuuguguucgcucagaaacugcccggcaacgacaauuccacagcaacuuuguguuuagggcaccaugccgucccuaacggaacgaucguuaagaccauuacaaaugaucaaaucgaggugacuaacgcgaccgaacugguacagucuucaaguacaggugagauuugcgacagcccacaccagauccuagauggcgaaaauuguacccucauagacgcucugcuuggggauccgcagugcgacggauuucaaaacaaaaagugggaucuguucguggagagauccaaagccuauucuaauuguuaccccuaugacgucccugauuacgcaucguugaggucacucguggccagcaguggcacucuggaauuuaacaaugaguccuucaacuggacagguguuacccagaaugggacgucuagcgcuugcauccggcgcuccaacaauucauuuuucagucgacugaacuggcucacucauagcaauuuuaaguauccagcauuaaacgugaccaugcccaacaaugagcaguucgacaagcuguacauuuggggaguccaccauccuggcacagauaaagaccagaucuuucuuuaugcccaggcuucuggccguauuacuguguccaccaagagaucacaacaggccguaaucccaaacauagggagcaggcaccggguucgcaauauucccaguagaaucucuauuuacuggacaaucgugaaaccuggagauaucuugcugauuaacuccaccgguaaucuaauagcgccaaggggcuacuucaagauccggagcgggaaaucgucuauuaugcgcuccgacgcaccgaucggaaaguguaacucagaaugcauaacgcccaauggcaguauuccuaacgacaagccauuucagaaugucaaccgaaucacuuauggugccugucccagauacgugaaacaaaauacacucaagcuggcuaccgggaugaggaacgugccugagaaacagacucggggaaucuucggcgccauugcaggcuuuaucgaaaaugggugggagggaauggucgaugguugguauggcuuccgucaccagaacagcgaggggcgcggacaagcugccgaccuuaaguccacacaggcggccauugaucagauaaauggcaaacugaacagauugaucgguaagaccaacgaaaaauuccaucagauugagaaggaauuuucugagguugaagggaggauccaagaccucgagaaguacguggaggauacgaaaaucgaccuguggagcuauaaugcagaauuacugguagcucucgagaaccagcacaccauugaucuuacagacucagaaaugaauaagcuguucgagaaaacuaagaaacaguugcgggaaaacgccgaggauaugggcaauggaugcuuuaagauauaccauaagugugacaacgcuugcaucggcaguauucgaaaugggaccuaugaucacgacguguaccgcgacgaggcccuaaacaauagauuccagaucaaaggagucgaacugaaguccgguuacaaagauuggauucucuggaucagcuuugcaauaucuugcuuccugcuuuguguggcccuguugggcuuuaucaugugggcuugccaaaaggggaacauuagguguaauaucugcauuuga

SEQ ID NO: 132734 - RNA, 1701 nt, Artificial Sequence
  derived and/or modified CDS sequence (opt3) from hemagglutinin__InfluenzaA__ADG21019
augaagaccaucauugcccugagcuacauacucugccuuguguucgcucagaaacugcccggcaacgacaauuccacagcaacuuuguguuuagggcaccaugccgucccuaacggaacgaucguuaagaccauuacaaaugaucaaaucgaggugacuaacgcgaccgaacugguacagucuucaaguacaggugagauuugcgacagcccacaccagauccuagauggcaaaaauuguacccucauagacacucugcuuggggauccgcagugcgacggauuucaaaacaagaaaugggaucuguucguggaaagauccaaggcuuauucuaauuguuaccccuaugacgucccugauuacgccucguugaggucacucguggcaagcaguggcacacuggaguuuaacaaugaauccuucaacuggaccgguguuacgcagaaugggacuucuagcgccugcauccggcgcuccaagaacucauuuuucagucgacugaauuggcucacccauuuaaacuuuaaauauccagcucugaaugugacaaugcccaacaacgagcaguucgacaaacuuuacauuuggggaguccaccauccuggcacugauaaggaccagaucuuuuuguaugcacaagccagcggcaagauuaucgugucuaccaaacguucccagcagacaguaauaccaaauauugggucaagacccaggguucggaacaucccuagcauuaucaguaucuacuggaccauugugaagccaggagauauacugcuaaucaauucuacggguaaccucauugcuccgcgcggcuacuucaagaucagauccgggaaaagcucgauaaugaggucugacgcccccauuggaaaguguaauuccgagugcaucacuccuaacggcucaaucccaaaugacaaacccuuucagaacgucaaucggauuacauauggugcguguccucgcuacgugaagcaaaacacccugaaacuugcaacugggaugcgaaaugugccagaaaagcagacaagaggaaucuucggcgccauugcuggcuuuauagagaacgggugggaaggaauggucgaugguugguauggcuucaggcaccagaauagugaggggcggggacaagccgcagaccugaaaagcacccaggcugccaucgaucagauuaacggcaaguugaaucgucucaucgguaagacgaacgagaaauuccaccagaucgaaaaggaguuuuccgaaguugaggggcgcauucaagaccuggaaaaauacguggaggauaccaagauagacuuauggucuuauaacgcggagcugcucguagcccuugaaaaucagcauacaaucgaucugacugacagcgagaugaacaaauuguucgaaaagaccaagaaacagcuaagagagaaugcagaagauauuggcaacggaugcuuuaagaucuaccacaaaugugacaaugcuugcauuggcucaaucaggaacgggacauaugaucaugacguguaccgggacgaggcccugaauaaccgauuccagauaaagggagucgagcucaaaagugguuacaaggauuggauccuguggauuuccuuugcuaucagcugcuuccuucuguguguggccuugcucggcuuuauuaugugggcaugccaaaaggggaauauccgcuguaacauaugcauuuga

SEQ ID NO: 132735 - RNA, 1701 nt, Artificial Sequence
  derived and/or modified CDS sequence (opt3) from hemagglutinin__InfluenzaA__ADG21020
augaagaccaucauugcccugagcuacauacucugccuuguguucgcucagaaacugcccggcaacgacaauuccacagcaacuuuguguuuagggcaccaugccgucccuaacggaacgaucguuaagaccauuacaaaugaucaaaucgaggugacuaacgcgaccgaacugguacagucuucaaguacaggugagauuugcgacagcccacaccagauccuagauggcaaaaauuguacccucauagacgcucugcuuggggauccgcagugcgacggauuucaaaacaagaaaugggaucuguucguggaaagauccaaggccuauucuaauuguuaccccuaugacgucccugauuacgcaucguugaggucacucguggccagcaguggcacucuggaguuuaacaaugaauccuucaacuggacagguguuacccagucugggacgagcuccgcuugcauccggcgcucaaagaauagcuuuuucagucgacugaacuggcucacucauuuaaauuuuaaauauccagcacugaacgugaccaugcccaauaacgagcaguucgacaaacuuuacauuuggggaguccaccauccuggcacagauaaagaccagaucuuuuuguaugcccaggcuucuggccguauuaucguguccacuaagagaucacaacagaccguaacaccaaacauagggagcaggccccggguucgcaauauuccuaguagaaucucuauuuacuggaccaucgugaaaccaggagauauccugcuaauuaacuccacggguaaucucauagccccgaggggcuacuucaagauccggagcgggaagucgucuauuaugcgcuccgacgcgcccaucggaaaauguaacucagagugcauaacuccuaauggcaguauuccaaacgacaagcccuuucagaaugucaaccgaaucacauauggugcauguccuagauacgugaaacaaaauacccugaaacuugccacugggaugaggaacgugccagaaaagcagacacggggaaucuucggcgcuauugccggcuuuaucgagaaugggugggaaggaauggucgaugguugguauggcuuccgucaccagaacagcgaggggcgcggacaagcagcugaccugaaguccacccaggccgcgauugaucagauaaauggcaaauugaacagacucaucgguaagacgaaugagaaguuccaccagauugaaaaagaguuuucugaaguugaggggaggauccaagaccuggaaaaguacguggaggauaccaaaaucgacuuauggagcuauaacgccgagcugcucguagcacuugaaaaccagcauacaauugaucugacugacucagagaugaauaaguuguucgaaaagaccaagaagcagcuacgggagaacgcugaagauaugggcaauggaugcuuuaaaauauaccacaagugugacaacgccugcaucggcaguauucgaaaugggacauaugaucaugacguguaccgcgacgaggcucugaacaauagauuccagaucaaaggagucgagcucaaguccgguuacaaagauuggauucuguggaucagcuuugccauaucuugcuuccuucuguguguggcauugcucggcuuuaucaugugggccugccaaaaggggaacauuagguguaauaucugcauuuga

SEQ ID NO: 132736 - RNA, 1701 nt, Artificial Sequence; identical to SEQ ID NO: 130482
  derived and/or modified CDS sequence (opt3) from hemagglutinin__InfluenzaA__ADG21022

SEQ ID NO: 132737 - RNA, 1701 nt, Artificial Sequence; identical to SEQ ID NO: 130482
  derived and/or modified CDS sequence (opt3) from hemagglutinin__InfluenzaA__ADG21023

SEQ ID NO: 132738 - RNA, 1701 nt, Artificial Sequence
  derived and/or modified CDS sequence (opt3) from hemagglutinin__InfluenzaA__ADG21024
augaagaccaucauugcccugagcuacauacucugccuuguguucacacagaaacugcccggcaacgacaauuccacugcuacguuguguuuagggcaccaugcagucccuaacggaaccaucguuaagacaauuacuaaugaucaaaucgaggugaccaacgccacagaacugguacagucuucaaguaccggugagauuugcgacagcccacaccagauccuagauggcgaaaauuguacucucauagacgcgcugcuuggggauccgcagugcgacggauuucaaaacaaaaagugggaucuguucguggagagauccaaggcuuauucuaauuguuaccccuaugacgucccugauuacgccucguugaggucacucguggcaagcaguggcgcccuggaauuuaacaaugaguccuucaacuggacagguguuacccagaaugggacgucuagcgcuugcauccggcgcuccaacaauucauuuuucagucgacugaacuggcucacucauuuaaauuuuaaguauccagcacugaacgugaccaugcccaacaaugagcaguucgacaaacuuuacauuuggggaguccaccauccuggcacagauaaagaccagaucuuuuuguaugcccaagcuagcggccguauuacugugucuaccaagagaucccagcaggccguaaucccaaacauagggucaaggccccggguucgcaauauuccuagcagaaucaguauuuacuggacaaucgugaaaccaggagauauccugcuaauuaacucuaccgguaaucucauagcgccgaggggcuacuucaagauccaguccgggaaaagcucgauuaugcggucugacgcacccaucggaaaguguaacuccgaaugcauaacgccuaauggcucaauuccaaacgacaagcccuuucaaaaugucaaccgcaucacuuauggugccuguccucgauacgugaaacagaguacacugaaacuugcuaccgggaugagaaaugugccagagaagcagacuaggggaaucuucggcgccauugcaggcuuuaucgaaaacgggugggagggaauggucgaugguugguauggcuuccggcaccaaaauagcgaggggcguggacaggcugccgaccugaaguccacacaggcggccauugaucagauaaacggcaaauugaaucgccucaucgguaagaccaacgaaaaauuccaccaaauugagaaggaauuuucugagguugaagggagaauccaggaccuggagaaguacguggaggauacgaaaaucgacuuauggagcuauaacgcagaacugcucguagcucuugagaaucagcauaccauugaucugacagacucagaaaugaacaaguuguucgagaaaacuaagaaacagcuaagggaaaaugccgaggauaugggcaacggaugcuuuaagauauaccacaagugugacaaugcuugcaucggcaguauucggaacgggaccuaugaucaugacguguaccgagacgaggcccugaauaaccgcuuccaaaucaaaggagucgaacucaaguccgguuacaaagauuggauucuguggaucagcuuugcaauaucuugcuuccuucuguguguggccuugcucggcuuuaucaugugggcuugccagaaggggaauauuagauguaacaucugcauuuga

SEQ ID NO: 132739 - RNA, 1701 nt, Artificial Sequence
  derived and/or modified CDS sequence (opt3) from hemagglutinin__InfluenzaA__ADG21026
augaagaccaucauugcccugagcuacauacucugccuuguguucgcucagaaacugcccggcaacgacaauuccacagcaacuuuguguuuagggcaccaugccgucccuaacggaacgaucguuaagaccauuacaaaugaucaaaucgaggugacuaacgcgaccgaacugguacagucuucaaguacaggugagauuugcgacagcccacaccagauccuagauggcgaaaauuguacccucauagacgcucugcuuggggauccgcagugcgacggauuucaaaacaaaaagugggaucuguucguggagagauccaaagccuauucuaauuguuaccccuaugacgucccugauuacgcaucguugaggucacucguggccagcaguggcacucuggaauuuaacaaugaguccuucaacuggacagguguuacccagaaugggacgucuagcgcuugcauccggcgcuccaacaauucauuuuucagucgacugaacuggcucacucauuuaaauuuuaaguauccagcacugaacgugaccaugcccaacaaugagcaguucgacaaacuuuacauuuggggaguccaccauccuggcacagauaaggaccagaucuuuuuguaugcccaagcuagcggccguauuacugugucuaccaagagaucccagcaggccguaaucccaaacauagggucaaggcugcggguucgcaauauucccagcagaaucaguauuuacuggacaaucgugaaaccuggagauauccuacucauuaacucuaccgguaaucugauagcgccaaggggcuacuucaagauccgguccgggaaaagcucgauuaugcgcucugacgcaccgaucggaaaguguaacuccgaaugcauaacgcccaauggcucaauuccuaacgacaagccauuucagaaugucaaccgaaucacuuauggugccugucccagauacgugaaacaaaguacacuuaagcuggcuaccgggaugaggaaugugccugagaaacagacucggggaaucuucggcgccauugcaggcuuuaucgaaaacgggugggagggaauggucgaugguugguauggcuuccgucaccagaauagcgaggggcgcggacaagcugccgacuugaaguccacacaggcggccauugaucagauaaacggcaaacucaauagacugaucgguaagaccaacgaaaaauuccaccagauugagaaggaauuuucugagguugaagggaggauccaagacuuagagaaguacguggaggauacgaaaaucgaccuguggagcuauaacgcagaacuccuuguagcucuggagaaucagcauaccauugauuugacagacucagaaaugaacaagcuauucgagaaaacuaagaaacagcugcgggaaaaugccgaggauaugggcaacggaugcuuuaccauauaccacaagugugacaaugcuugcaucggcaguauucgaaacgggacauaugaucauaauguguaccgcgacgaggcccucaacaauagauuccagaucaagggagucgaacugaaauccgguuacaaggacuggauucuuuggaucagcuuugcaauaucuugcuuccuguuguguguggcccuccugggcuuuaucaugugggcuugccaaaaagggaacauuagguguaauaucugcauuuga

SEQ ID NO: 132740 - RNA, 1701 nt, Artificial Sequence; identical to SEQ ID NO: 130717
  derived and/or modified CDS sequence (opt3) from hemagglutinin__InfluenzaA__ADG21037

SEQ ID NO: 132741 - RNA, 1701 nt, Artificial Sequence
  derived and/or modified CDS sequence (opt3) from hemagglutinin__InfluenzaA__ADG21038
augaaggccauccuggugguccuccuuuacaccuucgcuacagcagacgccgauacucugugcauuggcuaucacgcgaacaauagcacggacaccguugauacaguguuggagaagaacguaacugugacccauuccgucaauuuacuggaagacaagcacaacgggaaacuauguaagcucagaggaguggcuccccugcaucuugguaaaugcaauauagccggcuggauccuggggaacccugagugugaaucuuugucaacagcaaguagcugguccuacauuguugagaccucuucgucagauaauggaacuugcuauccaggcgacuuuaucgauuacgaggagcucagggagcagcugagcaguguguccucuuucgaacgguuugagauuuucccgaagacaagcuccuggcccaaccacgacucaaauaagggugucaccgccgcuuguccucaugcaggggccaaaaguuuuuauaagaaccugaucuggcucgugaaaaagggaaauagcuacccaaaauuaucuaaguccuauauaaacgauaagggcaaagaaguacugguucuuuggggcauccaccaccccucaacgagcgcugaccaacagaguuuguaccagaaugccgaugcguacguguucgucgggacuucucgcuauuccaagaaauuuaagccugagauugcaauccgaccaaaagugcgugaccaggagggaagaaugaacuacuauuggacccugguggaacccggugauaagauuacauucgaggccacuggcaaucuagucguuccuagguacgcuuuugccauggaacggaacgcagggagcggaaucauaauuucggacaccccagugcaugacugcaacacaaccugucaaacgccgaaaggcgcuaucaauacuucucuccccuuccagaacauucacccuaucacaaucgguaagugcccaaaguauguaaaauccaccaagcugcgccuugccacugggcugagaaaugugcccucaauucagaguaggggauuguuuggcgcgauagccggcuucaucgaagggggauggacagguauggucgauggcugguacggguaucaucaccagaacgaacaaggaagcggcuacgcagcugaccucaaauccacccagaaugccauugaugagaucacgaacaagguaaauucuguuauagagaaaaugaacacccaguuuacagcuguggguaaggaguucaaucaccuggaaaagcggauugaaaacuuaaauaaaaaggucgacgauggguuccuggacaucuggacuuacaacgccgagcuccuugugcuguuggaaaaugagcgcacccuagauuaucaugacagcaacgugaaaaaucuguacgagaagguucgaucacagcucaaaaacaacgcaaaggaaaucggcaauggauguuuugaguucuaucacaagugcgauaacacauguauggaaagugugaaaaauggcacuuacgacuauccuaaguacuccgaggaagccaaacugaacagagaggagauugauggggucaaacuugaaagcaccaggaucuaucaaauucuggcuauauacucuacaguggcgucaaguuugguccucgugguuagccugggagcaaucuccuuuuggaugugcucuaaugguucguuacagugccggauuuguaucuga

SEQ ID NO: 132742 - RNA, 1701 nt, Artificial Sequence
  derived and/or modified CDS sequence (opt3) from hemagglutinin__InfluenzaA__ADG21040
augaaggccauccuggugguccuccuuuacaccuucgcuacagcaaacgccgacacucugugcauuggcuaucacgcgaauaacagcacggauaccguugacacaguguuggagaagaauguaacugugacccauuccgucaacuuacuggaagauaagcacaaugggaaacuauguaagcucagaggaguggcuccccugcaucuugguaaaugcaacauagccggcuggauccuggggaauccugagugugaaucuuugucaacagcaaguagcugguccuacauuguugagaccucuucgucagacaacggaacuugcuauccaggcgauuuuaucgacuacgaggagcucagggagcagcugagcaguguguccucuuucgaacgguuugagauuuucccgaagacaagcuccuggcccaaucacgauucaaacaagggugucaccgccgcuuguccucaugcaggggccaaaaguuuuuauaagaaucugaucuggcucgugaaaaagggaaacagcuacccaaaauuaucuaaguccuauauaaaugacaagggcaaagaaguacugguucuuuggggcauccaccaccccucaacgagcgcugaucaacagaguuuguaccagaacgccgacgcguacguguucgucgggacuucucgcuauuccaagaaauuuaagccugagauugcaauccgaccaaaagugcgugaucaggagggaagaaugaauuacuauuggacccugguggaacccggugacaagauuacauucgaggccacuggcaaccuagucguuccuagguacgcuuuugccauggaacggaacgcagggagcggaaucauaauuucggauaccccagugcaugacugcaauacaaccugucaaacgccgaaaggcgcuaucaacacuucucuccccuuccagaauguacacccuauuacaaucgguaagugcccaaaguaugugaaauccaccaagcugcgccuugccacugggcugagaaacguccccucaauccagaguaggggauuguuuggcgcgauugccggcuucauagaagggggauggacagguaugguggacggcugguacggguaucaucaccagaaugaacaaggaagcggcuacgcagcugaucucaaauccacccagaacgccaucgacgagauuacgaauaagguuaacucugugaucgagaaaaugaauacccaguuuacagcugucgguaaggaguucaaccaccuggaaaagcggauagaaaauuuaaacaaaaagguggaugacggguuccuggauauuuggacuuacaaugccgagcuccuuguacuguuggaaaacgagcgcacccuagacuaucaugauagcaauguuaaaaaccuguacgagaaggugcgaucacagcucaaaaacaaugcaaaggaaaucggcaacggauguuuugaguucuaucacaagugcgacaauacauguauggaaagugucaaaaacggcacuuacgauuauccuaaguacuccgaggaagccaaacugaauagagaggagaucgacggggugaaacuugaaagcaccagggucuaucaaauucuggcuaucuacucuacaguggcgucaaguuugguucucgugguaagccugggagcaauuuccuuuuggaugugcucuaacgguucguuacagugccggauauguaucuga

SEQ ID NO: 132743 - RNA, 1701 nt, Artificial Sequence
  derived and/or modified CDS sequence (opt3) from hemagglutinin__InfluenzaA__ADG21041
augaaggccauccuggugguccuccuuuacaccuucacaacugcuaacgcagacacgcugugcauuggcuaucacgccaauaacagcaccgauacaguugacacuguguuggagaaaaauguaaccgugacacauuccgucaacuuacuggaagauaagcacaaugggaaacuauguaagcucagaggaguggcgccccugcaucuugguaaaugcaacauagcuggcuggauccuggggaauccugagugugaaucuuugucaaccgccaguagcugguccuacauuguugagacuucuucgucagacaacggaacaugcuauccaggcgauuuuaucgacuacgaagaacucagggagcagcugagcaguguguccucuuucgaacgguuugagauuuucccgaagaccagcuccuggcccaaucacgauucaaacaagggugucacggcagccuguccucaugcuggggcaaaaaguuuuuauaagaaucugaucuggcucgugaaaaagggaaacagcuacccaaaauuaucuaaguccuauauaaaugacaagggcaaagaaguacugguucuuuggggcauccaccaccccucaacuagcgccgaucaacagaguuuguaccagaacgcugacgccuacguguucgucgggaccucucgcuauuccaagaaauuuaagccugagauugcgauccgaccaaaagugcgugagcaggaaggaagaaugaauuacuauuggacacugguggagcccggugauaagauuacuuucgaagcaaccggcaaccuagucguuccuagguacgccuuugcuauggagcggaacgccgggagcggaaucauaauuucggacacaccagugcaugauugcaauaccacgugucaaacuccgaaaggcgcaaucaacacaucucuccccuuccagaauauucacuccaucaccaucgguaagugcccuaaguauguaaaaucaacuaagcugcgccuugcuacagggcugagaaacgugccaaguauucagagcaggggauuguuuggcgccauagcgggcuucaucgaagggggauggaccgguauggucgacggcugguacggguaucaucaccagaaugagcaaggauccggcuacgccgcagaccucaaaucuacgcagaacgcuauugaugagaucaccaauaaggugaacagcguuauagaaaagaugaauacacaguuuacugccguggguaaggaguucaaccaccuggaaaagcggauugagaauuuaaacaaaaaggucgacgauggguuccuggacaucuggaccuacaaugcugaacuccuugugcuguuggagaacgagcgcacacuagauuaucaugacucaaauguuaaaaaccuguacgaaaagguacgaagucagcucaaaaacaaugccaaggagaucggcaacggauguuuugaguucuaucacaagugcgauaauacuuguauggaguccgugaaaaacggcaccuacgacuaucccaaguacagcgaagaggcaaaacugaauagagaggaaauugauggggucaaacuugagucuacaaggaucuaucaaauucuggccauauacucaaccguggcuaguagcuugguccucgugguuucccugggagcggugucuuuuuggaugugcucgaacgguagcuuacagugccggaucuguauuuga

SEQ ID NO: 132744 - RNA, 1701 nt, Artificial Sequence; identical to SEQ ID NO: 131818
  derived and/or modified CDS sequence (opt3) from hemagglutinin__InfluenzaA__ADG21042

SEQ ID NO: 132745 - RNA, 1701 nt, Artificial Sequence
  derived and/or modified CDS sequence (opt3) from hemagglutinin__InfluenzaA__ADG21043
augaaggccauccuggugguccuccuuuacaccuucacaacugcuaacgcagacacgcugugcguuggcuaucacgccaauaacagcaccgauacaguggacacuguauuggagaaaaaugugaccgucacacauuccgugaacuuacuggaagauaagcacaaugggaaacuauguaagcucagaggaguugcgccccugcaucuugguaaaugcaacauugcuggcuggauacuggggaauccugagugugaaucuuugucaaccgccaguagcugguccuacaucguggagacuucuucgucagacaacggaacaugcuauccaggcgauuuuauugacuacgaagaacucagggagcagcugagcagugucuccucuuucgaacgguuugagaucuucccgaagaccagcuccuggcccaaucacgauucaaacaagggugugacggcagccuguccucaugcuggggcaaaaaguuuuuauaagaaucugauuuggcucguaaagaagggaaacagcuacccaaaauuaucuaaguccuauaucaaugacaagggcaaagaaguucuggugcuuuggggcauacaccaccccucaacuagcgccgaucaacagaguuuguaccagaacgcugacgccuacgucuucguggggaccucucgcuauuccaagaaauuuaagccugagaucgcgauucgaccaaaagugcgugagcaggaaggaagaaugaauuacuauuggacacuggucgagcccggugauaagaucacuuucgaagcaaccggcaaccuaguugugccuagguacgccuuugcuauggagcggaacgccgggagcggaauuaucauaucggacacaccaguacaugauugcaauaccacgugucaaacuccgaaaggcgcaauuaacacaucucuccccuuccagaauauccacuccauuaccaucgguaagugcccuaaguaugugaaaucaacuaagcugcgccuugcuacagggcugagaaacgucccaaguauccagagcaggggauuguuuggcgccauugcgggcuucauagaagggggauggaccgguaugguggacggcugguacggguaucaucaccagaaugagcaaggauccggcuacgccgcagaccucaaaucuacgcagaacgcuaucgaugagauuaccaauaagguuaacagcgugaucgagaaaaugaauacacaguuuacugccgucgguaaggaguucaaccaccuggaaaagcggauagagaauuuaaacaaaaagguggacgauggguuccuggacauuuggaccuacaaugcugaacuccuuguacuguuggagaacgagcgcacacuagauuaucaugacucaaauguuaaaaaccuguacgaaaaggugcgaagucagcucaaaaacaaugccaaggagaucggcaacggauguuuugaguucuaucacaagugcgauaauacuuguauggaauccgucaaaaacggcaccuacgacuaucccaaguacagcgaagaggcaaaacugaauagagaggaaaucgauggggugaaacuugagucuacaaggauuuaucaaauccuggccauuuacucaaccgucgcuaguagcuuggugcucguugugucccugggagcgauaucuuuuuggaugugcucgaacgguagcuuacagugccggaucuguauuuga

SEQ ID NO: 132746 - RNA, 1701 nt, Artificial Sequence
  derived and/or modified CDS sequence (opt3) from hemagglutinin__InfluenzaA__ADG21045
augaaggccauccuggugguccuccuuuacaccuucacaacugcuaacgcagacacgcugugcauuggcuaucacgccaauaacagcaccgauacaguugacacuguguuggagaaaaauguaaccgugacacauuccgucaacuuacuggaagauaagcacaaugggaaacuauguaagcucagaggaguggcgccccugcaucuugguaaaugcaacauagcuggcuggauccuggggaauccugagugugaaucuuugucaaccgccaguagcugguccuacauuguugagacuucuucgucagacaacggaacaugcuauccaggcgauuuuaucgacuacgaagaacucagggagcagcugagcaguguguccucuuucgaacgguuugagauuuucccgaagaccagcuccuggcccaaucacgauucaaacaagggugucacggcagccuguccucaugcuggggcaaaaaguuuuuauaagaaucugaucuggcucgugaaaaagggaaacagcuacccaaaauuaucuaaguccuauauaaaugacaagggcaaagaaguacugguucuuuggggcauccaccaccccucaacuagcgccgaucaacagaguuuguaccagaacgcugacgccuacguguucgucgggaccucucgcuauuccaagaaauuuaagccugagauugcgauccgaccaaaagugcgugagcaggaaggaagaaugaauuacuauuggacacugguggagcccggugauaagauuacuuucgaagcaaccggcaaccuagucguuccuagguacgccuuugcuauggagcggaacgccgggagcggaaucauaauuucggacacaccagugcaugauugcaauaccacgugucaaacuccgaaaggcgcaaucaacacaucucuccccuuccagaauauucacuccaucaccaucgguaagugcccuaaguauguaaaaucaacuaagcugcgccuugcuacagggcugagaaacgugccaaguauucagagcaggggauuguuuggcgccauagcgggcuucaucgaagggggauggaccgguauggucgacggcugguacggguaucaucaccagaaugagcaaggauccggcuacgccgcagaccucaaaucuacgcagaacgcuauugaugagaucaccaauaaggugaacagcguuauagaaaagaugaauacacaguuuacugccguggguaaggaguucaaccaccuggaaaagcggauugagaauuuaaacaaaaaggucgacgauggguuccuggacaucuggaccuacaaugcugaacuccuugugcuguuggagaacgagcgcacacuagauuaucaugacucaaauguuaaaaaccuguacgaaaagguacgaagucagcucaaaaacaaugccaaggagaucggcaacggauguuuugaguucuaucacaagugcgauaauacuuguauggaguccgugaaaaacggcaccuacgacuaucccaaguacagcgaagaggcaaaacugaauagagaggaaauugauggggucaaacuugagucuacaaggaucuaucaaauucuggccauauacucaaccguggcuaguagcuugguccucgugguuucccugggagcgaucucuuuuuggaugugcucgaacgguagcuuacagugccggauuuguaucuga

SEQ ID NO: 132747 - RNA, 1701 nt, Artificial Sequence; identical to SEQ ID NO: 132746
  derived and/or modified CDS sequence (opt3) from hemagglutinin__InfluenzaA__ADG21046

SEQ ID NO: 132748 - RNA, 1701 nt, Artificial Sequence; identical to SEQ ID NO: 131881
  derived and/or modified CDS sequence (opt3) from hemagglutinin__InfluenzaA__ADG21048

SEQ ID NO: 132749 - RNA, 1701 nt, Artificial Sequence
  derived and/or modified CDS sequence (opt3) from hemagglutinin__InfluenzaA__ADG21049
augaaggccauccuggugguccuccuuuacaccuucgcuacagcaaacgccgacacucugugcauuggcuaucacgcgaauaacagcacggauaccguugacacaguguuggagaagaauguaacugugacccauuccgucaacuuacuggaagauaagcacaaugggaaacuauguaagcucagaggaguggcuccccugcaucuugguaaaugcaacauagccggcuggauccuggggaauccugagugugaaucuuugucaacagcaaguagcugguccuacauuguugagaccucuucgucagacaacggaacuugcuauccaggcgauuuuaucgacuacgaggagcucagggagcagcugagcaguguguccucuuucgaacgguuugagauuuucccgaagacaagcuccuggcccaaucacgauucaaacaagggugucaccgccgcuuguccucaugcaggggccaaaaguuuuuauaagaaucugaucuggcucgugaaaaagggaaacagcuacccaaaauuaucuaaguccuauauaaaugacaagggcaaagaaguacugguucuuuggggcauccaccaccccucaacgagcgcugaucaacagaguuuguaccagaacgccgacgcguacguguucgucgggacuucucgcuauuccaagaaauuuaagccugagauugcaauccgaccaaaagugcguaaucaggagggaagaaugaacuacuauuggacccugguggaacccggugauaagauuacauucgaggccacuggcaaccuagucguuccuagguacgcuuuugccauggaacggaaugcagggagcggaaucauaauuucggacaccccagugcaugauugcaacacaaccugucaaacgucuaaaggcgcuaucaauacuucccucccguuccagaacauucaccccaucacaaucgguaagugcccuaaguauguaaaaucaaccaagcugcgccuugccacugggcugagaaauauuccaaguauacagagcaggggauuguuuggcgcgaucgccggcuucauugaagggggauggacagguaugguggacggcugguacggguaucaucaccagaacgaacaaggauccggcuacgcagcugaccucaaaucuacccagaaugccaucgaugagauaacgaacaaggucaauagcgugauugagaaaaugaacacccaguuuacagcuguugguaaggaguucaaucaccuggaaaagcggaucgaaaacuuaaauaaaaagguggacgauggguuccuggacaucuggacuuacaacgccgagcuccuuguccuguuggaaaaugagcgcacccuagauuaucaugacucaaacgugaaaaaccuguacgagaagguacgaagucagcucaaaaauaacgcaaaggaaauuggcaauggauguuuugaguucuaucacaagugcgauaacacauguauggaauccguuaaaaauggcacuuacgacuaucccaaguacagcgaggaagccaaacugaacagagaggagaucgauggggugaaacuugaaucuaccaggauuuaucaaauacuggcuaucuacucaacagucgcgaguagcuuggugcucgucgugucccugggagcaauuucuuuuuggaugugcucgaaugguagcuuacagugccggaucuguaucuga

SEQ ID NO: 132750 - RNA, 1701 nt, Artificial Sequence; identical to SEQ ID NO: 131070
  derived and/or modified CDS sequence (opt3) from hemagglutinin__InfluenzaA__ADG21122

SEQ ID NO: 132751 - RNA, 1701 nt, Artificial Sequence; identical to SEQ ID NO: 131881
  derived and/or modified CDS sequence (opt3) from hemagglutinin__InfluenzaA__ADG21123

SEQ ID NO: 132752 - RNA, 1701 nt, Artificial Sequence; identical to SEQ ID NO: 130717
  derived and/or modified CDS sequence (opt3) from hemagglutinin__InfluenzaA__ADG21124

SEQ ID NO: 132753 - RNA, 1701 nt, Artificial Sequence
  derived and/or modified CDS sequence (opt3) from hemagglutinin__InfluenzaA__ADG21125
augaaggccauccuggugguccuccuuuacaccuucgcuacagcaaacgccgacacucugugcauuggcuaucacgcgaauaacagcacggauaccguugacacaguguuggagaaaaauguaacugugacccauuccgucaacuuacuggaagauaagcacaaugggaaacuauguaagcucagaggaguggcuccccugcaucuugguaaaugcaacauagccggcuggauccuggggaauccugagugugaaucuuugucaacagcaaguagcugguccuacauuguugagaccucuucgucagacaacggaacuugcuauccaggcgauuuuaucgacuacgaagaacucagggagcagcugagcaguguguccucuuucaagcgguuugaaauuuucccgaagacaagcuccuggcccaaucacgauucaaacaaaggugucaccgccgcuuguccucaugcaggggccaagaguuuuuauaaaaaucugaucuggcucgugaagaaaggaaacagcuacccaaaguuaucuaaguccuauauaaaugacaaaggcaaggagguacugguucuuuggggcauccaccaccccucaacgagcgcugaucaacagaguuuguaccagaacgccgacgcguacguguucgucgggacuucucgcuauuccaaaaaguuuaaaccugaaauugcaauccgaccaaaggugcgugaucaggagggaagaaugaauuacuauuggacccugguggagcccggugacaaaauuacauucgaagccacuggcaaccuagucguuccuagguacgcuuuugccauggagcggaacgcagggagcggaaucauaauuucggauaccccagugcaugacugcaauacaaccugucaaacgccgaagggcgcuaucaacacuucucuccccuuccagaauauucacccuaucacaaucgguaagugcccaaaauauguaaaguccaccaaacugcgccuugccacugggcugagaaacgugcccucaauucagaguaggggauuguuuggcgcgauagccggcuucaucgaagggggauggacagguauggucgacggcugguacggguaucaucaccagaaugagcaaggaagcggcuacgcagcugaucucaaguccacccagaacgccauugacgaaaucacgaauaaagugaacucuguuauagagaagaugaauacccaguuuacagcuguggguaaggaguucaaccaccuggaaaaacggauugagaauuuaaacaagaaagucgaugacggguuccuggauaucuggacuuacaaugccgaacuccuugugcuguuggagaacgaacgcacccuagacuaucaugauagcaauguaaagaaccuguacgagaaaguucgaucacagcucaagaacaaugcaaaggagaucggcaacggauguuuugaguucuaucacaaaugcgacaauacauguauggagagugugaagaacggcacuuacgauuauccuaaauacuccgaagaggccaagcugaauagagaagagauugacggggucaaacuugagagcaccaggaucuaucaaauucuggcuauauacucuacaguggcgucaaguuugguccucgugguuagccugggagcaaucuccuuuuggaugugcucuaacgguucguuacagugccggauuuguaucuga

SEQ ID NO: 132754 - RNA, 1701 nt, Artificial Sequence; identical to SEQ ID NO: 130704
  derived and/or modified CDS sequence (opt3) from hemagglutinin__InfluenzaA__ADG21126

SEQ ID NO: 132755 - RNA, 1701 nt, Artificial Sequence; identical to SEQ ID NO: 130704
  derived and/or modified CDS sequence (opt3) from hemagglutinin__InfluenzaA__ADG21127

SEQ ID NO: 132756 - RNA, 1701 nt, Artificial Sequence; identical to SEQ ID NO: 130704
  derived and/or modified CDS sequence (opt3) from hemagglutinin__InfluenzaA__ADG21128

SEQ ID NO: 132757 - RNA, 1701 nt, Artificial Sequence; identical to SEQ ID NO: 130704
  derived and/or modified CDS sequence (opt3) from hemagglutinin__InfluenzaA__ADG21129

SEQ ID NO: 132758 - RNA, 1701 nt, Artificial Sequence; identical to SEQ ID NO: 130717
  derived and/or modified CDS sequence (opt3) from hemagglutinin__InfluenzaA__ADG21130

SEQ ID NO: 132759 - RNA, 1701 nt, Artificial Sequence; identical to SEQ ID NO: 130704
  derived and/or modified CDS sequence (opt3) from hemagglutinin__InfluenzaA__ADG21131

SEQ ID NO: 132760 - RNA, 1701 nt, Artificial Sequence; identical to SEQ ID NO: 130704
  derived and/or modified CDS sequence (opt3) from hemagglutinin__InfluenzaA__ADG21132

SEQ ID NO: 132761 - RNA, 1701 nt, Artificial Sequence; identical to SEQ ID NO: 130704
  derived and/or modified CDS sequence (opt3) from hemagglutinin__InfluenzaA__ADG21133

SEQ ID NO: 132762 - RNA, 1701 nt, Artificial Sequence; identical to SEQ ID NO: 130704
  derived and/or modified CDS sequence (opt3) from hemagglutinin__InfluenzaA__ADG21134

SEQ ID NO: 132763 - RNA, 1701 nt, Artificial Sequence; identical to SEQ ID NO: 130704
  derived and/or modified CDS sequence (opt3) from hemagglutinin__InfluenzaA__ADG21135

SEQ ID NO: 132764 - RNA, 1701 nt, Artificial Sequence; identical to SEQ ID NO: 130704
  derived and/or modified CDS sequence (opt3) from hemagglutinin__InfluenzaA__ADG21136

SEQ ID NO: 132765 - RNA, 1701 nt, Artificial Sequence; identical to SEQ ID NO: 130704
  derived and/or modified CDS sequence (opt3) from hemagglutinin__InfluenzaA__ADG21137

SEQ ID NO: 132766 - RNA, 1701 nt, Artificial Sequence; identical to SEQ ID NO: 130704
  derived and/or modified CDS sequence (opt3) from hemagglutinin__InfluenzaA__ADG21138

SEQ ID NO: 132767 - RNA, 1701 nt, Artificial Sequence; identical to SEQ ID NO: 130704
  derived and/or modified CDS sequence (opt3) from hemagglutinin__InfluenzaA__ADG21139

SEQ ID NO: 132768 - RNA, 1701 nt, Artificial Sequence
  derived and/or modified CDS sequence (opt3) from hemagglutinin__InfluenzaA__ADG21140
augaaggccauccuggugguccuccuuuacaccuucgcuacagcaaacgccgacacucugugcauuggcuaucacgcgaauaacagcacggauaccguugacacaguguuggagaagaauguaacugugacccauuccgucaacuuacuggaagauaagcacaaugggaaacuauguaagcucagaggaguggcuccccugcaucuugguaaaugcaacauagccggcuggauccuggggaauccugagugugaaucuuugucaacagcaaguagcugguccuacauuguugagaccucuucgucagacaacggaacuugcuauccaggcgauuuuaucgacuacgaggagcucagggagcagcugagcaguguguccucuuucgaacgguuugagauuuucccgaagacaagcuccuggcccaaucacgauucaaacaagggugucaccgccgcuuguccucaugcaggggccaaaaguuuuuauaagaaucugaucuggcucgugaaaaagggaaacagcuacccaaaauuaucuaaguccuauauaaaugacaagggcaaagaaguacugaugcuuuggggcauccaccaccccucaacgagcgcugaucaacagaguuuguaccagaacgccgacgcguacguuuucguggggucuucccgcuauagcaagaaauuuaagccugagauugcaauccgaccaaaaguccgugaucaggagggaagaaugaauuacuauuggacucugguggaacccggugacaagauuaccuucgaggccacaggcaaccuaguggucccuagguacgcuuuugccauggaacggaacgcagggucgggaaucauaauuucugauacuccaguucaugacugcaauaccacaugucaaaccccgaaaggcgcuaucaacacgucccuccccuuccagaauauucacccuaucacuaucgguaagugcccaaaguaugugaaaucaacaaagcugcgccuugccaccgggcugagaaacguacccaguauucagagcaggggauuguuuggcgcgauagccggcuucaucgaagggggauggacugguaugguggacggcugguacggguaucaucaccagaaugaacaaggauccggcuacgcagcugaucucaaaucuacacagaacgccauugacgagaucaccaauaaggucaacagcgugauagagaaaaugaauacgcaguuuaccgcuguugguaaggaguucaaccaccuggaaaagcggauugaaaauuuaaacaaaaagguggaugacggguuccuggauaucuggacauacaaugccgagcuccuuguccuguuggaaaacgagcgcacucuagacuaucaugauucaaaugugaaaaaccuguacgagaagguacgaagucagcucaaaaacaaugcaaaggaaaucggcaacggauguuuugaguucuaucacaagugcgacaauaccuguauggaauccguuaaaaacggcacauacgauuauccuaaguacagcgaggaagccaaacugaauagagaggagauugacggggugaaacuugaaucuacuaggaucuaucaaauucuggcuauauacucaaccgucgcgaguagcuuggugcucgucgugucccugggagcaaucucuuuuuggaugugcucgaacgguagcuuacagugccggauuuguaucuga

SEQ ID NO: 132769 - RNA, 1701 nt, Artificial Sequence; identical to SEQ ID NO: 130704
  derived and/or modified CDS sequence (opt3) from hemagglutinin__InfluenzaA__ADG21141

SEQ ID NO: 132770 - RNA, 1701 nt, Artificial Sequence
  derived and/or modified CDS sequence (opt3) from hemagglutinin__InfluenzaA__ADG21142
augaaggccauccuggugguccuccuuuacaccuucgcuacagcaaacgccgacacucugugcauuggcuaucacgcgaauaacagcacggauaccguugacacaguguuggagaaaaauguaacugugacccauuccgucaacuuacuggaagauaagcacaaugggaaacuauguaagcucagaggaguggcuccccugcaucuugguaaaugcaacauagccggcuggauccuggggaauccugagugugaaucuuugucaacagcaaguagcugguccuacauuguugagaccucuucgucagacaacggaacuugcuauccaggcgauuuuaucgacuacgaagaacucagggagcagcugagcaguguguccucuuucgaacgguuugagauuuucccgaagacaagcuccuggcccaaucacgauucaaacaagggugucaccgccgcuuguccucaugcaggggaaaagaguuuuuauaagaaucugaucuggcucgugaaaaagggaaacagcuacccaaaauuaucuaaguccuauauaaaugacaagggcaaagagguacugguucuuuggggcauccaccaccccucaacgagcgccgaucaacagaguuuguaccagaacgcugacgccuacguguucgucgggucuucccgcuauagcaagaaauuuaagccugagauugcgauccgaccaaaagugcgugaucaggaaggaagaaugaauuacuauuggacucugguggagcccggugacaagauuaccuucgaagcaacaggcaaccuagucguuccuagguacgccuuugcuauggagcggaacgccgggucgggaaucauaauuucugauacuccagugcaugacugcaauaccacaugucaaaccccgaaaggcgcaaucaacacgucccuccccuuccagaauauucacccuaucacuaucgguaagugcccaaaguauguaaaaucaacaaagcugcgccuugcuaccgggcugagaaacgugcccaguauucagagcaggggauuguuuggcgccauagcgggcuucaucgaagggggauggacugguauggucgacggcugguacggguaucaucaccagaaugagcaaggauccggcuacgccgcagaucucaaaucuacacagaacgcuauugacgagaucaccaauaaggugaacagcguuauagagaaaaugaauacgcaguuuaccgccguggguaaggaguucaaccaccuggaaaagcggauugagaauuuaaacaaaaaggucgaugacggguuccuggauaucuggacauacaaugcugaacuccuugugcuguuggagaacgagcgcacucuagacuaucaugauucaaauguuaaaaaccuguacgaaaagguacgaagucagcucaaaaacaaugccaaggagaucggcaacggauguuuugaguucuaucacaagugcgacaauaccuguauggaauccgugaaaaacggcacauacgauuauccuaaguacagcgaagaggcaaaacugaauagagaggaaauugacggggucaaacuugagucuacuaggaucuaucaaauucuggccauauacucaaccguggcuaguagcuugguccucgugguuucccugggagcgaucucuuuuuggaugugcucgaacgguagcuuacagugccggauuuguaucuga

SEQ ID NO: 132771 - RNA, 1701 nt, Artificial Sequence; identical to SEQ ID NO: 130704
  derived and/or modified CDS sequence (opt3) from hemagglutinin__InfluenzaA__ADG21143

SEQ ID NO: 132772 - RNA, 1701 nt, Artificial Sequence; identical to SEQ ID NO: 130704
  derived and/or modified CDS sequence (opt3) from hemagglutinin__InfluenzaA__ADG21144

SEQ ID NO: 132773 - RNA, 1701 nt, Artificial Sequence
  derived and/or modified CDS sequence (opt3) from hemagglutinin__InfluenzaA__ADG21145
augaaggccauccuggugguccuccuuuacaccuucgcuacagcaaacgccgacacucugugcauuggcuaucacgcgaauaacagcacggauaccguugacacaguguuggagaaaaauguaacugugacccauuccgucaacuuacuggaagauaagcacaaugggaaacuauguaagcucagaggaguggcuccccugcaucuugguaaaugcaacauagccggcuggauccuggggaauccugagugugaaucuuugucaacagcaaguagcugguccuacauuguugagaccucuucgucagacaacggaacuugcuauccaggcgauuuuaucgacuacgaggagcucagggagcagcugagcaguguguccucuuucgaacgguuugagauuuucccgaagacaagcuccuggcccaaucacgauucaaacaagggugucaccgccgcuuguccucaugcaggggccaaaaguuuuuauaagaaucugaucuggcucgugaaaaagggaaacagcuacccaaaauuaucuauauccuauaucaaugacaagggcaaggaaguacugguucuuuggggcauucaccaccccucaacgagcgcugaucaacagaguuuguaccagaacgccgacgcguacguguucgucgggucuucccgcuauagcaaaaaguuuaaaccugagaucgcaauucgaccaaaggugcgugaucaggagggaagaaugaauuacuauuggacucugguggaacccggugacaaaaucaccuucgaggccacaggcaaccuagucguuccuagguacgcuuuugccauggaacggaacgcagggucgggaauaauuaucucugauacuccagugcaugacugcaauaccacaugucaaaccccgaagggcgcuauuaacacgucccuccccuuccagaauauccacccuaucacuauugguaaaugcccaaaguauguaaagucaacaaaacugcgccuugccaccgggcugagaaacgugcccaguauacagagcaggggauuguuuggcgcgaucgccggcuucauugaagggggauggacugguauggucgacggcugguacggguaucaucaccagaaugaacaaggauccggcuacgcagcugaucucaagucuacacagaacgccaucgacgagauaaccaauaaagugaacagcguuauugagaagaugaauacgcaguuuaccgcuguggguaaagaguucaaccaccuggaaaagcggaucgaaaauuuaaacaagaaagucgaugacggguuccuggauaucuggacauacaaugccgagcuccuugugcuguuggaaaacgagcgcacucuagacuaucaugauucaaauguaaagaaccuguacgagaaaguucgaagucagcucaagaacaaugcaaaagaaauuggcaacggauguuuugaguucuaucacaagugcgacaauaccuguauggaauccgugaagaacggcacauacgauuauccuaaauacagcgaggaagccaagcugaauagagaggagaucgacggggucaaacuugaaucuacuaggauuuaucaaauacuggcuaucuacucaaccguggcgaguagcuugguccucgugguuucccugggagcaauuucuuuuuggaugugcucgaacgguagcuuacagugccggaucuguaucuga

SEQ ID NO: 132774 - RNA, 1701 nt, Artificial Sequence; identical to SEQ ID NO: 130704
  derived and/or modified CDS sequence (opt3) from hemagglutinin__InfluenzaA__ADG21146

SEQ ID NO: 132775 - RNA, 1701 nt, Artificial Sequence; identical to SEQ ID NO: 130704
  derived and/or modified CDS sequence (opt3) from hemagglutinin__InfluenzaA__ADG21147

SEQ ID NO: 132776 - RNA, 1701 nt, Artificial Sequence; identical to SEQ ID NO: 130717
  derived and/or modified CDS sequence (opt3) from hemagglutinin__InfluenzaA__ADG21148

SEQ ID NO: 132777 - RNA, 1701 nt, Artificial Sequence; identical to SEQ ID NO: 131818
  derived and/or modified CDS sequence (opt3) from hemagglutinin__InfluenzaA__ADG21149

SEQ ID NO: 132778 - RNA, 1701 nt, Artificial Sequence; identical to SEQ ID NO: 131881
  derived and/or modified CDS sequence (opt3) from hemagglutinin__InfluenzaA__ADG21150

SEQ ID NO: 132779 - RNA, 1701 nt, Artificial Sequence; identical to SEQ ID NO: 130704
  derived and/or modified CDS sequence (opt3) from hemagglutinin__InfluenzaA__ADG21151

SEQ ID NO: 132780 - RNA, 1701 nt, Artificial Sequence; identical to SEQ ID NO: 130704
  derived and/or modified CDS sequence (opt3) from hemagglutinin__InfluenzaA__ADG21152

SEQ ID NO: 132781 - RNA, 1701 nt, Artificial Sequence; identical to SEQ ID NO: 130717
  derived and/or modified CDS sequence (opt3) from hemagglutinin__InfluenzaA__ADG21153

SEQ ID NO: 132782 - RNA, 1701 nt, Artificial Sequence; identical to SEQ ID NO: 130704
  derived and/or modified CDS sequence (opt3) from hemagglutinin__InfluenzaA__ADG21154

SEQ ID NO: 132783 - RNA, 1701 nt, Artificial Sequence; identical to SEQ ID NO: 130704
  derived and/or modified CDS sequence (opt3) from hemagglutinin__InfluenzaA__ADG21155

SEQ ID NO: 132784 - RNA, 1701 nt, Artificial Sequence; identical to SEQ ID NO: 131881
  derived and/or modified CDS sequence (opt3) from hemagglutinin__InfluenzaA__ADG21156

SEQ ID NO: 132785 - RNA, 1701 nt, Artificial Sequence; identical to SEQ ID NO: 131889
  derived and/or modified CDS sequence (opt3) from hemagglutinin__InfluenzaA__ADG21158

SEQ ID NO: 132786 - RNA, 1701 nt, Artificial Sequence
  derived and/or modified CDS sequence (opt3) from hemagglutinin__InfluenzaA__ADG21159
augaaggccauccuggugguccuccuuuacaccuucgcuacagcaaacgccgacacucugugcauuggcuaucacgcgaauaacagcacggauaccguugacacaguguuggagaaaaauguaacugugacccauuccgucaacuuacuggaagauaagcacaaugggaaacuauguaagcucagaggaguggcuccccugcaucuugguaaaugcaacauagccggcuggauccuggggaauccugagugugaaucuuugucaacagcaaguagcugguccuacauuguugagaccucuucgucagacaacggaacuugcuauccaggcgauuuuaucgacuacgaggagcucagggagcagcugagcaguguguccucuuucgaacgguuugagauuuucccgaagacaagcuccuggcccaaucacgauucaaacaagggugucaccgccgcuuguccucaugcaggggccaaaaguuuuuauaagaaucugaucuggcucgugaaaaagggaaacagcuacccaaaauuaucuaaguccuauauaaaugacaagggcaaagaaguacugguucuuuggggcauccaccaccccucaacgagcgcugaucaacagaguuuguaccagaacgccgacgcguacguguucgucgggacuucucgcuauuccaagaaauuuaagccugagauugcaauccgaccaaaagugcgugaucaggagggaagaaugaauuacuauuggacccugguggaacccggugacaagauuacauucgaggccacuggcaaccuagucguuccuagguacgcuuuugccauggaacggaacgcagggagcggaaucauaauuucggauaccccagugcaugacugcaauacaaccugucaaacgccgaaaggcgcuaucaacacuucucuccccuuccagaauauucacccuaucacaaucgguaagugcccaaaguauguaaaauccaccaagcugcgccuugccacugggcugagaaacgugcccucaauucagaguaggggauuguuuggcgcgauagccggcuucaucgaagggggauggacagguauggucgacggcugguacggguaucaucaccagaaugaacaaggaagcggcuacgcagcugaucucaaauccacccagaacgccauugacgagaucacgaauaaggugaacucuguuauagagaaaaugaauacccaguuuacagcuguggguaaggaguucaaccaccuggaaaagcggauugaaaauuuaaacaaaaaggucgaugacggguuccuggauaucuggacuuacaaugccgagcuccuugugcuguuggaaaacgagcgcacccuagacuaucaugauagcaauguaaagaaccuguacgagaagguucgaucacagcucaaaaacaaugcaaaggaaaucggcaacggauguuuugaguucuaucacaagugcgacaauacauguauggaaagugugaaaaacggcacuuacgauuauccuaaguacuccgaggaagccaaacugaauagagaggagauugacggggucaaacuugaaagcaccaggaucuaucaaauucuggcuauauacucuacaguggcgucaaguuugguccuccuggugagcuuaggagcaaucuccuuuuggaugugcucuaacgguucgcugcagugccggauuuguaucuga

SEQ ID NO: 132787 - RNA, 1701 nt, Artificial Sequence; identical to SEQ ID NO: 131889
  derived and/or modified CDS sequence (opt3) from hemagglutinin__InfluenzaA__ADG21160

SEQ ID NO: 132788 - RNA, 1701 nt, Artificial Sequence
  derived and/or modified CDS sequence (opt3) from hemagglutinin__InfluenzaA__ADG21161
augaaggccauccuggugguccuccuuuacaccuucgcuacagcaaacgccgacacucugugcauuggcuaucacgcgaauaacagcacggauaccguugacacaguguuggagaaaaauguaacugugacccauuccgucaacuuacuggaagauaagcacaaugggaaacuauguaagcucagaggaguggcuccccugcaucuugguaaaugcaacauagccggcuggauccuggggaauccugagugugaaucuuugucaacagcaaguagcugguccuacauuguugagaccucuucgucagacaacggaacuugcuauccaggcgauuuuaucgacuacgaagaacucagggagcagcugagcaguguguccucuuucgaacgguuugagauuuucccgaagacaagcuccuggcccaaucacgauucaaacaagggugucaccgccgcuuguccucaugcaggggccaaaaguuuuuauaagaaucugaucuggcucgugaaaaaggaaaacagcuacccaaaauuaucuaaguccuauauaaaugacaagggaaaagagguacugguucuuuggggcauccaccaccccucaacgagcgcugaucaacagaguuuguaccagaacgccgacgcguacguguucgucggcacuucucgcuauuccaagaaauuuaagccugagauugcaauccgaccaaaagugcgugaucaggaagggagaaugaauuacuauuggacccugguggagcccggagacaagauuacauucgaagccacugguaaccuagucguuccuagguacgcuuuugccauggagcggaacgcaggcagcgggaucauaauuucggauaccccagugcaugacugcaauacaaccugucaaacgccgaaaggagcuaucaacacuucucuccccuuccagaauauucacccuaucacaaucggcaagugcccaaaguauguaaaauccaccaagcugcgccuugccacuggucugagaaacgugcccucaauucagaguaggggguuguuuggagcgauagccggcuucaucgaaggcggguggacaggaauggucgacgguugguacggcuaucaucaccagaaugagcaagggagcggauacgcagcugaucucaaauccacccagaacgccauugacgagaucacgaauaaggugaacucuguuauagaaaagaugaauacccaguuuacagcugugggcaaggaguucaaccaccuggaaaagcggauugagaauuuaaacaaaaaggucgaugacgguuuccuggauaucuggacuuacaaugccgaacuccuugugcuguuggagaacgagcgcacccuagacuaucauaauagcaacguuaaaaaccuguacgaaaagguacgaucacagcucaaaaauaacgcaaaggagaucgggaauggcuguuuugaguucuaucacaagugcgauaacacauguauggagagugugaaaaauggaacuuacgacuauccuaaguacuccgaagaggccaaacugaacagagaggaaauugauggcgucaaacuugagagcaccaggaucuaucaaauucuggcuauauacucuacaguggcgucaaguuugguccucgugguuagccugggggcaaucuccuuuuggaugugcucuaauggaucguuacagugccggauuuguaucuga

SEQ ID NO: 132789 - RNA, 1701 nt, Artificial Sequence
  derived and/or modified CDS sequence (opt3) from hemagglutinin__InfluenzaA__ADG21163
augaaggccauccuggugguccuccuuuacaccuucgcuacagcaaacgccgacacucugugcauuggcuaucacgcgaauaacagcacggauaccguugacacaguguuggagaagaauguaacugugacccauuccgucaacuuacuggaagauaagcacaaugggaaacuauguaagcucagaggaguggcuccccugcaucuugguaaaugcaacauagccggcuggauccuggggaauccugagugugaaucuuugucaacagcaaguagcugguccuacauuguugagaccucuucgucagacaacggaacuugcuauccaggcgauuuuaucgacuacgaggagcucagggagcagcugagcaguguguccucuuucgaacgguuugagauuuucccgaagacaagcuccuggcccaaucacgauucaaacaagggugucaccgccgcuuguccucaugcaggggccaaaaguuuuuauaagaaucugaucuggcucgugaaaaagggaaacagcuacccaaaauuaucuaaguccuauauaaaugacaagggcaaagaaguacugguucuuuggggcauccaccaccccucaacgagcgcugaucaacagaguuuguaccagaacgccgacgcguacguguucgucgggacuucucgcuauuccaagaaauuuaagccugagauugcaauccgaccaaaagugcgugaucaggagggaagaaugaauuacuauuggacccugguggaacccggugacaagauuacauucgaggccacuggcaaccuagucguuccuagguacgcuuuugccauggaacggaacgcagggagcggaaucauaauuucggauaccccagugcaugacugcaauacaaccugucaaacgccgaaaggcgcuaucaacacuucucuccccuuccagaauguacacccuauuacaaucgguaagugcccaaaguaugugaaauccaccaagcugcgccuugccacugggcugagaaacguccccucaauccagaguaggggauuguuuggcgcgauugccggcuucauagaagggggauggacagguaugguggacggcugguacggguaucaucaccagaaugaacaaggaagcggcuacgcagcugaucucaaauccacccagaacgccaucgacgagauuacgaauaagguuaacucugugaucgagaaaaugaauacccaguuuacagcugucgguaaggaguucaaccaccuggaaaagcggauagaaaauuuaaacaaaaagguggaugacggguuccuggauguauggacuuacaaugccgagcuccuuguucuguuggaaaacgagcgcacccuagacuaucaugauagcaaugugaaaaaccuguacgagaagguccgaucacagcucaaaaacaaugcaaaggaaauuggcaacggauguuuugaguucuaucacaagugcgacaauacauguauggaaagugugaaaaacggcacuuacgauuauccuaaguacuccgaggaagccaaacugaauagagaggagaucgacggggucaaacuugaaagcaccaggaucuaucaaauucuggcuaucuacucuacaguggcgucaaguuugguucucgugguaagccugggagcaauuuccuuuuggaugugcucuaacgguucguuacagugccggauauguaucuga

SEQ ID NO: 132790 - RNA, 1701 nt, Artificial Sequence
  derived and/or modified CDS sequence (opt3) from hemagglutinin__InfluenzaA__ADG21165
augaaggccauccuggugguccuccuuuacaccuucgcuacagcaaacgccgacacucugugcauuggcuaucacgcgaauaacagcacggauaccguugacacaguguuggagaagaauguaacugugacccauuccgucaacuuacuggaagauaagcacaaugggaaacuauguaagcucagaggaauagcuccccugcaucuugguaaaugcaacaucgccggcuggauucuggggaauccugagugugaaucuuugucaacagcaaguagcugguccuacaucguggagaccucuucgucagacaacggaacuugcuauccaggcgauuuuauugacuacgaggaacucagggagcagcugagcaguguuuccucuuucaagcgguuugaaaucuucccgaagacaaauagcuggcccaaccacgauuccaauaaaggugugaccgccgcuuguccucaugcaggggccaagucauuuuauaaaaaccugauauggcucgucaagaaaggaaauaguuacccaaaguuaagcaagucuuauaucaacgacaaaggcaaggaggugcugguacuuuggggcauucaccaccccuccacgucagcugaucaacagagcuuguaccagaaugccgacgcguacguuuucguggggaccaguaaauauucuaagaaauuuaagccugaaaucgcaauucgcccaaaaguccgagaucaggagggacguaugaacuacuauuggacucugguggagcccggugacaagaucacauucgaagccacuggcaaccuaguggucccuagauacgcuuuugccauggagaggaaugcaggguccggaauaauuaucagcgauaccccaguucaugacugcaacacaaccugucaaacgccgaagggcgcuauuaauacuucgcuccccuuccagaacauccacccuaucacaauugguaaaugcccaaaguaugugaaaucuaccaagcugcggcuugccacugggcugcgcaauguacccuccauacagucaagaggauuguuuggcgcgaucgccggcuucauugaagggggauggacagguaugguggacggcugguacggguaucaucaccagaacgagcaaggaaguggcuacgcagcugaucucaaaagcacccagaaugccaucgacgguauaacgaacaaggucaauuccgugauugaaaagaugaacacccaguuuacagcuguugggaaagaguucaaucaccuggagaagaggaucgaaaacuuaaauaaaaagguggaugacggcuuccuggauaucuggacuuacaacgccgagcuccuuguccuguuggaaaaugagcggacccuagacuaucaugauucuaacgugaaaaaccuguacgaaaagguacgcagccagcucaagaauaacgcaaaagagauuggaaauggcuguuuugaguucuaucacaagugcgacaacacauguauggaaucaguuaaaaaugggacuuacgauuauccuaaguacagugaggaagccaaacugaaccgagaggaaaucgacggagugaaacuugaguccaccagaauuuaucaaauacuggcuaucuacagcacagucgcgucuucauuggugcucgucgugagucugggugcaauuagcuuuuggaugugcuccaauggcucuuuacagugcaggaucuguaucuga

SEQ ID NO: 132791 - RNA, 1701 nt, Artificial Sequence; identical to SEQ ID NO: 130704
  derived and/or modified CDS sequence (opt3) from hemagglutinin__InfluenzaA__ADG21166

SEQ ID NO: 132792 - RNA, 1701 nt, Artificial Sequence
  derived and/or modified CDS sequence (opt3) from hemagglutinin__InfluenzaA__ADG21168
augaaggccauccuggugguccuccuuuacaccuucgcuacagcaaacgccgacacucugugcauuggcuaucacgcgaauaacagcacggauaccguugacacaguguuggagaaaaauguaacugugacccauuccgucaacuuacuggaagauaagcacaaugggaaacuauguaagcucagaggaguggcuccccugcaucuugguaaaugcaacauagccggcuggauccuggggaauccugagugugaaucuuugucaacagcaaguagcugguccuacauuguugagaccucuucgucagacaacggaacuugcuauccaggcgauuuuaucgacuacgaggagcucagggagcagcugagcaguguguccucuuucgaacgguuugagauuuucccgaagacaagcuccuggcccaaucacgauucaaacaagggugucaccgccgcuuguccucaugcaggggccaaaaguuuuuauaagaaucugaucuggcucgugaaaaagggaaacagcuacccaaaauuaucuaaguucuauauaaaugacaagggcaaagaaguacugguucuuuggggcauccaccaccccuccacgucagcugaucaacagagcuuguaccagaacgccgacgcguacguguuugucgggaguucucgcuauuccaagaaauucaagccugagauugcaauccgaccaaaagugcgugaucaggagggaagaaugaauuacuauuggacucugguggaacccggugacaagauuaccuuugaggccacaggcaaccuagucguuccuagguacgcuuucgccauggaacggaacgcagggagcggaaucauaauuucggauacuccagugcaugacugcaauaccacaugucaaaccccgaaaggcgcuaucaacacgucucuccccuuucagaauauucacccuaucacuaucgguaagugcccaaaguauguaaaauccacaaagcugcgccuugccaccgggcugagaaacgugcccucaauucagaguaggggauuguucggcgcgauagccggcuuuaucgaagggggauggacugguauggucgacggcugguacggguaucaucaccagaaugaacaaggaagcggcuacgcagcugaucucaaauccacacagaacgccauugacgagaucaccaauaaggugaacucuguuauagagaaaaugaauacgcaguucaccgcuguggguaaggaguucaaccaccuggaaaagcggauugaaaauuuaaacaaaaaggucgaugacggguuucuggauaucuggacauacaaugccgagcuccuugugcuguuggaaaacgagcgcacucuagacuaucaugauagcaauguaaagaaccuguacgagaagguucgaucacagcucaaaaacaaugcaaaggaaaucggcaacggauguuucgaguuuuaucacaagugcgacaauaccuguauggaaagugugaaaaacggcacauacgauuauccuaaguacuccgaggaagccaaacugaauagagaggagauugacggggucaaacuugaaagcacuaggaucuaucaaauucuggcuauauacucuaccguggcgucaaguuugguccucgugguuagccugggagcaaucuccuucuggaugugcucuaacgguucguuacagugccggauuuguaucuga

SEQ ID NO: 132793 - RNA, 1701 nt, Artificial Sequence; identical to SEQ ID NO: 132746
  derived and/or modified CDS sequence (opt3) from hemagglutinin__InfluenzaA__ADG21169

SEQ ID NO: 132794 - RNA, 1701 nt, Artificial Sequence; identical to SEQ ID NO: 130704
  derived and/or modified CDS sequence (opt3) from hemagglutinin__InfluenzaA__ADG21170

SEQ ID NO: 132795 - RNA, 1701 nt, Artificial Sequence; identical to SEQ ID NO: 130704
  derived and/or modified CDS sequence (opt3) from hemagglutinin__InfluenzaA__ADG21173

SEQ ID NO: 132796 - RNA, 1701 nt, Artificial Sequence; identical to SEQ ID NO: 130717
  derived and/or modified CDS sequence (opt3) from hemagglutinin__InfluenzaA__ADG21174

SEQ ID NO: 132797 - RNA, 1701 nt, Artificial Sequence; identical to SEQ ID NO: 130717
  derived and/or modified CDS sequence (opt3) from hemagglutinin__InfluenzaA__ADG21175

SEQ ID NO: 132798 - RNA, 1701 nt, Artificial Sequence; identical to SEQ ID NO: 130704
  derived and/or modified CDS sequence (opt3) from hemagglutinin__InfluenzaA__ADG21176

SEQ ID NO: 132799 - RNA, 1701 nt, Artificial Sequence; identical to SEQ ID NO: 130704
  derived and/or modified CDS sequence (opt3) from hemagglutinin__InfluenzaA__ADG21177

SEQ ID NO: 132800 - RNA, 1701 nt, Artificial Sequence; identical to SEQ ID NO: 130704
  derived and/or modified CDS sequence (opt3) from hemagglutinin__InfluenzaA__ADG21178

SEQ ID NO: 132801 - RNA, 1701 nt, Artificial Sequence; identical to SEQ ID NO: 131070
  derived and/or modified CDS sequence (opt3) from hemagglutinin__InfluenzaA__ADG21179

SEQ ID NO: 132802 - RNA, 1701 nt, Artificial Sequence; identical to SEQ ID NO: 130704
  derived and/or modified CDS sequence (opt3) from hemagglutinin__InfluenzaA__ADG21180

SEQ ID NO: 132803 - RNA, 1701 nt, Artificial Sequence; identical to SEQ ID NO: 130704
  derived and/or modified CDS sequence (opt3) from hemagglutinin__InfluenzaA__ADG21181

SEQ ID NO: 132804 - RNA, 1701 nt, Artificial Sequence; identical to SEQ ID NO: 130704
  derived and/or modified CDS sequence (opt3) from hemagglutinin__InfluenzaA__ADG21182

SEQ ID NO: 132805 - RNA, 1701 nt, Artificial Sequence; identical to SEQ ID NO: 130704
  derived and/or modified CDS sequence (opt3) from hemagglutinin__InfluenzaA__ADG21183

SEQ ID NO: 132806 - RNA, 1701 nt, Artificial Sequence; identical to SEQ ID NO: 131881
  derived and/or modified CDS sequence (opt3) from hemagglutinin__InfluenzaA__ADG21184

SEQ ID NO: 132807 - RNA, 1701 nt, Artificial Sequence
  derived and/or modified CDS sequence (opt3) from hemagglutinin__InfluenzaA__ADG21185
augaaggccauccuggugguccuccuuuacaccuucgcuacagcaaacgccgacacucugugcauuggcuaucacgcgaauaacagcacggauaccguugacacaguguuggagaaaaauguaacugugacccauuccgucaacuuacuggaagauaagcacaaugggaaacuauguaagcucagaggaguggcuccccugcaucuugguaaaugcaacauagccggcuggauccuggggaauccugagugugaaucuuugucaacagcaaguagcugguccuacauuguugagaccucuucgucagacaacggaacuugcuauccaggcgauuuuaucgacuacgaagaacucagggagcagcugagcaguguguccucuuucgaacgguuugagauuuucccgaagacaagcuccuggcccaaucacgauucaaacaagggugucaccgccgcuuguccucaugcaggggccaaaaguuuuuauaagaaucugaucuggcucgugaaaaagggaaacagcuacccaaaauuaucuaaguccuauauaaaugacaagggcaaagaaguacugguucuuuggggcauccaccaccccucaacgagcgcugaucaacagaguuuguaccagaacgccgacgcguacguguucgucgggacuucucgcuauuccaagaaauuuaagccugagauugcaauccgaccaaaagugcgugaucaggagggaagaaugaauuacuauuggacccuggugaagcccggugacaaaauuacauucgaagccacuggcaaccuagucguuccuagguacgcuuuugccauggagcggaacgcagggagcggaaucauaauuucggauaccccagugcaugacugcaauacaaccugucaaacgccgaagggcgcuaucaacacuucucuccccuuccagaauauucacccuaucacaaucggucgcugcccaaaguauguaaaauccaccaagcugagacuugccacugggcugaggaacgugcccucaauucagagucggggauuguuuggcgcgauagccggcuucaucgaagggggauggacagguauggucgacggcugguacggguaucaucaccagaaugagcaaggaagcggcuacgcagcugaucucaaauccacccagaacgccauugacgaaaucacgaauaaggugaacucuguuauagagaaaaugaauacccaguuuacagcuguggguaaggaguucaaccaccuggaaaagcgcauugagaauuuaaacaaaaaggucgaugacggguuccuggauaucuggacuuacaaugccgaacuccuugugcuguuggagaacgaacgaacccuagacuaucaugauagcaauguaaagaaccuguacgagaagguuagaucacagcucaaaaacaaugcaaaggagaucggcaacggauguuuugaguucuaucacaagugcgacaauacauguauggagagugugaaaaacggcacuuacgauuauccuaaguacuccgaagaggccaaacugaauagggaagagauugacggggucaaacuugagagcacccggaucuaucaaauucuggcuauauacucuacaguggcgucaaguuugguccucgugguuagccugggagcaaucuccuuuuggaugugcucuaacgguucguuacagugccguauuuguaucuga

SEQ ID NO: 132808 - RNA, 1701 nt, Artificial Sequence; identical to SEQ ID NO: 132063
  derived and/or modified CDS sequence (opt3) from hemagglutinin__InfluenzaA__ADG21188

SEQ ID NO: 132809 - RNA, 1707 nt, Artificial Sequence
  derived and/or modified CDS sequence (opt3) from hemagglutinin__InfluenzaA__ADG21402
auggagaagaucgugcugcuccuugccauugucagccugguuaaauccgaccagauaugcaucggcuaccacgcuaacaauucuaccgaacaaguggauacaauuauggagaagaacguaacugugacgcaugcacaggacaucuuggaaaagacccacaaugggaaauuaugugaucuggacggagucaaaccccuaauucucagagauugcucaguggccgguuggcugcuuggcaacccuaugugugacgaguuccugaauguuccagaauggaguuauaucguggagaagauaaacccggcgaaugauuugugcuaccccgggaacuuuaaugacuaugaggaacucaagcaucugcugagcaggaucaaccacuucgagaaaauucagaucauuccuaaguccucuuggucggaucaugaagcuaguagcggagucaguuccgccuguccauaccagggccggucuagcuuuuuccgcaaugugguauggcucaucaaaaaggacaacgcauaucccacaauaaaacgauccuacaauaacacuaaucaagaggauuuacugguucuuugggguauucaccacccuaacgacgccgcugagcagacccguuuguaucagaacccaacaaccuacaucucaguggggacuucaacacugaaucagaggcuaguccccaagauugcaaccagaagcaaggugaacggacaaucuggccggauggaauuuuucuggacgauccucaaauccaaugaugccaucaacuuugagucaaauggcaacuucauugcuccugaaaaugccuacaagauagugaaaaagggggacagcacuaucaugaaaagugagcuggaauauggaaacugcaauaccaagugucagacaccaauuggugcgaucaacucuuccaugccguuucauaauauacacccccuuacuauuggcgagugcccuaaauacgucaagagcaaccgccugaucuuggcaaccgggcucagaaauucgccacagggagagaggcggcgcaagaaacgaggccuguucggugccaucgcuggguuuauugaaggaggcuggcagggcaugguugacgggugguauggauaccaucacucuaacgagcaagguuccggcuaugccgcagauaaggaaucaacacagaaagcuaucgacggggugaccaauaagguaaacaguauuauagauaaaaugaacacgcaguucgaggccgugggaagagaauuuaauaacuuagagaggcggaucgagaaucugaacaagaagauggaagacggcuuccucgaugucuggacuuacaaugcggagcuucugguguugauggaaaacgagcguacacuagacuuccacgauagcaauguuaaaaaccuguaugacaaggugcgccuccaacugagagauaaugccaaagaacuugguaacggguguuuugaguucuaccauaggugcgacaaugaguguauggaauccguccggaacggcaccuacgauuauccccaguacucugaggaagcacgacugaagcgcgaggagauuagcggagugaaauuggaaucaaucggcacuuaucagauccucaguauuuacuccacaguagcuagcucucuggccuuagcuauaaugguugccgggcuguuucuauggaugugcucaaauggaagucuccagugcagaaucuguauuuga

SEQ ID NO: 132810 - RNA, 1704 nt, Artificial Sequence
  derived and/or modified CDS sequence (opt3) from hemagglutinin__InfluenzaA__ADG21414
auggagaagaucgugcugcuccuugccauugucagcauaguuaaauccgaccagaucugcauuggcuaccacgcuaacaauucuaccgaacauguggauacaaucauggagaagaacguaacugugacgcacgcacaagacauucuggaaaagacccauaaugggaaauuguguaacuuagauggagucaaaccccugauccuaagagacugcucaguggccgguuggcuccugggcaauccuaugugugaugaguuccuuaacguuccagaauggaguuauauaguggagaagaucaauccggcgaacgaccugugcuaccccgggaauuuuaacgauuaugaggaauugaagcaccuccugagcaggauuaaucauuucgagaaaauccagauuaucccuaagaacuccuggucugaccacgaggcuucgggagucucaagcgccuguccauaccagggccggaguuccuuuuuccgcaaugugguauggcugacuaaaaagaacaaugcauaucccacaauuaaaaagucuuacaacaacaccaaucaggaagaucucuuaguucugugggguauacaccauccuaacgacggggccgagcaaacacgacuuuaucagaauccaaccacuuacaucagcgugggaacauccaccuugaaccagcgucugguccccaagauugcuacgagaucaaaagugaauggccagaguggcaggauggaauuuuucuggacuauccuaaagagcaacgaugcaaucaauuuugagucuaacgggaauuucauugccccugaaaacgcuuacaaaauagugaagaaaggagacuccaccaucaugaagucagagcucgaauaugguaauugcaacacaaaaugucaaacuccaauuggcgccaucaauagcaguaugccguuucacaacauacauccccugaccauuggggagugcccuaaguacgucaagucuaaucggcuuguucuggcgacaggauugcgcaacuccccacagggcgagagaaggcggaaaaagcgcggucucuucggggcaaucgccggauuuaucgaaggcggcuggcaggggaugguggauggaugguaugguuaccaccacagcaacgagcagggcucgggguaugcugccgacaaagaaucuacccaaaaggcaauugacggaguaacgaauaaagugaacuccaucauugauaagaugaauacucaguucgaggcugucggccgagaauuuaacaaucuggagagaaggauagagaacuuaaauaagaaaauggaagacgguuuccuggauguguggacauacaacgccgagcuccuuguucugauggaaaaugagcggaccuuggacuuccaugauucaaacgugaagaaucuauaugacaaaguccgucugcagcuccgcgauaacgcgaaggaacuggggaauggcuguuuugaguucuaccacagaugcgacaacgaguguauggaaagugugaggaauggaacuuacgauuauccccaauacagcgaggaagcccggcuuaaacgagaggagaucuccggcguaaagcuggaaucuauugggacauaucagaucuugagcaucuacucaaccguugcaaguucccucgcucuggccauuaugguggcuggauuauuucuguggaugugcagcaacgguucucuacagugccgcauauguaucuga

SEQ ID NO: 132811 - RNA, 1704 nt, Artificial Sequence
  derived and/or modified CDS sequence (opt3) from hemagglutinin__InfluenzaA__ADG21416
auggagaagaucgugcugcuccuugccauugucagcauaguuaaauccgaccagaucugcauuggcuaccacgcuaacaauucuaccgaacaaguggauacaaucauggagaagaacguaacugugacgcaugcacaggacauucuggaaaagacccacaaugggaaauuguguaacuuagauggagucaaaccccugauccuaagagacugcucaguggccgguuggcuccugggcaauccuaugugugaugaguuccuuaacguuccagaauggaguuauauaguggagaagaucaauccggcgaacgaccugugcuaccccgggaauuuuaacgauuaugaggaauugaagcaucuccugagcaggauuaaucacuucgagaaaauccagauuaucccuaagaacuccuggucugaccaugaggcuucgggagucucaagcgccuguccauaccagggccggaguuccuuuuuccgcaaugugguauggcugacuaaaaagaacaaugcauaucccacaauuaaaaagucuuacaacaacaccaaucaagaagaucucuuaguucugugggguauacaccacccuaacgacgccgcugagcagacagggcuuuaucagaauccaaccacuuacaucagcgugggaacauccaccuugaaccagcgacugguccccaagauugcaacgcguucaaaagugaauggccaaaguggcagaauggaauuuuucuggacuauccuaaagagcaacgaugugaucaauuuugagucuaacgggaauuucauugccccugaaaacgcuuacaaaauagucaagaaaggagacuccaccaucaugaagucagagcucgaauaugguaauugcaacacaaaaugucagacuccaauuggcgccaucaauagcaguaugccguuucauaacauacacccccugaccauuggggagugcccuaaguacguuaagucuaauaggcuugugcuggcgacaggauugcggaacuccccacagggcgagcgcagaaggaaaaagcggggucucuucggggcaaucgccggauuuaucgaaggcggcuggcaggggaugguagauggaugguaugguuaccaucacagcaacgagcaaggcucgggguaugcugccgacaaagaaucuacccagaaggcaauugacggagugacgaauaaagucaacuccaucauugauaagaugaauacucaguucgaggcugugggccgcgaauuuaacaaucuggagcgaagaauagagaacuuaaauaagaaaauggaagacgguuuccuggauguuuggacauacaacgccgagcuccuugugcugauggaaaaugagaggaccuuggacuuccacgauucaaacgucaagaaucuauaugacaaagugcggcugcaacuccgugauaacgcgaaggaacuggggaauggcuguuuugaguucuaccaucgcugcgacaacgaguguauggaaaguguaagaaauggaacuuacgauuauccccaguacagcgaggaagccaggcuuaaacgggaggagaucuccggcguuaagcuggaaucuauugggacauaucagaucuugagcaucuacucaaccguggcaaguucccucgcucuggccauuauggucgcuggauuauuucuguggaugugcagcaacgguucucuacagugccgaauauguaucuga

SEQ ID NO: 132812 - RNA, 1704 nt, Artificial Sequence
  derived and/or modified CDS sequence (opt3) from hemagglutinin__InfluenzaA__ADG21420
auggagaagaucgugcugcuccuugccauugucagcauaguuaaauccgaccagaucugcauuggcuaccacgcuaacaauucuaccgaacaaguggauacaaucauggagaagaacguaacugugacgcaugcacaggacauucuggaaaagacccacaaugggaaauuguguaacuuagauggagucaaaccccugauccuaagagacugcucaguggccgguuggcuccugggcaauccuaugugugaugaguuccuuaacguuccagaauggaguuauauaguggagaagaucaauccggcgaacgaccugugcuaccccgggaauuuuaacgauuaugaggaauugaagcaucuccugagcaggauuaaucacuucgagaaaauccagauuaucccuaagaacuccuggucugaccaugaggcuucgggagucucaagcgccuguccauaccagggccggaguuccuuuuuccgcaaugugguauggcugacuaaaaagaacaaugcauaucccacaauuaaaaagucuuacaacaacaccaaucaagaagaucucuuaguucugugggguauacaccacccuaacgacgccgcugagcagacacgacuuuaucagaauccaaccacuuacaucagcguggggacauccaccuugaaccagcgucugguccccaagauugcaacgagaucaaaagugaauggacaaaguggcaggauggaauuuuucuggacuauccuaaagagcaacgaugccaucaauuuugagucuaacggcaauuucauugcuccugaaaacgccuacaaaauagugaagaaaggggacuccaccaucaugaagucagagcucgaauauggaaauugcaacacaaaaugucagacuccaauuggugcgaucaauagcaguaugccguuucauaacauacacccccugaccauuggcgagugcccuaaguacgucaagucuaaucggcuuguucuggcaacaggguugcgcaacuccccacagggagagagaaggcggaaaaagcgcggccucuucggugccaucgcuggguuuaucgaaggaggcuggcagggcaugguggaugggugguauggauaccaucacagcaacgagcaagguucgggcuaugccgcagacaaagaaucuacccagaaggcuauugacgggguaacgaauaaagugaacuccaucauugauaagaugaauacucaguucgaggccgucggacgagaauuuaacaaucuggagagaaggauagagaacuuaaauaagaaaauggaagacggcuuccuggauguguggacauacaacgcggagcuccuuguucugauggaaaaugagcggaccuuggacuuccacgauucaaacgugaagaaucuauaugacaaaguccgucugcaacuccgcgauaacgccaaggaacuggguaauggguguuuugaguucuaccauagaugcgacaacgaguguauggaaagugugaggaauggcacuuacgauuauccccaguacagcgaggaagcacggcuuaaacgagaggagaucuccggaguaaagcuggaaucuauuggcacauaucagaucuugagcaucuacucaaccguugcuaguucccucgcccuggcuauuaugguggccggguuauuucuguggaugugcagcaacggaucucuacagugccgcauauguaucuga

SEQ ID NO: 132813 - RNA, 1704 nt, Artificial Sequence
  derived and/or modified CDS sequence (opt3) from hemagglutinin__InfluenzaA__ADG21422
auggagaagaucgugcugcuccuugccauugucagccugguuaaauccgaccagauaugcaucggcuaccacgcuaacaauucuaccgaacaaguggauacaauuauggagaagaacguaacugugacgcaugcacaggacaucuuggaaaagacccacaaugggaaauuauguaaccuggauggagucaaaccccuaauucucagagacugcucaguggccgguuggcugcuuggcaauccuaugugugaugaguuccugaacguuccagaauggaguuauaucguggagaagauaaauccgacaaacgacuugugcuaccccgggaauuuuaacgauuaugaggaacucaagcaucugcugagcaggaucaaucacuucgagaaaauucagaucauuccuaagaacuccuggucugaccaugaagcgucgggagucucaagcgcuuguccauaccagggccggaguuccuuuuuccgcaaugugguauggcucacuaaaaagaacaaugccuaucccaccaucaaacgaucuuacaacaacacaaaucaagaggauuuacugguucuuugggguauacaccacccuaacgacgcagccgagcagacccguuuguaucagaauccaacuacauacauuagcguggggaccuccacgcugaaccagaggcuaguccccaagaucgcuacuagaucaaaggugaauggacaaaguggccggauggaauuuuucuggaccauucucaaaagcaacgaugcaaucaauuuugagucuaacggcaauuucaucgccccugaaaacgcuuacaagauugugaaaaagggggacuccacaauaaugaaaucagagcuggaauauggaaauugcaacacuaagugucagaccccaaucggugccauuaauagcaguaugccguuucauaacauccacccccuuacaauaggcgagugcccuaaauacgucaagucuaaucgccugguuuuggcgaccgggcucagaaacuccccacagggagagaggcggcgcaagaaacgaggccuguucggugcaauugccggguuuaucgaaggaggcuggcagggcaugguggaugggugguauggauaccaucacagcaacgagcaagguucgggcuaugcugccgacaaggaaucuacgcagaaagcaaucgacgggguaacuaauaaggugaacuccauuaucgauaaaaugaauacacaguucgaggcugucggaagagaauuuaacaauuuagagaggcggauugagaaccugaauaagaagauggaagacggcuuccucgauguguggaccuacaacgccgagcuucugguuuugauggaaaaugagcguacucuagacuuccacgauucaaacgugaaaaaucuguaugacaagguccgccuccaacugagagauaacgcgaaagaacuugguaauggguguuuugaguucuaccauaggugcgacaacgaguguauggaaagugugcggaauggcacauacgauuauccccaguacagcgaggaagcccgauccaagcgcgaggagauaucuggaguaaaacuggaaagcaucggcaccuaucagauuuugucaaucuacaguacgguugcauccagccucgcucuggccaucaugguggcuggguuauuucuguggaugugcucuaacggaucacuacagugcagaauuuguauauga

SEQ ID NO: 132814 - RNA, 1704 nt, Artificial Sequence
  derived and/or modified CDS sequence (opt3) from hemagglutinin__InfluenzaA__ADG21425
auggagaagaucgugcugcuccuugccauugucagccugguuaaauccgaccagauaugcaucggcuaccacgcuaacaauucuaccgaacaaguggauacaauuauggagaagaacguaacugugacgcaugcacaggacaucuuggaaaagacccacaaugggaaauuauguaaccuggauggagucaaaccccuaauucucagagacugcucaguggccgguuggcugcuuggcaauccuaugugugaugaguuccugaacguuccagaauggaguuauaucguggagaagauaaauccggcgaacgacuugugcuaccccgggaauuuuaacgauuaugaggaacucaagcaucugcugagcaggaucaaucacuucgagaaaauucagaucauuccuaagaacuccuggucugaccauggagcuucgggcgucucaagcgccuguccauaccagggucggaguuccuuuuuccgcaaugugguauggcucacuaaaaagaacaaugcauaucccacaaucaaaaagucuuacaacaacaccaaucaagaagauuuacugguucuuugggggauacaccacccuaacgacgccgaggagcagacacgauuguaucagaauccaaccacuuacauuagcgugggaacauccacccugaaccagcgucuaguccccaagaucgcuacgagaucaaaagugaauggccaaaguggcaggauggaauuuuucuggacuauucucaagagcaacgaugcaaucaauuuugagucuaacgggaauuucaucgccccugaaaacgcuuacaaaauugugaagaaaggagacuccaccauaaugaagucagagcuggaauaugauaauugcaacacaaaaugucagacuccaaucggugccauuaauagcaguaugccguuucauaacauccacccccuuaccauaggcgagugcccuaaguacgucaagucuaauaaacugguuuuggcgacagggcuccggaacuccccacagggagagaagcgcaggaaaaagagaggccuguucggugcaauugccggguuuaucgaaggaggcuggcagggcaugguggacgggugguauggauaccaucacagcaacgagcaagguucgggcuaugcugccgacaaagaaucuacccagaaggcaaucgaugggguaacgaauaaggugaacuccauuaucgacaaaaugaauacucaguucgaggcugucggacgggaauuuaacgccuuagagcgccgaauugagaaucugaacaagaaaauggaagauggcuuccucgacguguggacauacaaugcggagcuucugguuuugauggaaaacgagagaacccuagauuuccacgacucaaaugugaagaaccuguaugauaaagucaggcuccaacugcgggacaaugccaaggaacuugguaacggguguuuugaguucuaccaucguugcgauaaugaguguauggaaagugugcgcaacggcacuuacgacuauccccaguacagcgaggaagcaagacugaagagggaggagauauccggaguaaaauuggaaucuaucggcacauaucagauucucagcaucuacucaaccguugcuaguucccuggccuuagcuaucaugguggccgggcugagccuauggaugugcucuaauggaucacuccagugccggauuuguauauga

SEQ ID NO: 132815 - RNA, 1704 nt, Artificial Sequence
  derived and/or modified CDS sequence (opt3) from hemagglutinin__InfluenzaA__ADG21429
auggagaagaucgugcugcuccuugccauugucagcauaguuaaauccgaccagaucugcauuggcuaccacgcuaacaauucuaccgaacaaguggauacaaucauggagaagaacguaacugugacgcaugcacaggacauucuggagaaaacccacaaugggaaguuguguaacuuagauggagucgaaccccugauccuaagagacugcucaguggccgguuggcuccugggcaauccuaugugugaugaguuccuuaacguuccagaauggaguuauauaguggagaaaaucaauccggcgaacgaccugugcuaccccgggaauuuuaacgauuaugaagaguugaagcaucuccugagcaggauuaaucacuucgaaaagauccagauuaucccuaaaaacuccuggucugaccaugaggcuucgggagucucaagcgccuguccauaccagggccggaguuccuuuuuccgcaaugugguauggcugacaaagaaaaacaaugcauaucccacuauaaagaaaucuuacaacaacaccaaucaagaggaucucuuaguucugugggguauucaccacccuaacgacgccgcugaacagacacgacuuuaucagaauccaaccacuuacaucagcguggggacauccaccuugaaccagcgucugguccccaagauugcaacgagaucaaaggugaauggacaaaguggcaggauggaguuuuucuggacuauccuaaaaagcaacgaugugaucaauuuugaaucuaacggcaauuucauugccccugagaacgcuuacaagauagucaaaaagggggacuccaccaucaugaaaucagaacucgaguauggaaauugcaacacaaagugucagacuccaauuggugccaucaauagcaguaugccguuucauaacauacacccccugaccauuggcgagugcccuaaauacguuaagucugaucggcuugugcuggcgacaggguugcgcaauuccccacagggagaaagaaggcggaagaaacgcggccucuucggugcaaucgccggguuuaucgagggaggcuggcagggcaugguagacgggugguauggauaccaucacagcaacgaacaagguucgggcuaugcugccgacaaggagucuacccagaaagcaauugauggggugacgaacaaggucaauuccaucauugacaaaaugaacacucaguucgaagcugugggacgagaguuuaauaaccuggagagaaggauagaaaauuuaaacaagaagauggaggauggcuuccuggacguuuggacauacaaugccgaacuccuugugcugauggagaacgaacggaccuuggauuuccacgacucaaaugucaaaaaccuauaugauaaggugcgucugcaacuccgcgacaaugcgaaagagcuggguaacggguguuuugaguucuaccauagaugcgauaaugaauguauggagaguguaaggaacggcacuuacgacuauccccaguacagcgaagaggcccggcuuaagcgagaggaaaucuccggaguuaaacuggagucuauuggcacauaucagaucuugagcaucuacucaaccguggcaaguucccucgcucuggccauuauggucgcuggguuacugcuauggaugugcagcaauggaucucuccagugccgcauauguaucuga

SEQ ID NO: 132816 - RNA, 1704 nt, Artificial Sequence
  derived and/or modified CDS sequence (opt3) from hemagglutinin__InfluenzaA__ADG21437
auggagaagaucgugcugcuccuugccauugucagcauaguuaaauccgaccagaucugcauuggcuaccacgcuaacaauucuaccgaacaaguggauacaaucauggagaagaacguaacugugacgcaugcacaggacauucuggaaaagacccacaaugggaaauuguguaacuuagauggagucaaaccccugauccuaagagacugcucaguggccgguuggcuccugggcaauccuaugugugaugaguuccuuaacguuccagaauggaguuauauaguggagaagaucaauccggcgaacgaccugugcuaccccgggaauuuuaacgauuaugaggaauugaagcaucuccugagcaggauuaaucacuucgagaaaauccagauuaucccuaagaacuccuggucugaccaugaggcuucgggagucucaagcgccuguccauaccagggccggaguuccuuuuuccgcaaugugguauggcugacacagaaaaacaaugcauaucccacuauaaagaaaucuuacaacaacaccaaucaagaagaucucuuaguucugugggguauucaccacccuaacgacgccgcugagcagacacgacuuuaucagaauccaaccacuuacaucagcguggggacauccaccuugaaccaacgucugguccccaagauugcaacgagaucaaaggugaauggacagaguggcaggauggaauuuuucuggacuauccuaaaaagcaacgaugugaucaauuuugagucuaacggcaauuucauugccccugaaaacgcuuacaagauagucaaaaagggggacuccaccaucaugaaaucagagcucgaauauggaaauugcaacacaaagugucagacuccaauuggugccaucaauagcaguaugccguuucauaacauacacccccugaccauuggcgagugcccuaaauacguuaagucuaaucggcuugugcuggcgacaggguugcgcaacuccccacagggagagagaaggcggaagaaacgcggccucuucggugcaaucgccggguuuaucgaaggaggcuggcaaggcaugguagaugggugguauggauaccaucacagcaacgagcaggguucgggcuaugcugccgacaaggaaucuacccagaaagcaauugacggggugacgaauaaggucaacuccaucauugauaaaaugaauacucaauucgaggcugugggacgagaauuuaacaaucuggagagaaggauagagaacuuaaauaagaagauggaagacggcuuccuggauguuuggacauacaacgccgagcuccuugugcugauggaaaaugagcggaccuuggacuuccacgauucaaacgucaaaaaucuauaugacaaggugcgucugcagcuccgcgauaacgcgaaagaacuggguaauggguguuuugaguucuaccauagaugcgacaacgaguguauggaaaguguaaggaauggcacuuacgauuauccccaguacagcgaggaagcccggcuuaagcgagaggagaucuccggaguuaaacuggaaucuauuggcacauaucagaucuugagcaucuacucaaccguggcaaguucccucgcucuggccauuauggucgcuggguuauuucuguggaugugcagcaacggaucucuacaaugccgcauauguaucuga

SEQ ID NO: 132817 - RNA, 1704 nt, Artificial Sequence
  derived and/or modified CDS sequence (opt3) from hemagglutinin__InfluenzaA__ADG21439
auggagaagaucgugcugcuccuugccauugucagcauaguuaaauccgaccagaucugcauuggcuaccacgcuaacaauucuaccgaacaaguggauacaaucauggagaagaacguaacugugacgcaugcacaggacauucuggaaaagacccacaaugggaaauuguguaacuuagauggagucaaaccccugauccuaagagacugcucaguggccgguuggcuccugggcaauccuaugugugaugaguuccuuaacguuccagaauggaguuauauaguggagaagaucaauccggcgaacgaccugugcuaccccgggaauuuuaacgauuaugaggaauugaagcaucuccugagcaggauuaaucacuucgagaaaauccagauuaucccuaagggauccuggucugaccaugaggcuucgggcgucucaagcgccuguccauaccagggucggaguuccuuuuuccgcaacgugguauggcugacuaaaaagaauaacgcauaucccacaauuaaaaagucuuacaauaacaccaaccaagaagaucucuuaguucugugggggauacaccacccuaaugacgccgcugagcagacacgacuuuaucagaacccaaccacuuacaucagcgugggaacauccaccuugaaucagcgucuggucccccaaauugcaacgagaucaaaggugaacggccagaguggcaggauggaauuuuucuggacuauccuaaaaagcaaugaugccaucaacuuugagucuaaugggaacuucauugcuccugaaaaugccuacaagauagugaaaaagggagacuccaccaucaugaaaucagagcucgaauaugguaacugcaauacaaagugucagacuccaauuggcgcgaucaacagcaguaugccguuucauaauauacacccccugaccauuggggagugcccuaaauacgucaagucuaaccggcuuguucuggcaacaggauugcgcaauuccccacagggcgagagaaggcggaagaaacgcggucucuucggggccaucgcuggauuuaucgaaggcggcuggcaagggaugguggauggaugguaugguuaccaucacagcaacgagcagggcucgggguaugccgcagacaaggaaucuacccagaaagcuauugacggaguaacgaacaaggucaauuccaucauugauaaaaugaacacucaauucgaggccgugggccgagaauuuaauaaccuggagagaaggauagagaauuuaaacaagaagauggaagacgguuuccuggauguguggacauacaaugcggagcuccuuguucugauggaaaacgagcggaccuuggacuuccacgauucaaaugugaaaaaccuauaugacaagguccgucugcagcuccgcgauaaugccaaagaacuggggaacggcuguuuugaguucuaccauagaugcgacaaugaguguauggaaagugugaggaacggaacuuacgauuauccccaguacagcgaggaagcacggcuuaagcgagaggagaucuccggcguaaaacuggaaucuauugggacauaucagaucuugagcaucuacucaaccguugcuaguucccucgcccuggcuauuaugguggccggauuauuucuguggaugugcagcaaugguucucuacaaugccgcauauguaucuga

SEQ ID NO: 132818 - RNA, 1704 nt, Artificial Sequence
  derived and/or modified CDS sequence (opt3) from hemagglutinin__InfluenzaA__ADG21441
auggagaagaucgugcugcuccuugccauugucagcauaguuaaauccgaccagaucugcauuggcuaccacgcuaacaauucuaccgaacaaguggauacaaucauggagaagaacguaacugugacgcaugcacaggacauucuggaaaagacccacaaugggaaauuguguaacuuagauggagucaaaccccugauccuaagagacugcucaguggccgguuggcuccugggcaauccuaugugugaugaguuccuuaacguuccagaauggaguuauauaguggagaagaucaauccgagcaacgaccugugcuaccccgggaauuuuaacgauuaugaggaauugaagcaucuccuguccaggauuaaucacuucgagaaaauccagauuaucccuaagaacucuuggucggaccaugaagcgucaggagucagcagugcuuguccauaccagggccgguccagcuuuuuccgcaaugugguauggcugacuaaaaagaacaaugccuaucccacaauuaaaaagucuuacaacaacaccaaucaagaggaucucuuaguucugugggguauacaccacccuaacgacgaggcagaacagacaucccuuuaucagaauccaaccacuuacaucucaguggggacaaguaccuugaaccagcgacugguccccaagauugccacgcguagcaaagugaauggacaaucuggcagaauggaguuuuucuggacuauccuaaaguccaacgaugcuaucaauuuugaaucaaacggcaauuucauugcaccugagaacgccuacaaaauagugaagaaaggggacagcaccaucaugaagagugaacucgaguauggaaauugcaacacaaaaugucagacuccaauuggugcuaucaauucuuccaugccguuucauaacauacacccccugaccauuggcgagugcccuaaguacgucaagagcaauaggcuuguucuggccacaggguugcggaacucgccacagggagaacgcagaaggaaaaagcggggccucuucggugcgaucgcaggguuuaucgagggaggcuggcagggcaugguggaugggugguauggauaccaucacucuaacgaacaagguuccggcuaugccgcugacaaagagucaacccagaaggccauugacgggguaacgaauaaagugaacaguaucauugauaagaugaauacucaguucgaagcagucggacgcgaguuuaacaaucuggagcgaagaauagaaaacuuaaauaagaaaauggaggacggcuuccuggauguguggacauacaacgcugaacuccuuguucugauggagaaugaaaggaccuuggacuuccacgauagcaacgugaagaaucuauaugacaaaguccggcugcaacuccgugauaacgccaaggagcuggguaauggguguuuugaguucuaccaucgcugcgacaacgaauguauggaguccgugagaaauggcacuuacgauuauccccaguacucugaagaggcgaggcuuaaacgggaggaaaucagcggaguaaagcuggagucaauuggcacauaucagaucuugaguaucuacuccaccguugccagcucucucgcacuggcuauuaugguggccggguuauuucuguggaugugcucaaacggaagucuacagugccgaauauguaucuga

SEQ ID NO: 132819 - RNA, 1704 nt, Artificial Sequence
  derived and/or modified CDS sequence (opt3) from hemagglutinin__InfluenzaA__ADG21443
auggagaagaucgugcugcuccuugccauugucagcauaguuaaauccgaccagaucugcauuggcuaccacgcuaacaauucuaccgaacaaguggauacaaucauggagaagaacguaacugugacgcaugcacaggacauucuggaaaagacccacaaugggaaauuguguaacuuagauggagucaaaccccugauccuaagagacugcucaguggccgguuggcuccugggcaauccuaugugugaugaguuccuuaacguuccagaauggaguuauauaguggagaagaucaauccgacaaacgaccugugcuaccccgggaauuuuaacgauuaugaggaauugaagcaucuccugagcaggauuaaucacuucgagaaaauccagauuaucccuaagaacuccuggucugaccaugaagcgucgggagucucaagcgcuuguccauaccagggccggaguuccuuuuuccgcaaugugguauggcugacuaaaaagaacaaugccuaucccaccauuaaaaagucuuacaacaacacaaaucaagaggaucucuuaguucugugggguauacaccacccuaacgacgcagccgagcagacccgacuuuaucagaauccaacuacauacaucagcguggggaccuccacguugaaccagcgucugguccccaagauugcuacuagaucaaaagugaauggacaaaguggcaggauggaauuuuucuggaccauccuaaagagcaacgaugcaaucaauuuugagucuaacggcaauuucauugccccugaaaacgcuuacaaaauagugaagaaaggggacuccacaaucaugaagucagagcucgaauauggaaauugcaacacuaaaugucagaccccaauuggugccaucaauagcaguaugccguuucauaacauacacccccugacaauuggcgagugcccuaaguacgucaagucuaaucggcuuguucuggcgaccggguugcgcaacuccccacagggagagagaaggcggaaaaagcgcggccucuucggugcaaucgccggguuuaucgaaggaggcuggcagggcaugguggaugggugguauggauaccaucacagcaacgagcaagguucgggcuaugcugccgacaaagaaucuacgcagaaggcaauugacgggguaacuaauaaagugaacuccaucauugauaagaugaauacacaguucgaggcugucggacgagaauuuaacaaucuggagagaaggauagagaacuuaaauaagaaaauggaagacggcuuccuggauguguggaccuacaacgccgagcuccuuguucugauggaaaaugagcggacuuuggacuuccacgauucaaacgugaagaaucuauaugacaaaguccgucugcaacuccgcgauaacgcgaaggaacuggguaauggguguuuugaguucuaccauagaugcgacaacgaguguauggaaagugugaggaauggcacauacgauuauccccaguacagcgaggaagcccggcuuaaacgagaggagaucuccggaguaaagcuggaaucuauuggcaccuaucagaucuugagcaucuacucaacgguugcaaguucccucgcucuggccauuaugguggcuggguuauuucuguggaugugcagcaacggaucucuacagugccgcauauguaucuga

SEQ ID NO: 132820 - RNA, 1704 nt, Artificial Sequence
  derived and/or modified CDS sequence (opt3) from hemagglutinin__InfluenzaA__ADG21445
auggagaagaucgugcugcuccuugccauugucagcauaguuaaauccgaccagaucugcauuggcuaccacgcuaacaauucuaccgaacaaguggauacaaucauggagaagaacguaacugugacgcaugcacaggacauucuggaaaagacccacaaugggaaguuguguaacuuagauggagucaaaccccugauccuaagagacugcucaguggccgguuggcuccugggcaauccuaugugugaugaguuccuuaacguuccagaauggaguuauauaguggagaagaucaauccgagcaacgaccugugcuaccccgggaauuuuaacgauuaugaggaauugaagcaucuccuguccaggauuaaucacuucgagaaaauccagauuaucccuaagaacucuuggucggaccaugaagcgucaggagucagcagugcuuguccauaccagggccgguccagcuuuuuccgcaaugugguauggcugacuaaaaagaacaaugccuaucccacaauuaaaaagucuuacaacaacaccaaucaagaggaucucuuaguucugugggguauacaccacccuaacgacgaggcagaacagacacgacuuuaucagaauccaaccacuuacaucuccguggggacaucaaccuugaaccagcgucugguccccaagauugccacgagaaguaaagugaauggacaaagcggcaggauggaguuuuucuggacuauccuaaagucuaacgaugcuaucaauuuugaauccaacggcaauuucauugcaccugagaacgccuacaaaauagugaagaaaggggacucaaccaucaugaaaagcgaacucgaguauggaaauugcaacacaaaaugucagacuccaauuggugcuaucaauaguucuaugccguuucauaacauacacccccugaccauuggcgagugcccuaaguacgucaaguccaaucggcuuguucuggccacaggguugcgcaacagcccacagggagaaagaaggcggaaaaagcgcggccucuucggugcgaucgcaggguuuaucgagggaggcuggcagggcaugguggaugggugguauggauaccaucacucgaacgaacaagguucuggcuaugccgcugacaaagaguccacccagaaggccauugacgggguaacgaauaaagugaacucaaucauugauaagaugaauacucaguucgaagcagucggacgagaguuuaacaaucuggagagaaggauagaaaacuuaaauaagaaaauggaggacggcuuccuggauguguggacauacaacgcugaacuccuuguucugauggagaaugaacggaccuuggacuuccacgauaguaacgugaagaaucuauaugacaaaguccgucugcaacuccgcgauaacgccaaggagcuggguaauggguguuuugaguucuaccauagaugcgacaacgaauguauggagagcgugaggaauggcacuuacgauuauccccaguacuccgaagaggcgcggcuuaaacgagaggaaaucucuggaguaaagcuggagagcauuggcacauaucagaucuugucaaucuacaguaccguugccuccagccucgcacuggcuauuaugguggccggguuauuucuguggaugugcucuaacggaucacuacagugccgcauauguaucuga

SEQ ID NO: 132821 - RNA, 1701 nt, Artificial Sequence; identical to SEQ ID NO: 130959
  derived and/or modified CDS sequence (opt3) from hemagglutinin__InfluenzaA__ADG21912

SEQ ID NO: 132822 - RNA, 1701 nt, Artificial Sequence; identical to SEQ ID NO: 130717
  derived and/or modified CDS sequence (opt3) from hemagglutinin__InfluenzaA__ADG21913

SEQ ID NO: 132823 - RNA, 1701 nt, Artificial Sequence
  derived and/or modified CDS sequence (opt3) from hemagglutinin__InfluenzaA__ADG21914
augaaggccaucauugugguccugcucuacaccuucgcuacagcaaacgccgacacucuuugcauaggcuaucacgcgaauaacagcacggauaccguugacacagugcuggagaaaaauguaacugugacccauuccgucaacuuguuagaagauaagcacaaugggaaacuguguaagcuaagaggaguggcuccccuccaucuggguaaaugcaacaucgccggcuggauucuugggaauccugagugugaaucucugucaacagcaaguagcugguccuacaucguugagaccucuucgucagacaacggaacuugcuauccaggcgauuuuauugacuacgaagaguugagggagcagcucagcaguguguccucuuucgaacgguuugagaucuucccgaagacaagcuccuggcccaaucacgauucaaacaagggugucaccgccgcuuguccucaugcaggggccaaaaguuuuuauaagaaucugauauggcuggugaaaaagggaaacagcuacccaaaacucucuaaguccuauaucaaugacaagggcaaagaaguauuaguucuguggggcauucaccaccccucaacgagcgcugaucaacagagucuuuaccagaacgccgacgcguacguguucgucgggacuucucgcuauuccaagaaauuuaagccugagaucgcaauucgaccaaaagugcgugaucaggagggaagaaugaauuacuauuggaccuugguggaacccggugacaagaucacauucgaggccacuggcaaccuggucguuccuagguacgcuuuugccauggaacggaacgcagggagcggaauaauuaucucggauaccccagugcaugacugcaauacaaccugucaaacgccgaaaggcgcuauuaacacuucucuacccuuccagaauauccacccuaucacaauugguaagugcccaaaguauguaaaauccaccaagcuccgccuggccacugggcuuagaaacgugcccucaauacagaguaggggacuguuuggcgcgaucgccggcuucauugaagggggauggacagguauggucgacggcugguacggguaucaucaccagaaugaacaaggaagcggcuacgcagcugauuugaaauccacccagaacgccaucgacgagauaacgaauaaggugaacucuguuauugagaaaaugaauacccaguuuacagcuguggguaaggaguucaaccaccucgagaagcggaucgaaaaucugaacaaaaaggucgaugacggguucuuagauaucuggacuuacaaugccgagcugcucgugcuucuggaaaacgagcgcaccuuggacuaucaugauagcaauguuaaaaaccuauacgagaagguacgaucacagcugaaaaacaaugcaaaggaaauuggcaacggauguuuugaguucuaucacaagugcgacaauacauguauggaaagugugaaaaacggcacuuacgauuauccuaaguacuccgaggaagccaaacucaauagagaggagaucgacggggucaagcuggaaagcaccaggauuuaucaaauacuugcuaucuacucuacaguggcgucaagucuggucuuggugguuagccucggagcaauuuccuuuuggaugugcucuaacgguucgcugcagugccggaucuguaucuga

SEQ ID NO: 132824 - RNA, 1701 nt, Artificial Sequence
  derived and/or modified CDS sequence (opt3) from hemagglutinin__InfluenzaA__ADG21915
auggaggccauccuggugguccuccuuuacaccuucgcuacagcaaacgccgacacucugugcauuggcuaucacgcgaauaacagcacggauaccguugacacaguguuggaaaagaauguaacugugacccauuccgucaacauauuagaggauaaacacaaugggaagcuguguaaacuaagaggaguggcuccccuccaucuggguaagugcaacaucgccggcuggauucuugggaauccugaaugugagucucugucaacagcaaguagcugguccuacaucguugaaaccucuucgucagacaacggaacuugcuauccaggcgauuuuauugacuacgaggaguugagggaacagcucagcaguguguccucuuucgagcgguuugaaaucuucccgaaaacaagcuccuggcccaaucacgauucaaacaagggugucaccgccgcuuguccucaugcaggggccaagaguuuuuauaaaaaucugauauggcuggugaagaaaggaaacagcuacccaaagcucucuaaauccuauaucaaugacaagggcaaggagguauuaguucuguggggcauucaccaccccucaacgagcgcugaucaacagagucuuuaccagaacgccgacgcguacguguucgucgggucuucccgcuauagcaaaaaguuuaaaccugagaucgcaauucgaccaaaggugcgugaucaggaaggaagaaugaauuacuauuggacuuugguggagcccggugacaaaaucaccuucgaagccacaggcaaccuggucguuccuagguacgcuuuugccauagagcggaacgcagggucgggaauuaucauuucugauacuccagugcaugacugcaauaccacaugucaaaccccgaagggcgcuaucaacacgucccuacccuuccacaauauccauccuauuacuauagguaaaugcccaaaguauguaaagucaacaaaacuccgccuggccaccgggcuuagaaacgugcccaguauccagagcaggggacuguuuggcgcgauugccggcuucaucgaagggggauggacugguauggucgacggcugguacggguaucaccaccagaaugagcagggauccggcuacgcagcugauuugaagucuacacaaaacgccauagacgagauuaccaauaaagugaacagcguuaucgaaaagaugaauacgcaguuuaccgcuguggguaaagaguucaaccaucucgaaaagcggaucgagaaucugaacaagaaagucgaugacggguucuuagauauuuggacauacaaugccgaacugcucgugcuucuggagaacgagcgcacuuuggacuaucacgauucaaauguaaagaaccuauacgaaaaaguucgaagucagcugaagaacaaugcaaaagagaucggcaacggauguuuugaguucuaucauaagugcgacaauaccuguauggaauccgugaagaacggcacauacgauuauccuaaauacagcgaagaggccaagcucaauagagaggaaauugacggggucaaacuggagucuacuaggauauaucagauccuugcuauuuacucaaccguggcgaguagccuggucuuggugguuucccucggagcaaucucuuuuuggaugugcucgaacgguagccugcaaugccggaucuguauuuga

SEQ ID NO: 132825 - RNA, 1701 nt, Artificial Sequence; identical to SEQ ID NO: 130959
  derived and/or modified CDS sequence (opt3) from hemagglutinin__InfluenzaA__ADG21916

SEQ ID NO: 132826 - RNA, 1701 nt, Artificial Sequence; identical to SEQ ID NO: 130717
  derived and/or modified CDS sequence (opt3) from hemagglutinin__InfluenzaA__ADG21917

SEQ ID NO: 132827 - RNA, 1701 nt, Artificial Sequence; identical to SEQ ID NO: 132217
  derived and/or modified CDS sequence (opt3) from hemagglutinin__InfluenzaA__ADG21918

SEQ ID NO: 132828 - RNA, 1701 nt, Artificial Sequence
  derived and/or modified CDS sequence (opt3) from hemagglutinin__InfluenzaA__ADG21919
augaaggccauccuggugguccuccuuuacaccuucgcuacagcaaacgccgacacucugugcauuggcuaucacgcgaauaacagcacggauaccguugacacaguguuggagaagaauguaacugugacccauuccgucaacuuacuggaagauaagcacaaugggaaacuauguaagcucagaggagugacaccccugcaucuugguaaaugcaacauagcuggcuggauccuggggaauccugagugugaaucuuugucaaccgccaguagcugguccuacauuguugagacuucuucgucagacaacggaacaugcuauccaggcgauuuuaucgacuacgaggagcucagggagcagcugagcaguguguccucuuucgaacgguuugagauuuucccgaagaccagcuccuggcccaaucacgauucaaacaagggugucacggcagccuguccucaugcuggggcaaaaaguuuuuauaagaaucugaucuggcucgugaaaaagggaaacagcuacccaaaauuaucuaaguccuauauaaaugacaagggcaaagaaguacugguucuuuggggcauccaccaccccucaacuagcgccgaucaacagaguuuguaccagaacgcugacgccuacguguucgucgggaccucucgcuauuccaagaaauuuaagccugagauugcgauccgaccaaaagugcgugaucaggagggaagaaugaauuacuauuggacacugguggaacccggugacaagauuacuuucgaggcaaccggcaaccuagucguuccuagguacgccuuugcuauggaacggaacgccgggagcggaaucauaauuucggauacaccagugcaugacugcaauaccacgugucaaacuccgaaaggcgcaaucaacacaucucuccccuuccagaauauucacccuaucaccaucgguaagugcccaaaguauguaaaauccacuaagcugcgccuugcuacagggcugagaaacgugcccucaauucagaguaggggauuguuuggcgccauagcgggcuucaucgaagggggauggaccgguauggucgacggcugguacggguaucaucaccagaaugaacaaggaagcggcuacgccgcagaucucaaauccacgcagaacgcuauugacgagaucaccaauaaggugaacucuguuauagagaaaaugaauacacaguuuacugccguggguaaggaguucaaccaccuggaaaagcggauugaaaauuuaaacaaaaagaucgaugacggguuccuggauaucuggaccuacaaugcugagcuccuuguccuguuggaaaacgagcgcacacuagacuaucaugauagcaaugugaaaaaccuguacgagaagguacgaucacagcucaaaaacaaugccaaggaaauuggcaacggauguuuugaguucuaucacaagugcgacaauacuuguauggaaaguguuaaaaacggcaccuacgauuauccuaaguacuccgaggaagcaaaacugaauagagaggagaucgacggggugaaacuugaaagcacaaggauuuaucaaauacuggccaucuacucuaccgucgcuucaaguuuggugcucgucgugagccugggagcgauuuccuuuuggaugugcucuaacgguucguuacagugccggaucuguaucuga

SEQ ID NO: 132829 - RNA, 1701 nt, Artificial Sequence; identical to SEQ ID NO: 130959
  derived and/or modified CDS sequence (opt3) from hemagglutinin__InfluenzaA__ADG21921

SEQ ID NO: 132830 - RNA, 1701 nt, Artificial Sequence; identical to SEQ ID NO: 130717
  derived and/or modified CDS sequence (opt3) from hemagglutinin__InfluenzaA__ADG21922

SEQ ID NO: 132831 - RNA, 1701 nt, Artificial Sequence
  derived and/or modified CDS sequence (opt3) from hemagglutinin__InfluenzaA__ADG21923
augaaggccauccuggugguccuccuuuacaccuucgcuacagcaaacgccgacacucugugcauuggcuaucacgcgaauaacagcacggauaccguugacacaguguuggagaaaaauguaacugugacccauuccgcuaacuuacuggaagauaagcacaaugggaaacuauguaagcucagaggagucgcaccccugcaucuugguaaaugcaacauagccggcuggauccuggggaauccugagugugaaucuuugucaacagccaguagcugguccuacauuguggagaccucuucgucagacaacggaacuugcuauccaggcgauuuuaucgacuacgaggagcucagggagcagcugagcaguguuuccucuuucgaacgguuugagauuuucccgaagacaagcuccuggcccaaucacgauucaaacaagggugugaccgcugcauguccucaugccggggcuaaaaguuuuuauaagaaucugaucuggcucgucaaaaagggaaacagcuacccaaaauuaucuaaguccuauauaaaugacaagggcaaagaagugcugguacuuuggggcauccaccaccccucaacgagcgccgaucaacagaguuuguaccagaacgcggacgcauacguuuucguggggucuuccaaguauagcaaaaaguuuaaaccugagauugccauccgcccaaagguccgagaucaggagggacguaugaauuacuauuggacucugguggaacccggugacaaaauuaccuucgaggcuacaggcaaccuaguggucccuagauacgccuuugcaauggaaaggaacgcugggucgggaaucauaauuucugauacuccaguucaugacugcaauaccacaugucaaaccccgaagggcgccaucaacacgucccuccccuuccacaauauucauccuaucacuaucgguaagugcccaaaauaugugaagucaacaaaacugcggcuugcgaccgggcugcgcaacguacccaguauucagagcagaggauuguuuggcgccauagcaggcuucaucgaagggggauggacugguaugguggacggcugguacggguaucaccaccagaaugaacagggauccggcuacgcugccgaucucaagucuacacaaaacgcuauugacgagaucaccaauaaagucaacagcgugauagagaagaugaauacgcaguuuaccgccguugguaaggaauuuaaccaucuggagaaaaggauugaaaauuuaaacaagaaaguggaugacggguuccuggauaucuggacauacaaugcagagcuccuuguccuguuggaaaacgagcggacucuagacuaucacgauucaaaugugaagaaccuguacgagaaaguacgcagucagcucaagaacaaugccaaggaaaucggcaacggauguuucgaguucuaucauaaaugcgacaauaccuguauggaauccguuaagaacggcacauacgauuauccuaaauacagcgaggaagcuaagcugaaucgagaggagauugacggggugaaacuugaaucuacuagaaucuaucagauucuggcgauauacucaaccgucgcaaguagcuuggugcucgucgugucccugggagccaucucuuuuuggaugugcucgaacgguagcuuacaaugcaggauuuguaucuga

SEQ ID NO: 132832 - RNA, 1701 nt, Artificial Sequence
  derived and/or modified CDS sequence (opt3) from hemagglutinin__InfluenzaA__ADG21924
auggaggccauccuggugguccuccuuuacaccuucgcuacagcaaacgccgacacucugugcauuggcuaucacgcgaauaacagcacggauaccguugacacaguguuggaaaagaauguaacugugacccauuccgucaacuuacuggagaauaaacacaacgggaagcuauguaaacucagaggaguggcuccccugcaucuugguaagugcaauauagccggcuggauccuggggaacccugaaugugagucuuugucaacagcaaguagcugguccuacauuguugaaaccucuucgucagauaauggaacuugcuauccaggcgacuuuaucgauuacgaggagcucagggaacagcugagcaguguguccucuuucgagcgguuugaaauuuucccgaaaacaagcuccuggcccaaccacgacucaaauaagggugucaccgccgcuuguccucaugcaggggccaagaguuuuuauaaaaaccugaucuggcucgugaagaaaggaaauagcuacccaaaguuaucuaaauccuauauaaacgauaagggcaaggagguacugguucuuuggggcauccaccaccccucaacgagcgcugaccaacagaguuuguaccagaaugccgaugcguacguguucgucgggucuucccgcuauagcaaaaaguuuaaaccugagauugcaauccgaccaaaggugcgugaccaggaaggaagaaugaacuacuauuggacucugguggagcccggugauaaaauuaccuucgaagccacaggcaaccuagucguuccuagguacgcuuuugccauggagcggaaugcagggucgggaaucauaauuucugacacuccagugcaugauugcaacaccacaugucaaaccccgaagggcgcuaucaauacgucccuccccuuccacaacauucauccuaucacuaucgguaaaugcccaaaguauguaaagucaacaaaacugcgccuugccaccgggcugagaaaugugcccaguauucagagcaggggauuguuuggcgcgauagccggcuucaucgaagggggauggacugguauggucgacggcugguacggguaucaccaccagaacgagcagggauccggcuacgcagcugaccucaagucuacacaaaaugccauugaugagaucaccaacaaagugaauagcguuauagaaaagaugaacacgcaguuuaccgcuguggguaaagaguucaaucaucuggaaaagcggauugagaacuuaaauaagaaagucgacgauggguuccuggacaucuggacauacaacgccgaacuccuugugcuguuggagaaugagcgcacucuagauuaucacgacucaaacguaaagaaccuguacgaaaaaguucgaagucagcucaagaauaacgcaaaagagaucggcaauggauguuuugaguucuaucauaagugcgauaacaccuguauggaauccgugaagaauggcacauacgacuauccuaaauacagcgaagaggccaagcugaacagagaggaaauugauggggucaaacuugagucuacuaggaucuaucagauucuggcuauauacucaaccguggcgaguagcuugguccucgugguuucccugggagcaaucucuuuuuggaugugcucgaaugguagcuuacaaugccggauuuguaucuga

SEQ ID NO: 132833 - RNA, 1701 nt, Artificial Sequence
  derived and/or modified CDS sequence (opt3) from hemagglutinin__InfluenzaA__ADG21925
augaaggccauccuggugguccuccuuuacaccuucgcuacagcaaacgccgacacucugugcauuggcuaucacgcgaauaacagcacggauaccguugacacaguguuggagaagaauguaacugugacccauuccgucaacuuacuggaagauaagcacaaugggaaacuauguaagcucagaggaguggcuccccugcaucuugguaaaugcaacauagccggcuggauccuggggaauccugagugugaaucuuugucaacagcaaguagcugguccuacauuguugagaccucuucgucagacaacggaacuugcuauccaggcgauuuuaucgacuacgaggagcucagggagcagcugagcaguguguccucuuucgaacgguuugagauuuucccgaagacaagcuccuggcccaaucacgauucaaacaagggugucaccgccgcuuguccucaugcaggggccaaaaguuuuuauaagaaucugaucuggcucgugaaaaagggaaacagcuacccaaaauuaucuaaguccuauauaaaugacaagggcaaagaaguacugguucuuuggggcauccaccaccccucaacgagcgcugaucaacagaguuuguaccagaacgccgacgcguacguguucgucgggacuucucgcuauuccaagaaauuuaagccugagauugcaauccgaccaaaagugcgugaucaggagggaagaaugaauuacuauuggacccugguggaacccggugacaagauuacauucgaggccacuggcaaccuagucguuccuagguacgcuuuugccauggaacgggaugcagggagcggaaucauaauuucggacaccccagugcaugacugcaacacaaccugucaaacgccgaaaggcgcuaucaauacuucucuccccuuccagaacauucacccuaucacaaucgguaagugcccaaaguauguaaaauccaccaagcugcgccuugccacugggcugagaaaugugcccucaauucagaguaggggauuguuuggcgcgauagccggcuucaucgaagggggauggacagguauggucgauggcugguacggguaucaucaccagaacgaacaaggaagcggcuacgcagcugaccucaaauccacccagaaugccauugaugagaucacgaacaagguuaauucugugauagagaaaaugaacacccaguuuacagcuguggguaaggaguucaaucaccuggaaaagcggauugaaaacuuaaauaaaaagaucgacgauggguuccuggacaucuggacuuacaacgccgagcuccuuguccuguuggaaaaugagcgcacccuagauuaucaugacagcaacgugaaaaaucuguacgagaagguacgaucacagcucaaaaacaacgcaaaggaaauuggcaauggauguuuugaguucuaucacaagugcgauaacacauguauggaaaguguuaaaaauggcacuuacgacuauccuaaguacuccgaggaagccaaacugaacagagaggagaucgauggggugaaacuugaaagcaccaggauuuaucaaauacuggcuaucuacucuacagucgcgucaaguuuggugcucgucgugagccugggagcaauuuccuuuuggaugugcucuaaugguucguuacagugccggaucuguaucuga

SEQ ID NO: 132834 - RNA, 1701 nt, Artificial Sequence
  derived and/or modified CDS sequence (opt3) from hemagglutinin__InfluenzaA__ADG21926
augaaggccauccuggugguccuccuuuacaccuucgcuacagcaaacgccgacacucugugcauuggcuaucacgcgaauaacagcacggauaccguugacacaauauuggagaagaaugugacuguaacccauuccgugaacuuacuggaagauaagcacaaugggaaacuauguaagcucagaggagucgcuccccugcaucuugguaaaugcaacaucgccggcuggauucuggggaauccugagugugaaucuuugucaacagcaaguagcugguccuacaucguggagaccucuucgucagacaacggaacuugcuauccaggcgauuuuauugacuacgaggagcucagggagcagcugagcaguguuuccucuuucgaacgguuugagaucuucccgaagacaagcuccuggcccaaucacgauucaaacaagggugugaccgccgcuuguccucaugcaggggccaaaaguuuuuauaagaaucugauauggcucgucaaaaagggaaacagcuacccaaaauuaucuaaguccuauaucaaugacaagggcaaagaagugcugguacuuuggggcauucaccaccccucaacgagcgcugaucaacagaguuuguaccagaacgccgacgcguacguuuucguggggacuucucgcuauuccaagaaauuuaagccugagaucgcaauucgaccaaaaguccgugaucaggagggaagaaugaauuacuauuggacccugguggaacccggugacaagaucacauucgaggccacuggcaaccuaguggucccuagguacgcuuuugccauggaacggaacgcagggagcggaauaauuaucucggauaccccaguucaugacugcaauacaaccugucaaacgccgaaaggcgcuauuaacacuucucuccccuuccagaauauccacccuaucacaauugguaagugcccaaaguaugugaaauccaccaagcugcgccuugccacugggcugagaaacguacccucaauacagaguaggggauuguuuggcgcgaucgccggcuucauugaagggggauggacagguaugguggacggcugguacggguaucaucaccagaaugaacaaggaagcggcuacgcagcugaucucaaauccacccagaacgccaucgacgagauaacgaauaaggucaacucugugauugagaaaaugaauacccaguuuacagcuguugguaaggaguucaaccaccuggaaaagcggaucgaaaauuuaaacaaaaagguggaugacggguuccuggauaucuggacuuacaaugccgagcuccuuguccuguuggaaaacgagcgcaaucuagacuaucaugauagcaacgugaaaaaccuguacgagaagguacgaucacagcucaaaaauaacgcaaaggaaauuggcaauggauguuuugaguucuaucacaagugcgacaacaccuguauggaaaguguuaaaaauggcacauacgauuauccuaaguacuccgaggaagccaaacugaacagagaggagaucgacggggugaaacuugaaagcacuaggauuuaucaaauacuggcuaucuacucuaccgucgcgucaaguuuggugcucgucgugagccugggagcaauuuccuuuuggaugugcucuaaugguucguuacagugccggaucuguaucuga

SEQ ID NO: 132835 - RNA, 1701 nt, Artificial Sequence; identical to SEQ ID NO: 130959
  derived and/or modified CDS sequence (opt3) from hemagglutinin__InfluenzaA__ADG21927

SEQ ID NO: 132836 - RNA, 1701 nt, Artificial Sequence
  derived and/or modified CDS sequence (opt3) from hemagglutinin__InfluenzaA__ADG21928
augaaggccacccuggugguccuccuuuacacauucgcuacugcaaacgccgacacgcugugcaucggcuaucacgcgaauaacagcaccgauacaguugacacuguguuggagaaaaauguaaccgugacacauuccgucaacuuacuggaagauaagcacaaugggaaacuauguaagcucagaggaguggcuccccugcaucuugguaaaugcaacauugccggcuggauacuggggaauccugagugugaaucuuugucaaccgcaaguagcugguccuacaucguugagacuucuucgucagacaacggaacaugcuauccaggcgauuuuauugacuacgaggagcucagggagcagcugagcaguguguccucuuucgaacgguuugagaucuucccgaagaccagcuccuggcccaaucacgauucaaacaagggugucacggccgcuuguccucaugcaggggccaaaaguuuuuauaagaaucugauuuggcucgugaaaaagggaaacagcuacccaaaauuaucuaaguccuauaucaaugacaagggcaaagaaguacugguucuuuggggcauacaccaccccucaacuagcgcugaucaacagaguuuguaccagaacgccgacgcguacguguucgucgggaccucucgcuauuccaagaaauuuaagccugagaucgcaauucgaccacgugugagagaucaggagggaaggaugaauuacuauuggacacugguggaacccggugacaaaaucacuuucgaggccaccggcaaccuagucguuccucgguacgcuuuugccauggaacgcgaugcagggagcggaauuaucauaucggacacaccagugcaugacugcaacaccacgugucaaacuccgaagggcgcuauuaauacaucucuccccuuccagaacauccacccuauuaccaucgguaaaugcccaaaguauguaaaguccacuaaacugagacuugccacagggcugaggaaugugcccucaauccagagucggggauuguuuggcgcgauugccggcuucauagaagggggauggaccgguauggucgauggcugguacggguaucaucaccagaacgaacaaggaagcggcuacgcagcugaccucaaguccacgcagaaugccaucgaugagauuaccaacaaaguuaauucugugaucgagaagaugaacacacaguuuacugcuguggguaaagaguucaaucaccuggaaaagcgcauagaaaacuuaaauaagaaaauugacgauggguuccuggacaucuggaccuacaacgccgagcuccuuguccuguuggaaaaugagcgaacacuagauuaucaugacagcaacgugaagaaucuguacgagaaaguaagaucacagcucaagaacaacgcaaaagaaaucggcaauggauguuuugaguucuaucacaagugcgauaacacuuguauggaaaguguuaagaauggcaccuacgacuauccuaaauacuccgaggaagccaagcugaacagggaggagauugauggggugaaacuugaaagcacacggaucuaucaaauucuggcuauauacucuaccgucgcgucaaguuuggugcucgucgugagccugggagcaaucuccuuuuggaugugcucuaaugguucguuacagugccguauuuguaucuga

SEQ ID NO: 132837 - RNA, 1701 nt, Artificial Sequence; identical to SEQ ID NO: 132833
  derived and/or modified CDS sequence (opt3) from hemagglutinin__InfluenzaA__ADG21930

SEQ ID NO: 132838 - RNA, 1701 nt, Artificial Sequence; identical to SEQ ID NO: 130959
  derived and/or modified CDS sequence (opt3) from hemagglutinin__InfluenzaA__ADG21931

SEQ ID NO: 132839 - RNA, 1701 nt, Artificial Sequence; identical to SEQ ID NO: 130959
  derived and/or modified CDS sequence (opt3) from hemagglutinin__InfluenzaA__ADG21932

SEQ ID NO: 132840 - RNA, 1701 nt, Artificial Sequence; identical to SEQ ID NO: 130959
  derived and/or modified CDS sequence (opt3) from hemagglutinin__InfluenzaA__ADG21933

SEQ ID NO: 132841 - RNA, 1701 nt, Artificial Sequence; identical to SEQ ID NO: 132833
  derived and/or modified CDS sequence (opt3) from hemagglutinin__InfluenzaA__ADG21934

SEQ ID NO: 132842 - RNA, 1701 nt, Artificial Sequence
  derived and/or modified CDS sequence (opt3) from hemagglutinin__InfluenzaA__ADG21935
auggaggccauccuggugguccuccuuuacaccuucgcuacagcaaacgccgacacucugugcauuggcuaucacgcgaauaacagcacggauaccguugacacaguguuggaaaagaauguaacugugacccauuccgucaacuuacuggaggauaaacacaaugggaagcuauguaaacucagaggaguggcuccccugcaucuugguaagugcaacauagccggcuggauccuggggaauccugaaugugagucuuugucaacagcaaguagcugguccuacauuguugaaaccucuucgucagacaacggaacuugcuauccaggcgauuuuaucgacuacgaggagcucagggaacagcugagcaguguguccucuuucgagcgguuugaaauuuucccgaaaacaagcuccuggcccaaucacgauucaaacaagggugucaccgccgcuuguccucaugcaggggccaagaguuuuuauaaaaaucugaucuggcucgugaagaaaggaaacagcuacccaaaguuaucuaaauccuauauaaaugacaagggcaaggagguacugguucuuuggggcauccaccaccccucaacgagcgcugaucaacagaguuuguaccagaacgccgacgcguacguguucgucgggucuucccgcuauagcaaaaaguuuaaaccugagauugcaauccgaccaaaggugcgugaucaggaaggaagaaugaauuacuauuggacucugguggagcccggugacaaaauuaccuucgaagccacaggcaaccuagucguuccuagguacgcuuuugccauggagcggaacgcagggucgggaaucauaauuucugauacuccagugcaugacugcaauaccaacugucaaacaccgaauggcgcuaucaacaccucccuccccuuccacaauauucauccuaucacgaucgguaagugcccaaaauauguaaagucaacuaagcugcgccuugccacagggcugagaaacgugcccaguauucagagcaggggauuguuuggcgcgauagccggcuucaucgaagggggauggaccgguauggucgacggcugguacggguaucaccaccagaaugagcagggauccggcuacgcagcugaucucaaaucuacucaaaacgccauugacgagaucacaaauaaggugaacagcguuauagaaaagaugaauacccaguuuacggcuguggguaaggaguucaaccaucuggaaaaacggauugagaauuuaaacaagaaggucgaugacggguuccuggauaucuggaccuacaaugccgaacuccuugugcuguuggagaacgagcgcacacuagacuaucacgauucaaacguuaaaaaucuguacgaaaagguacgaagucagcucaaaaacaaugcaaaggagaucggcaacggauguuuugaguucuaucauaaaugcgacaauacuuguauggaauccgugaagaacggcaccuacgauuauccuaaguacagcgaagaggccaaacugaauagagaggaaauugacggggucaaacuugagucuacaaggaucuaucagauucuggcuauauacucaacuguggcgaguagcuugguccucgugguuucccugggagcaaucucuuuuuggaugugcucgaacgguagcuuacaaugccggauuuguaucuga

SEQ ID NO: 132843 - RNA, 1701 nt, Artificial Sequence; identical to SEQ ID NO: 130959
  derived and/or modified CDS sequence (opt3) from hemagglutinin__InfluenzaA__ADG21936

SEQ ID NO: 132844 - RNA, 1701 nt, Artificial Sequence; identical to SEQ ID NO: 130959
  derived and/or modified CDS sequence (opt3) from hemagglutinin__InfluenzaA__ADG21937

SEQ ID NO: 132845 - RNA, 1701 nt, Artificial Sequence
  derived and/or modified CDS sequence (opt3) from hemagglutinin__InfluenzaA__ADG21938
auggaggccauccuggugguccuccuuuacaccuucgcuacagcaaacgccgacacucugugcauuggcuaucacgcgaauaacagcacggauaccguugacacaguguuggaaaagaauguaacugugacccauuccgucaacuuacuggaggauaaacacaaugggaagcuauguaaacucagaggaguggcuccccugcaucuugguaagugcaacauagccggcuggauccuggggaauccugaaugugagucuuugucaacagcaaguagcugguccuacauuguugaaaccucuucgucagacaacggaacuugcuauccaggcgauuuuaucgacuacgaggagcucagggaacagcugagcaguguguccucuuucgagcgguuugaaauuuucccgaaaacaagcuccuggcccaaucacgauucaaacaagggugucaccgccgcuuguccucaugcaggggccaagaguuuuuauaaaaaucugaucuggcucgugaagaaaggaaacagcuacccaaaguuaucuaaauccuauauaaaugacaagggcaaggagguacugguucuuuggggcauccaccaccccucaacgagcgcugaucaacagaguuuguaccagaacgccgacgcguacguguucgucgggucuucccgcuauagcaaaaaguuuaaaccugagauugcaauccgaccaaaggugcgugaucaggaaggaagaaugaauuacuauuggacucugguggagcccggugacaaaauuaccuucgaagccacaggcaaccuagucguuccuagguacgcuuuugccauggagcggaacgcagggucgggaaucauaauuucugauacuccagugcaugacugcaauaccacaugucaaaccccgaagggcgcuaucaacacgucccuccccuuccacaauauucauccuaucacuaucgguaaaugcccaaaguauguaaagucaacaaaacugcgccuugccaccgggcugagaaacgugcccaguauucagagcaggggauuguuuggcgcgauagccggcuucaucgaagggggauggacugguauggucgacggcugguacggguaucaccaccagaaugagcagggauccggcuacgcagcugaucucaagucuacacaaaacgccauugacgagaucaccaauaaagugaacagcguuauagaaaagaugaauacgcaguuuaccgcuguggguaaagaguucaaccaucuggaaaagcggauugagaauuuaaacaagaaagucgaugacggguuccuggauaucuggacauacaaugccgaacuccuugugcuguuggagaacgagcgcaaucuagacuaucacgauucaaacguaaagaaccuguacgaaaaaguucgaagucagcucaagaauaacgcaaaagagaucggcaauggauguuuugaguucuaucauaagugcgacaacacuuguauggaauccgugaagaauggcaccuacgauuauccuaaauacagcgaagaggccaagcugaacagagaggaaauugacggggucaaacuugagucuacaaggaucuaucagauucuggcuauauacucaacuguggcgaguagcuugguccucgugguuucccugggagcaaucucuuuuuggaugugcucgaaugguagcuuacaaugccggauuuguaucuga

SEQ ID NO: 132846 - RNA, 1701 nt, Artificial Sequence; identical to SEQ ID NO: 130959
  derived and/or modified CDS sequence (opt3) from hemagglutinin__InfluenzaA__ADG21939

SEQ ID NO: 132847 - RNA, 1701 nt, Artificial Sequence; identical to SEQ ID NO: 130959
  derived and/or modified CDS sequence (opt3) from hemagglutinin__InfluenzaA__ADG21940

SEQ ID NO: 132848 - RNA, 1701 nt, Artificial Sequence
  derived and/or modified CDS sequence (opt3) from hemagglutinin__InfluenzaA__ADG21941
auggaggccauccuggugguccuccuuuacaccuucgcuacagcaaacgccgacacucugugcauuggcuaucacgcgaauaacagcacggauaccguugacacaguguuggaaaagaauguaacugugacccauuccgucaacuuacuggaggauaaacacaaugggaagcuauguaaacucagaggaguggcuccccugcaucuugguaagugcaacauagccggcuggauccuggggaauccugaaugugagucuuugucaacagcaaguagcugguccuacauuguugaaaccucuucgucagacaacggaacuugcuauccaggcgauuuuaucgacuacgaggagcucagggaacagcugagcaguguguccucuuucgagcgguuugaaauuuucccgaaaacaagcuccuggcccaaucacgauucaaacaagggugucaccgccgcuuguccucaugcaggggccaagaguuuuuauaaaaaucugaucuggcucgugaagaaaggaaacagcuacccaaaguuaucuaaauccuauauaaaugacaagggcaaggagguacugguucuuuggggcauccaccaccccucaacgagcgcugaucaacagaguuuguaccagaacgccgacgcguacguguucgucgggucuucccgcuauagcaaaaaguuuaaaccugagauugcaauccgaccaaaggugcgugaucaggaaggaagaaugaauuacuauuggacucugguggagcccggugacaaaauuaccuucgaagccacaggcaaccuagucguuccuagguacgcuuuugccauggagcggaacgcagggucgggaaucauaauuucugauacuccagugcaugacugcaauaccacaugucaaaccccgaagggcgcuaucaacacgucccuccccuuccacaauauucauccuaucacuaucgguaaaugcccaaaguauguaaagucaacaaaacugcgccuugccaccgggcugagaaacgugcccaguauucagagcaggggauuguuuggcgcgauagccggcuucaucgaagggggauggacugguauggucgacggcugguacggguaucaccaccagaaugagcagggauccggcuacgcagcugaucucaagucuacacaaaacgccauugacgagaucaccaauaaagugaacagcguuauagaaaagaugaauacgcaguuuaccgcuguggguaaagaguucaaccaucuggaaaagcggauugagaauuuaaacaagaaaaucgaugacggguuccuggauaucuggacauacaaugccgaacuccuuguccuguuggagaacgagcgcacucuagacuaucacgauucaaaugugaagaaccuguacgaaaaaguacgaagucagcucaagaacaaugcaaaagagauuggcaacggauguuuugaguucuaucauaagugcgacaauaccuguauggaauccguuaagaacggcacauacgauuauccuaaauacagcgaagaggccaagcugaauagagaggaaaucgacggggugaaacuugagucuacuaggauuuaucagauacuggcuaucuacucaaccgucgcgaguagcuuggugcucgucgugucccugggagcaauuucuuuuuggaugugcucgaacgguagcuuacaaugccggaucuguaucuga

SEQ ID NO: 132849 - RNA, 1701 nt, Artificial Sequence
  derived and/or modified CDS sequence (opt3) from hemagglutinin__InfluenzaA__ADG21943
augaaggccauccuggugguccuccuuuacaccuucgcuacagcaaacgccgacacucugugcauuggcuaucacgcgaauaacagcacggauaccguugacacaguguuggagaagaauguaacugugacccauuccgucaacuuacuggaagauaagcacaaugggaaacuauguaagcucagaggaguggcuccccugcaucuugguaaaugcaacauagccggcuggauccuggggaauccugagugugaaucuuugucaacagcaaacaguuggagcuacauuguugagaccuccucuucggacaauggaacuugcuauccaggcgauuuuaucgacuacgaggagcucagggagcagcugucaagcgugaguuccuucgaacgguuugagauuuucccgaagacaucuagcuggcccaaccacgauuccaauaagggugucaccgccgcuuguccucaugcaggggccaaaucauuuuauaagaaccugaucuggcucgugaaaaagggaaauaguuacccaaaauuaagcaagucuuauauaaacgacaagggcaaagaaguacugguucuuuggggcauccaccaccccuccacgucagcugaucaacagagcuuguaccagaaugccgacgcguacguguucgucgggaccagucgcuauucuaagaaauuuaagccugagauugcaauccgaccaaaagugcgugaucaggagggaagaaugaacuacuauuggacucugguggaacccggugacaagauuacauucgaggccacuggcaaccuagucguuccuagguacgcuuuugccauggaacgggaugcaggguccggaaucauaauuagcgacaccccagugcaugacugcaauacaaccugucaaacgccgaaaggcgcuaucaacacuucgcuccccuuccagaauauucacccuaucacaaucgguaagugcccaaaguauguaaaaucuaccaagcugcgccuugccacugggcugagaaacgugcccuccauucagucaaggggauuguuuggcgcgauagccggcuucaucgaagggggauggacagguauggucgauggcugguacggguaucaucaccagaaugaacaaggaaguggcuacgcagcugaccucaaaagcacccagaacgccauugaugagaucacgaauaaggugaacuccguuauagagaaaaugaauacccaguuuacagcuguggguaaggaguucaaccaccuggaaaagcggauugaaaauuuaaacaaaaagaucgacgauggguuccuggacaucuggacuuacaaugccgagcuccuuguccuguuggaaaacgagcgcacccuagauuaucaugacucuaaugugaaaaaccuguacgagaagguacgaagccagcucaaaaacaaugcaaaggaaauuggcaacggauguuuugaguucuaucacaagugcgauaauacauguauggaaucaguuaaaaacggcacuuacgacuauccuaaguacagugaggaagccaaacugaauagagaggagaucgauggggugaaacuugaauccaccaggauuuaucaaauacuggcuaucuacagcacagucgcgucuucauuggugcucgucgugagucugggagcaauuagcuuuuggaugugcuccaacgguucuuuacagugccggaucuguaucuga

SEQ ID NO: 132850 - RNA, 1701 nt, Artificial Sequence
  derived and/or modified CDS sequence (opt3) from hemagglutinin__InfluenzaA__ADG21944
auggaggccauccugauugugcuccuuuacaccuucgcuacagcaaacgccgacacucugugcauaggcuaucacgcgaauaacagcacggauaccgucgacacaguuuuggaaaagaaugugacuguaacccauuccgugaacuuacuggaggauaaacacaaugggaagcuauguaaacucagaggagucgcuccccugcaucuugguaagugcaacaucgccggcuggauucuggggaauccugaaugugagucuuugucaacagcaaguagcugguccuacaucguggaaaccucuucgucagacaacggaacuugcuauccaggcgauuuuauugacuacgaggagcucagggaacagcugagcaguguuuccucuuucgagcgguuugaaaucuucccgaaaacaagcuccuggcccaaucacgauucaaacaagggugugaccgccgcuuguccucaugcaggggccaagaguuuuuauaaaaaucugauauggcucgucaagaaaggaaacagcuacccaaaguuaucuaaauccuauaucaaugacaagggcaaggaggugcugguacuuuggggcauucaccaccccucaacgagcgcugaucaacagaguuuguaccagaacgccgacgcguacguuuucguggggucuucccgcuauagcaaaaaguuuaaaccugagaucgcaauucgaccaaagguccgugaucaggaaggaagaaugaauuacuauuggacucugguggagcccggugacaaaaucaccuucgaagccacaggcaaccuaguggucccuagguacgcuuuugccauggagcggaacgcagggucgggaauaauuaucucugauacuccaguucaugacugcaauaccacaugucaaaccccgaagggcgcuauuaacacgucccuccccuuccacaauauccauccuaucacuauugguaaaugcccaaaguaugugaagucaacaaaacugcgccuugccaccgggcugagaaacguacccaguauacagagcaggggauuguuuggcgcgaucgccggcuucauugaagggggauggacugguaugguggacggcugguacggguaucaccaccagaaugagcagggauccggcuacgcagcugaucucaagucuacacaaaacgccaucgacgagauaaccaauaaagucaacagcgugauugaaaagaugaauacgcaguuuaccgcuguugguaaagaguucaaccaucuggaaaagcggaucgagaauuuaaacaagaaaguggaugacggguuccuggauaucuggacauacaaugccgaacuccuuguccuguuggagaacgagcgcacucuagacuaucacgauucaaaugugaagaaccuguacgaaaaaguacgaagucagcucaagaacaaugcaaaagagauuggcaacggauguuuugaguucuaucauaagugcgacaauaccuguauggaauccguuaagaacggcacauacgauuauccuaaauacagcgaagaggccaagcugaauagagaggaaaucgacggggugaaacuugagucuacuaggauuuaucagauacuggcuaucuacucaaccgucgcgaguagcuuggugcucgucgugucccugggagcaauuucuuuuuggaugugcucgaacgguagcuuacaaugccggaucuguaucuga

SEQ ID NO: 132851 - RNA, 1701 nt, Artificial Sequence; identical to SEQ ID NO: 130959
  derived and/or modified CDS sequence (opt3) from hemagglutinin__InfluenzaA__ADG21945

SEQ ID NO: 132852 - RNA, 1701 nt, Artificial Sequence; identical to SEQ ID NO: 130959
  derived and/or modified CDS sequence (opt3) from hemagglutinin__InfluenzaA__ADG21946

SEQ ID NO: 132853 - RNA, 1701 nt, Artificial Sequence; identical to SEQ ID NO: 130959
  derived and/or modified CDS sequence (opt3) from hemagglutinin__InfluenzaA__ADG21947

SEQ ID NO: 132854 - RNA, 1701 nt, Artificial Sequence
  derived and/or modified CDS sequence (opt3) from hemagglutinin__InfluenzaA__ADG21948
auggaggccauccuggugguccuccuuuacaccuucgcuacagcaaacgccgacacucugugcauuggcuaucacgcgaauaacagcacggauaccguugacacaguguuggaaaagaauguaacugugacccauuccgucaacuuacuggaggauaaacacaaugggaagcuauguaaacucagaggaguggcuccccugcaucuugguaagugcaacauagccggcuggauccuggggaauccugaaugugagucuuugucaacagcaaguagcugguccuacauuguugaaaccucuucgucagacaacggaacuugcuauccaggcgauuuuaucgacuacgaggagcucagggaacagcugagcaguguguccucuuucgagcgguuugaaauuuucccgaaaacaagcuccuggcccaaucacgauucaaacaagggugucaccgccgcuuguccucaugcaggggccaagaguuuuuauaaaaaucugaucuggcucgugaagaaaggaaacagcuacccaaaguuaucuaaauccuauauaaaugacaagggcaaggagguacugguucuuuggggcauccaccaccccucaacgagcgcugaucaacagaguuuguaccagaacgccgacgcguacguguucgucgggucuucccgcuauagcaaaaaguuuaaaccugagauugcaauccgaccaaaggugcgugaucaggaaggaagaaugaauuacuauuggacucugguggagcccggugacaaaauuaccuucgaagccacaggcaaccuagucguuccuagguacgcuuuugccauggagcggaacgcagggucgggaaucauaauuucugauacuccagugcaugacugcaauaccacaugucaaaccccgaagggcgcuaucaacacgucccuccccuuccacaauauucauccuaucacuaucgguaaaugcccaaaguauguaaagucaacaaaacugcgccuugccaccgggcugagaaacgugcccaguauucagagcaggggauuguuuggcgcgauagccggcuucaucgaagggggauggacugguauggucgacggcugguacggguaucaccaccagaaugagcagggauccggcuacgcagcugaucucaagucuacacaaaacgccauugacgagaucaccaauaaagugaacagcguuauagaaaagaugaauacgcaguuuaccgcuguggguaaagaguucaaccaucuggaaaagcggauugagaauuuaaacaagaaagucgaugacggguuccuggauaucuggacauacaaugccgaacuccuugugcuguuggagaacgagcgcacucuagaccaccaugauucaaauguaaagaaccuguaugaaaaaguucgaagucagcucaagaacaaugcaaaagagaucggcaacggauguuuugaguucuaccacaagugcgacaauaccuguauggaauccgugaagaacggcacauaugauuacccuaaauauagcgaagaggccaagcugaauagagaggaaauugacggggucaaacuugagucuacuaggaucuaccagauucuggcuauauauucaaccguggcgaguagcuugguccucgugguuucccugggagcaaucucuuuuuggaugugcucgaacgguagcuuacaaugccggauuuguaucuga

SEQ ID NO: 132855 - RNA, 1701 nt, Artificial Sequence
  derived and/or modified CDS sequence (opt3) from hemagglutinin__InfluenzaA__ADG27794
augaaggccauccuggugguccuccuuuacaccuucgcuacagcaaacgccgacacucugugcauuggcuaucacgcgaauaacagcacggauaccguugacacaguguuggagaaaaauguaacugugacccauuccgucaacuuacuggaagauaagcacaaugggaaacuauguaagcucagaggaguggcuccccugcaucuugguaaaugcaacauagccggcuggauccuggggaauccugagugugaaucuuugucaacagcaaguagcugguccuacauuguugagaccucuucgucagacaacggaacuugcuauccaggcgauuuuaucgacuacgaggagcucagggagcagcugagcaguguguccucuuucgaacgguuugagauuuucccgaagacaagcuccuggcccaaucacgauucaaacaagggugucaccgccgcuuguccucaugcaggggccaaaaguuuuuauaagaaucugaucuggcucgugaaaaagggaaacagcuacccaaaauuaucuaaguccuauauaaaugacaagggcaaagaaguacugguucuuuggggcauccaccaccccucaacgagcgcugaucaacagaguuuguaccagaacgccgacgcguacguguucgucgggacuucucgcuauuccaagaaauuuaagccugagauugcaauccgaccaaaagugcgugaucaggagggaagaaugaauuacuauuggacccugguggaacccggugacaagauuacauucgaggccacuggcaaccuagucguuccuagguacgcuuuugccauggaacggaacgcagggagcggaaucauaauuucggauaccccagugcaugacugcaauacaaccugucaaacgccgaaaggcgcuaucaacacuucucuccccuuccagaauauucacccuaucacaaucgguaagugcccaaaguauguaaaauccaccaagcugcgccuugccacugggcugagaaacgugcccucaauucagaguaggggauuguuuggcgcgauagccggcuucaucgaagggggauggacagguauggucgacggcugguacggguaucaucaccagaaugaacaaggaagcggcuacgcagcugaucucaaauccacccagaacgccauugacgagaucacgaauaaggugaacucuguuauagagaaaaugaauacccaguuuacagcuguggguaaggaguucaaccaccuggaaaagcggauugaaaauuuaaacaaaaaggucgaugacggguuccuggauaucuggacuuacaaugccgagcuccuugugcuguuggaaaacgagcgcacccuagacuaucaugauagcaauguaaagaaccuguacgagaagguucgaucacagcucaaaaacaaugcaaaggaaaucggcaacggauguuuugaguucuaucacaagugcgacaauacauguauggaaagugugaaaaacggcacuuacgauuauccuaaguacuccgaggaagccaaacugaauagagaggagauugacggggucaaacuugaaagcaccaggacauaucaaauccuggcuauuuacucuaccguggcgucaaguuugguccucgugguuagccugggagcaauauccuuuuggaugugcucuaacgguucguuacagugccggaucuguauuuga

SEQ ID NO: 132856 - RNA, 1701 nt, Artificial Sequence; identical to SEQ ID NO: 130704
  derived and/or modified CDS sequence (opt3) from hemagglutinin__InfluenzaA__ADG27948

SEQ ID NO: 132857 - RNA, 1701 nt, Artificial Sequence; identical to SEQ ID NO: 130704
  derived and/or modified CDS sequence (opt3) from hemagglutinin__InfluenzaA__ADG27966

SEQ ID NO: 132858 - RNA, 1701 nt, Artificial Sequence
  derived and/or modified CDS sequence (opt3) from hemagglutinin__InfluenzaA__ADG27974
augaaggccauccuggugguccuccuuuacaccuucgcuacagcaaacgccgacacucugugcauuggcuaucacgcgaauaacagcacggauaccguugacacaguguuggagaaaaauguaacugugacccauuccgucaacuuacuggaagauaagcacaaugggaaacuauguaagcucagaggaguggcuccccugcaucuugguaaaugcaacauagccggcuggauccuggggaauccugagugugaaucuuugucaacagcaaguagcugguccuacauuguugagaccucuucgucagacaacggaacuugcuauccaggcgauuuuaucgacuacgaggagcucagggagcagcugagcaguguguccucuuucgaacgguuugagauuuucccgaagacaagcuccuggcccaaucacgauucaaacaagggugucaccgccgcuuguccucaugcaggggccaaaaguuuuuauaagaaucugaucuggcucgugaaaaagggaaacagcuacccaaaauuaucuaaguccuauauaaaugacaagggcaaagaaguacugguucuuuggggcauccaccaccccucaacgagcgcugaucaacagaguuuguaccagaacgccgacgcguacguguucgucgggucuucccgcuauagcaagaaauuuaagccugagauugcaauccgaccaaaagugcgugaucaggagggaagaaugaauuacuauuggacucugguggaacccggugacaagauuaccuucgaggccacaggcaaccuagucguuccuagguacgcuuuugccauggaacggaacgcagggucgggaaucauaauuucugauacuccagugcaugacugcaauaccacaugucaaaccccgaaaggcgcuaucaacacgucccuccccuuccagaauauucacccuaucacuaucgguaagugcccaaaguauguaaaaucaacaaagcugcgccuugccaccgggcugagaaacgugcccaguauucagagcaggggauuguuuggcgcgauagccggcuucaucgaagggggauggacugguauggucgacggcugguacggguaucaucaccagaaugaacaaggauccggcuacgcagcugaucucaaaucuacacagaacgccauugacgagaucaccaauaaggugaacagcguuauagagaaaaugaauacgcaguuuaccgcuguggguaaggaguucaaccaccuggaaaagcggauugaaaauuuaaacaaaaaggucgaugacggguuccuggauaucuggacauacaaugccgagcuccuugugcuguuggaaaacgagcgcacucuagacuaucaugauucaaauguaaagaaccuguacgagaagguucgaagucagcucaaaaacaaugcaaaggaaaucggcaacggauguuuugaguucuaucacaagugcgacaauaccuguauggaauccgugaaaaacggcacauacgauuauccuaaguacagcgaggaagccaaacugaauagagaggagauugacggggucaaacuugaaucuacuaggaucuaucaaauucuggcuauauacucaaccguggcgaguagcuugauccucgucgugucccugggagcaauuucuuuuuggaugugcucgaacgguagcuuacagugccggaucuguaucuga

SEQ ID NO: 132859 - RNA, 1701 nt, Artificial Sequence
  derived and/or modified CDS sequence (opt3) from hemagglutinin__InfluenzaA__ADG27982
augaaggccauccuggugguccuccuuuacaccuucgcuacagcaaacgccgacacucugugcauuggcuaucacgcgaauaacagcacggauaccguugacacaguguuggagaaaaauguaacugugacccauuccgucaacuuacuggaagauaagcacaaugggaaacuauguaagcucagaggaguggcuccccugcaucuugguaaaugcaacauagccggcuggauccuggggaauccugagugugaaucuuugucaacagcaaguagcugguccuacauuguugagaccucuucgucagacaacggaacuugcuauccaggcgauuuuaucgacuacgaggagcucagggagcagcugagcaguguguccucuuucgaacgguuugagauuuucccgaagacaagcuccuggcccaaucacgauucaaacaagggugucaccgccgcuuguccucaugcaggggccaaaaguuuuuauaagaaucugaucuggcucgugaaaaagggaaacagcuacccaaaauuaucuaaguccuauauaaaugacaagggcaaagaaguacugguucuuuggggcauccaccaccccucaacgagcgcugaucaacagaguuuguaccagaacgccgacgcguacguguucgucgggucuucccgcuauagcaagaaauuuaagccugagauugcaauccgaccaaaagugcgugaucaggagggaagaaugaauuacuauuggacucugguggaacccggugacaagauuaccuucgaggccacaggcaaccuagucguuccuagguacgcuuuugccauggaacggaacgcagggucgggaaucauaauuucugauacuccagugcaugacugcaauaccacaugucaaaccccgaaaggcgcuaucaacacgucccuccccuuccagaauauucacccuaucacuaucgguaagugcccaaaguauguaaaaucaacaaagcugcgccuugccaccgggcugagaaacgugcccaguauucagagcaggggauuguuuggcgcgauagccggcuucaucgaagggggauggacugguauggucgacggcugguacggguaucaucaccagaaugaacaaggauccggcuacgcagcugaucucaaaucuacacagaacgccauugacgagaucaccaauaaggugaacagcguuauagagaaaaugaauacgcaguuuaccgcuguggguaaggaguucaaccaccuggaaaagcggauugaaaauuuaaacaaaaaggucgaugacggguuccuggauaucuggacauacaaugccgagcuccuugugcuguuggaaaacgagcgcacucuagacuaucaugauucaaauguuaaaaagcuguacgagaaaguacgaagucagcucaagaacaacgcaaaggaaaucggcaauggauguuuugaguucuaucacaaaugcgacaacaccuguauggaauccgugaagaauggcacauacgauuauccuaaauacagcgaggaagccaagcugaacagagaggagauugacggggucaaacuugaaucuacuaggaucuaucaaauucuggcuauauacucaaccguggcgaguagcuugguccucgugguuucccugggagcaaucucuuuuuggaugugcucgaaugguagcuuacagugccggauuuguaucuga

SEQ ID NO: 132860 - RNA, 1701 nt, Artificial Sequence; identical to SEQ ID NO: 130704
  derived and/or modified CDS sequence (opt3) from hemagglutinin__InfluenzaA__ADG27988

SEQ ID NO: 132861 - RNA, 1701 nt, Artificial Sequence; identical to SEQ ID NO: 130704
  derived and/or modified CDS sequence (opt3) from hemagglutinin__InfluenzaA__ADG27997

SEQ ID NO: 132862 - RNA, 1701 nt, Artificial Sequence; identical to SEQ ID NO: 130704
  derived and/or modified CDS sequence (opt3) from hemagglutinin__InfluenzaA__ADG28011

SEQ ID NO: 132863 - RNA, 1701 nt, Artificial Sequence; identical to SEQ ID NO: 132269
  derived and/or modified CDS sequence (opt3) from hemagglutinin__InfluenzaA__ADG42093

SEQ ID NO: 132864 - RNA, 1701 nt, Artificial Sequence; identical to SEQ ID NO: 131881
  derived and/or modified CDS sequence (opt3) from hemagglutinin__InfluenzaA__ADG42103

SEQ ID NO: 132865 - RNA, 1701 nt, Artificial Sequence; identical to SEQ ID NO: 131070
  derived and/or modified CDS sequence (opt3) from hemagglutinin__InfluenzaA__ADG42113

SEQ ID NO: 132866 - RNA, 1701 nt, Artificial Sequence; identical to SEQ ID NO: 132269
  derived and/or modified CDS sequence (opt3) from hemagglutinin__InfluenzaA__ADG42123

SEQ ID NO: 132867 - RNA, 1701 nt, Artificial Sequence
  derived and/or modified CDS sequence (opt3) from hemagglutinin__InfluenzaA__ADG42133
augaaggccauccuggugguccuccuuuacaccuucgcuacagcaaacgccgacacucugugcauuggcuaucacgcgaauaacagcacggauaccguugacacaguguuggagaagaauguaacugugacccauuccgucaacuuacuggaagauaagcacaaugggaaacuauguaagcucagaggaguggcuccccugcaucuugguaaaugcaacauagccggcuggauccuggggaauccugagugugaaucuuugucaacagcaaguagcugguccuacauuguugagaccucuucgucagacaacggaacuugcuauccaggcgauuuuaucgacuacgaggagcucagggagcagcugagcaguguguccucuuucgaacgguuugagauuuucccgaagacaagcuccuggcccaaucacgauucaaacaagggugucaccgccgcuuguccuuaugcaggggccaaaaguuuuuacaagaaucugaucuggcucgugaaaaagggaaacagcuauccaaaauuaucuaaguccuacauaaaugacaagggcaaagaaguacugguucuuuggggcauccaucaccccucaacgagcgcugaucaacagaguuuguaccagaacgccgacgcguauguguucgucgggacuucucgcuacuccaagaaauuuaagccugagauugcaauccgaccaaaagugcgugaucaggagggaagaaugaauuauuacuggacccugguggaacccggugacaagauuacauucgaggccacuggcaaccuagucguuccuagguaugcuuuugccauggaacggaacgcagggagcggaaucauaauuucggauaccccagugcacgacugcaauacaaccugucaaacgccgaaaggcgcuaucaacacuucucuccccuuccagaauauucauccuaucacaaucgguaagugcccaaaguacguaaaauccaccaagcugcgccuugugacugggcugagaaacguccccucaauucagaguaggggauuguuuggcgccauagcgggcuucaucgaagggggauggacagguaugguggacggcugguauggguaccaccaucagaaugaacaaggaagcggcuacgccgcagaucucaaauccacccagcacgcuauugacgagaucacgaacaagguuaauucugugauagagaaaaugaacacccaguuuacagccgucgguaaggaguucaaucaccuggaaaagcggauugaaaacuuaaauaaaaagguggaugacggguuccuggauaucuggacuuauaacgcugagcuccuuguacuguuggaaaaugagcgcacccuagacuaccaugauagcaacguuaaaaaucuguaugagaaggugcgaucacagcucaaaaacaacgccaaggaaaucggcaauggauguuuugaguucuaccacaagugcgacaacacauguauggaaagugucaaaaauggcacuuaugauuacccuaaguauuccgaggaagcaaaacugaacagagaggagauugacggggugaaacuugaaagcaccaggaucuaccaaauucuggccauauacucuacagucgcuucaaguuuggugcucguugugagccugggagcgaucuccuuuuggaugugcucuaaugguucguuacagugccggauuuguaucuga

SEQ ID NO: 132868 - RNA, 1701 nt, Artificial Sequence
  derived and/or modified CDS sequence (opt3) from hemagglutinin__InfluenzaA__ADG42143
augaaggccauccuggugguccuccuuuacaccuucgcuacagcaaacgccgacacucugugcauuggcuaucacgcgaauaacagcacggauaccguugacacaguguuggagaaaaauguaacugugacccauuccgucaacauauuagaagauaagcacaaugggaaacuguguaagcuaagaggaguggcuccccuccaucuggguaaaugcaacaucgccggcuggauucuugggaauccugagugugaaucucugucaacagcaaguagcugguccuacaucguugagaccucuucgucagacaacggaacuugcuauccaggcgauuuuauugacuacgaagaguugagggagcagcucagcaguguguccucuuucgaacgguuugagaucuucccgaagacaagcuccuggcccaaucacgauucaaacaagggugucaccgccgcuuguccucaugcaggggccaaaaguuuuuauaagaaucugauauggcuggugaaaaagggaaacagcuacccaaaacucucuaaguccuauaucaaugacaagggcaaagaaguauuaguucuguggggcauucaccaccccucaacgagcgcugaucaacagagucuuuaccagaacgccgacgcguacguguucgucgggucuucccgcuauagcaagaaauuuaagccugagaucgcaauucgaccaaaagugcgugaucaggagggaagaaugaauuacuauuggacuuugguggaacccggugacaagaucaccuucgaggccacaggcaaccuggucguuccuagguacgcuuuugccauggaaaagaacgcagggucgggaauaauuaucucugauacuccagugcaugacugcaauaccacaugucaaaccccgaaaggcgcuauuaacacgucccuacccuuccagaauauccacccuaucacuauugguaagugcccaaaauauguaaagucaacaaaacuccggcuggccaccgggcuucgcaacgugcccaguauacagagcagaggacuguuuggcgcgaucgccggcuucauugaagggggauggacugguauggucgacggcugguacggguaucaucaccagaaugaacaaggauccggcuacgcagcugauuugaagucuacacagaacgccaucgacgagauaaccaauaaagugaacagcguuauugagaagaugaauacgcaguuuaccgcuguggguaaggaguucaaccaccucgagaaaaggaucgaaaaucugaacaagaaagucgaugacggguucuuagauaucuggacauacaaugccgagcugcucgugcuucuggaaaacgagcggacuuuggacuaucaugauucaaauguaaagaaccuauacgagaaaguucgcagucagcugaagaacaaugcaaaggaagugggcaacggauguuuugaguucuaucacaaaugcgacaauaccuguauggaauccgucaagaacggcacauacgauuauccuaaauacagcgaggaagccaagcucaaucgagaggagauugacggggugaaacuggaaucuacuagaaucuaucaaauucuugcuauauacucaaccgcggcaaguagccuggucuuggugguuucccucggagccaucucuuuuuggaugugcucgaacgguagccugcagugcaggauuuguaucuga

SEQ ID NO: 132869 - RNA, 1701 nt, Artificial Sequence
  derived and/or modified CDS sequence (opt3) from hemagglutinin__InfluenzaA__ADG42153
augaaggccauccuggugguccuccuuuacaccuucgcuacagcaaacgccgacacucugugcauuggcuaucacgcgaauaacagcacggauaccguugacacaguguuggagaaaaauguaacugugacccauuccgucaacuuacuggaagauaagcacaaugggaaacuauguaagcucagaggaguggcuccccugcaucuugguaaaugcaacauagccggcuggauccuggggaauccugagugugaaucuuugucaacagcaaguagcugguccuacauuguugagaccucuucgucagacaacggaacuugcuauccaggcgauuuuaucgacuacgaggagcucagggagcagcugagcaguguguccucuuucgaacgguuugagauuuucccgaagacaagcuccuggcccaaucacgauucaaacaaggguaucaccgccgcuuguccucaugcaggggccaaaaguuuuuauaagaaucugauauggcucgucaaaaagggaaacagcuacccaaaauuaucuaaguccuauaucaaugacaagggcaaagaagugcugguacuuuggggcauucaccaccccucaacgagcgcugaucaacagaguuuguaccagaacgccgacgcguacguuuucguggggacuucucgcuauuccaagaaauuuaagccugagaucgcaauucgaccaaaaguccgugaucaggagggaagaaugaauuacuauuggacccugguggaacccggugacaagaucacauucgaggccacuggcaaccuaguggucccuagguacgcuuuugccauggaacggaacgcagggagcggaauaauuaucucggauaccccaguucucgacugcaauacaaccugucaaacgccgaaaggcgcuauuaacacuucucugcccuuccagaauauccauccuaucacaauugguaagugcccaaaguaugugaaauccaccaaacuucgccuggccacuggguugagaaacguacccucaauacagaguaggggacucuuuggcgcgaucgccggcuucauugaagggggauggacagguaugguggacggcugguacggguaucaccaucagaaugaacaaggaagcggcuacgcagcugaucugaaguccacccagaacgccaucgacgagauaacgaauaaggucaacucugugauugagaaaaugaauacccaguuuacagcuguugguaaggaguucaaccacuuagaaaagcggaucgaaaaucugaacaaaaagguggaugacggguuccucgauaucuggacuuacaaugccgagcuucuggucuugcuagaaaacgagcgcacccuggacuaucacgauagcaaugugaaaaaccucuacgagaagguacgaucacagcugaaaaacaaugcaaaggaaauuggcaacggauguuuugaguucuaucauaagugcgacaauacauguauggaaaguguuaaaaacggcacuuacgauuauccuaaguacuccgaggaagccaaacuuaauagagaggagaucgacggggugaagcuggaaagcaccaggauuuaucaaauauuggcuaucuacucuacagucgcgucaagucucgugcuggucgugagcuuaggagcaauuuccuuuuggaugugcucuaacgguucgcugcagugccggaucuguaucuga

SEQ ID NO: 132870 - RNA, 1701 nt, Artificial Sequence; identical to SEQ ID NO: 130717
  derived and/or modified CDS sequence (opt3) from hemagglutinin__InfluenzaA__ADG42193

SEQ ID NO: 132871 - RNA, 1701 nt, Artificial Sequence; identical to SEQ ID NO: 130717
  derived and/or modified CDS sequence (opt3) from hemagglutinin__InfluenzaA__ADG42213

SEQ ID NO: 132872 - RNA, 1701 nt, Artificial Sequence; identical to SEQ ID NO: 130717
  derived and/or modified CDS sequence (opt3) from hemagglutinin__InfluenzaA__ADG42233

SEQ ID NO: 132873 - RNA, 1701 nt, Artificial Sequence
  derived and/or modified CDS sequence (opt3) from hemagglutinin__InfluenzaA__ADG42243
augaaggccauccuggugguccuccuuuacaccuucgcuacagcaaacgccgacacucugugcauuggcuaucacgcgaauaacagcacggauaccguugacacaguguuggagaaaaauguaacugugacccauuccgucaacuuacuggaagauaagcacaaugggaaacuauguaagcucagaggaguggcuccccugcaucuugguaaaugcaacauagccggcuggauccuggggaauccugagugugaaucuuugucaacagcaaguagcugguccuacauuguugagaccucuucgucagacaacggaacuugcuauccaggcgauuuuaucgacuacgaggagcucagggagcagcugagcaguguguccucuuucgaacgguuugagauuuucccgaagacaagcuccuggcccaaucacgauucaaacaagggugucaccgccgcuuguccucaugcaggggccaaaaguuuuuauaagaaucugaucuggcucgugaaaaagggaaacagcuacccaaaauuaucuaaguccuauauaaaugacaagggcaaagaaguacugguucuuuggggcauccaccaccccucaacgagcgcugaucaacagaguuuguaccagaacgccgacgcguacguguucgucgggacuucucgcuauuccaagaaauuuaagccugagauugcaauccgaccaaaagugcgugaucaggagggaagaaugaauuacuauuggacccugguggaacccggugacaagauuacauucgaggccacuggcaaccuagucguuccuagguacgcuuuugccauggaacggaacgcagggagcggaaucauaauuucggauaccccagugcucgacugcaauacaaccugucaaacgccgaaaggcgcuaucaacacuucucugcccuuccagaauauucauccuaucacaaucgguaagugcccaaaguauguaaaauccaccaaacuucgccuggccacuggguugagaaacgugcccucaauucagaguaggggacucuuuggcgcgauagccggcuucaucgaagggggauggacagguauggucgacggcugguacggguaucaccaucagaaugaacaaggaagcggcuacgcagcugaucugaaguccacccagcacgccauugacgagaucacgaacaagguaaauucuguuauagagaaaaugaacacccaguuuacagcuguggguaaggaguucaaucacuuagaaaagcggauugaaaaccugaauaaaaaggucgaugacggguuccucgauaucuggacuuacaacgccgagcuucugguguugcuagaaaaugagcgcacccuggacuaucaugauagcaacgugaaaaaucucuacgagaagguucgaucacagcugaaaaacaacgcaaaggaaaucggcaauggauguuuugaguucuaucacaagugcgacaacacauguauggaaagugugaaaaauggcacuuacgauuauccuaaguacuccgaggaagccaaacuuaacagagaggagauugacggggucaagcuggaaagcaccaggaucuaucaaauuuuggcuauauacucuacaguggcgucaagucucguccuggugguuagcuuaggagcaaucuccuuuuggaugugcucuaaugguucgcugcagugccggauuuguaucuga

SEQ ID NO: 132874 - RNA, 1701 nt, Artificial Sequence; identical to SEQ ID NO: 132137
  derived and/or modified CDS sequence (opt3) from hemagglutinin__InfluenzaA__ADG42253

SEQ ID NO: 132875 - RNA, 1701 nt, Artificial Sequence; identical to SEQ ID NO: 130717
  derived and/or modified CDS sequence (opt3) from hemagglutinin__InfluenzaA__ADG42263

SEQ ID NO: 132876 - RNA, 1701 nt, Artificial Sequence; identical to SEQ ID NO: 131818
  derived and/or modified CDS sequence (opt3) from hemagglutinin__InfluenzaA__ADG42273

SEQ ID NO: 132877 - RNA, 1701 nt, Artificial Sequence; identical to SEQ ID NO: 131818
  derived and/or modified CDS sequence (opt3) from hemagglutinin__InfluenzaA__ADG42283

SEQ ID NO: 132878 - RNA, 1701 nt, Artificial Sequence; identical to SEQ ID NO: 132400
  derived and/or modified CDS sequence (opt3) from hemagglutinin__InfluenzaA__ADG42293

SEQ ID NO: 132879 - RNA, 1701 nt, Artificial Sequence
  derived and/or modified CDS sequence (opt3) from hemagglutinin__InfluenzaA__ADG42303
augaaggccauccuggugguccuccuuuacaccuucgcuacagcaaacgccgacacucugugcauuggcuaucacgcgaauaacagcacggauaccguugacacaguguuggagaaaaauguaacugugacccauuccgucaacuuacuggaagauaagcacaaugggaaacuauguaagcucaaaggaguggcuccccugcaucuugguaagugcaacauagccggcuggauccuggggaauccugagugugaaucuuugucaacagcaaguagcugguccuacauuguugagaccucuucgucagacaacggaacuugcuauccaggcgauuuuaucgacuacgaggagcucagagagcagcugagcaguguguccucuuucgaaagguuugagauuuucccgaagacaagcuccuggcccaaucacgauucaaacaaaggugucaccgccgcuuguccucaugcaggggccaagaguuuuuauaaaaaucugaucuggcucgugaagaaaggaaacagcuacccaaaguuaucuaaguccuauauaaaugacaaaggcaaggaaguacugguucuuuggggcauccaccaccccucaacgagcgcugaucaacagaguuuguaccagaacgccgacgcguacguguucgucgggacuucucgguauuccaaaaaguuuaaaccugagauugcaauccgcccaaaggugcgagaucaggagggacguaugaauuacuauuggacccugguggaacccggugacaaaauuacauucgaggccacuggcaaccuagucguuccuagauacgcuuuugccauggaaaggaacgcagggagcggaaucgugauaucggauaccccaguacaugacugcaauacaaccugucaaacgccgaagggcgcuauuaacacuucucuccccuuccagaauauccacccuauuacaaucgguaagugcccaaaauaugugaaguccaccaaacugcggcuugccacugggcugcgcaacguccccucaauccagaguagaggauuguuuggcgcgauugccggcuucauagaagggggauggacagguaugguggacggcugguacggguaucaucaccagaaugaacaaggaagcggcuacgcagcugaucucaaguccacccagaacgccaucgacgagauuacgaauaaaguuaacucugugaucgagaagaugaauacccaguuuacagcugucgguaaggaauuuaaccaccuggagaaaaggauagaaaauuuaaacaagaaaguggaugacggguuccuggauauuuggacuuacaaugccgagcuccuuguacuguuggaaaacgagcggacccuagacuaucaugauagcaauguuaagaaccuguacgagaaagugcgcucacagcucaagaacaaugcaaaggaaaucggcaacggauguuucgaguucuaucacaaaugcgacaauacauguauggaaagugucaagaacggcacuuacgauuauccuaaauacuccgaggaagccaagcugaaucgagaggagaucgacggggugaaacuugaaagcaccagaauuuaucaaauccuggcuauuuacucuacagucgcgucaaguuuggugcucguugugagccugggagcaauauccuuuuggaugugcucuaacgguucguuacagugcaggaucuguauuuga

SEQ ID NO: 132880 - RNA, 1701 nt, Artificial Sequence; identical to SEQ ID NO: 132427
  derived and/or modified CDS sequence (opt3) from hemagglutinin__InfluenzaA__ADG42313

SEQ ID NO: 132881 - RNA, 1701 nt, Artificial Sequence
  derived and/or modified CDS sequence (opt3) from hemagglutinin__InfluenzaA__ADG42323
augaaggccauccuggugguccuccuuuacaccuucgcuacagcaaacgccgacacucugugcauuggcuaucacgcgaauaacagcacggauaccguugacacaguguuggagaaaaauguaacugugacccauuccgucaacuuacuggaagauaagcacaaugggaaacuauguaagcucagaggaguggcuccccugcaucuugguaaaugcaacauagccggcuggauccuggggaauccugagugugaaucuuugucaacagcaaguagcugguccuacauuguugagaccucuucgucagacaacggaacuugcuauccaggcgauuuuaucgacuacgaggagcucagggagcagcugagcaguguguccucuuucgaacgguuugagauguucccgaagacaagcuccuggcccaaucacgauucaaacaagggugucaccgccgcuuguccucaugcaggggccaaaaguuuuuauaagaaucugauuuggcucgugaaaaagggaaacagcuacccaaaauuaucuaaguccuauaucaaugacaagggcaaagaaguacugguucuuuggggcauacaccaccccucaacgagcgcugaucaacagaguuuguaccagaacgccgacgcguacguguucgucgggacuucucgcuauuccaagaaauuuaagccugagaucgcaauucgaccaaaagugcgugaucaggagggaagaaugaauuacuauuggacccugguggaacccggugacaagaucacauucgaggccacuggcaaccuagucguuccuagguacgcuuuugccauggaacggaacgcagggagcggaauuaucauaucggauaccccagugcaugacugcaauacaaccugucaaacgccgaaaggcgcuauuaacacuucucuccccuuccagaauauccacccuauuacaaucgguaagugcccaaaguauguaaaauccaccaagcugcgccuugccacugggcugagaaacgugcccucaauccagaguaggggauuguuuggcgcgauugccggcuucauagaagggggauggacagguauggucgacggcugguacggguaucaucaccagaaugaacaaggaagcggcuacgcagcugaucucaaauccacccagaacgccaucgacgagauuacgaauaaggugaacucuguuaucgagaaaaugaauacccaguuuacagcuguggguaaggaguucaaccaccuggaaaagcggauagaaaauuuaaacaaaaaggucgaugacggguuccuggauauuuggacuuacaaugccgagcuccuugugcuguuggaaaacgagcgcacccuagacuaucaugauagcaauguaaagaaccuguacgagaagguucgaucacagcucaaaaacaaugcaaaggaagugggcaacggauguuuugaguucuaucacaagugcgacaauacauguauggaaagugucaaaaacggcacuuacgauuauccuaaguacuccgaggaagccaaacugaauagagaggagaucgacggggugaaacuugaaagcaccaggaucuaucaaauucuggcuaucuacucuacagucgcgucaaguuuggugcucguugugagccugggagcaauuuccuuuuggaugugcucuaacgguucguuacagugccggauauguaucuga

SEQ ID NO: 132882 - RNA, 1701 nt, Artificial Sequence
  derived and/or modified CDS sequence (opt3) from hemagglutinin__InfluenzaA__ADG42333
augaaggccauccuggugguccuccuuuacacccuggcuacagcaaacgccgacacuuugugcauuggcuaucacgcgaauaacagcacggauaccguugacacaguguuagagaaaaauguaacugugacccauuccgucaaccugcuagaagauaagcacaaugggaaacucuguaagcugagaggaauagcuccccuucaucuggguaaaugcaacaucgccggcuggauuuuggggaauccugagugugaaucucucucaacagcaaguagcugguccuacaucguggagaccucuucgucagacaacggaacuugcuauccaggcgauuucauugacuacgaggagcugagggagcagcugagcaguguuuccucuuuugaacgguucgagaucuuuccgaagacaagcuccuggcccaaucacgauucaaacaagggugugaccgccgcuuguccucaugcaggggccaaaaguuucuauaagaaucucauaugguuagucaaaaagggaaacagcuacccaaaacugucuaaguccuauaucaaugacaagggcaaagaagugcuuguauuguggggcauucaccaccccucaacgagcgcugaucaacagagucuguaccagaacgccgacgcguacguuuuuguggggacuucucgcuauuccaagaaauucaagccugagaucgcaauucgaccaaaaguccgugaucaggagggaagaaugaauuacuauuggacccuaguggaacccggugacaagaucacauuugaggccacuggcaaccucguggucccuagguacgcuuucgccauggaacggaacgcagggagcggaauaauuaucucggaugcuccaguucaugacugcaauaccacaugucaaaccccgaaaggcgccauuaacacgucucugcccuuucagaauauccacccuaucacuauugguaagugcccaaaguaugugaaauccacaaaacuucgccuggcgaccggguugagaaacguacccucaauacagaguaggggacucuucggcgccaucgcaggcuuuauugaagggggauggacugguaugguggacggcugguacggguaucaucaccagaaugaacaaggaagcggcuacgcugccgaucugaaguccacacagaacgcuaucgacgagauaaccaauaaggucaacucugugauugagaaaaugaauacgcaguucaccgccguugguaaggaauuuaaccacuuagagaagcggaucgaaaaucugaacaaaaagguggaugacggguuccucgauaucuggacauacaaugcagagcuucuggucuugcuagaaaacgagcgcacucuggacuaucaugauagcaaugugaaaaaccucuacgagaagguacgaucacagcugaaaaacaaugccaaggaaauuggcaacggauguuucgaguuuuaucacaagugcgacaauaccuguauggaaaguguuaaaaacggcacauacgauuauccuaaguacuccgaggaagcuaaacuuaauagagaggagaucgacggggugaagcuggaaagcacuaggauuuaucaaauauuggcgaucuacucuaccgucgcaucaagucucgugcuggucgugagcuuaggagccauuuccuucuggaugugcucuaacgguucgcugcagugccggaucuguaucuga

SEQ ID NO: 132883 - RNA, 1701 nt, Artificial Sequence
  derived and/or modified CDS sequence (opt3) from hemagglutinin__InfluenzaA__ADG42343
augaaggccauccuggugguccuccuuuacaccuucgcuacagcaaacgccgacacucugugcauuggcuaucacgcgaauaacagcacggauaccguugacacaguguuggagaaaaauguaacugugacccauuccgucaacuuacuggaagauaagcacaaugggaaacuauguaagcucagaggaguggcuccccugcaucuugguaaaugcaacauagccggcuggauccuggggaauccugagugugaaucuuugucaacagcaaguagcugguccuacauuguugagaccucuucgucagacaacggaacuugcuauccaggcgauuuuaucgacuacgaggagcucagggagcagcugagcaguguguccucuuucgaacgguuugagauuuucccgaagacaagcuccuggcccaaucacgauucaaacaagggugucaccgccgcuuguccucaugcaggggccaaaaguuuuuauaagaaucugaucuggcucgugaaaaagggaaacagcuacccaaaauuaucuaaguccuauauaaaugacaagggcaaagaaguacugguucuuuggggcauccaccaccccucaacgagcgcugaucaacagaguuuguaccagaacgccgacgcguacguguucgucgggacuucucgcuauuccaagaaauuuaagccugagauugcaauccgaccaaaagugcgugaucaggagggaagaaugaauuacuauuggacccugguggaacccggugacaagauuacauucgaggccacuggcaaccuagucguuccuagguacgcuuuugccauggaaagcaacgcagggucgggaaucauaauuucugauaccccagugcaugacugcaauacaaccugucaaacgccgaaaggcgcuaucaacacuucccuccccuuccagaauauucacccuaucacaaucgguaagugcccaaaguauguaaaaucaaccaagcugcggcuugccacugggcugcgcaacgugcccaguauucagagcagaggauuguuuggcgcgauagccggcuucaucgaagggggauggacagguauggucgacggcugguacggguaucaucaccagaaugaacaaggauccggcuacgcagcugaucucaaaucuacccagcacgccauugacgagaucacgaacaaggugaauagcguuauagagaaaaugaacacccaguuuacagcuguggguaaggaguucaaucaucuggaaaagaggauugaaaacuuaaauaaaaaggucgaugacggguuccuggauaucuggacuuacaacgccgagcuccuugugcuguuggaaaaugagcggacccuagacuaucacgauucaaacguaaagaaucuguacgagaagguucgcagucagcucaaaaacaacgcaaaggaaaucggcaauggauguuuugaguucuaucauaagugcgacaacacauguauggaauccgugaaaaauggcacuuacgauuauccuaaguacagcgaggaagccaaacugaaccgagaggagauugacggggucaaacuugaaucuaccagaaucuaucaaauucuggcuauauacucaacaguggcgaguagcuugguccucgugguuucccugggagcaaucucuuuuuggaugugcucgaaugguagcuuacagugcaggauuuguaucuga

SEQ ID NO: 132884 - RNA, 1701 nt, Artificial Sequence
  derived and/or modified CDS sequence (opt3) from hemagglutinin__InfluenzaA__ADG42363
augaaggccauccuggugguccuccuuuacaccuucgcuacagcaaacgccgacacucugugcauuggcuaucacgcgaauaacagcacggauaccguugacacaguguuggagaagaauguaacugugacccauuccgucaacuuacuggaagauaagcacaaugggaaacuauguaagcucagaggaauagcuccccugcaucuugguaaaugcaacaucgccggcuggauucuggggaauccugagugugaaucuuugucaacagcaaguagcugguccuacaucguggagaccucuucgucagacaacggaacuugcuauccaggcgauuuuauugacuacgaggagcucagggagcagcugagcaguguuuccucuuucgaacgguuugagaucuucccgaagacaagcuccuggcccaaucacgauucaaacaagggugugaccgccgcuuguccucaugcaggggccaaaaguuuuuauaagaaucugauauggcucgucaaaaagggaaacagcuacccaaaauuaucuaaguccuauaucaaugacaagggcaaagaagugcugguacuuuggggcauucaccaccccucaacgagcgcugaucaacagaguuuguaccagaacgccgacgcguacguuuucguggggacuucucgcuauuccaagaaauuuaagccugagaucgcaauucgaccaaaaguccgugaucaggagggaagaaugaauuacuauuggacccugguggaacccggugacaagaucacauucgaggccacuggcaaccuaguggucccuagguacgcuuuugccauggaacggaacgcagggagcggaauaauuaucucggauaccccaguucaugacugcaauacaaccugucaaacgccgaaaggcgcuauuaacacuucucuccccuuccagaauauccacccuaucacaauugguaagugcccaaaguaugugaaauccaccaagcugcgccuugccacugggcugagaaacguacccucaauacagaguaggggauuguuuggcgcgaucgccggcuucauugaagggggauggacagguaugguggacggcugguacggguaucaucaccagaaugaacaaggaagcggcuacgcagcugaucucaaauccacccagaacgccaucgacgagauaacgaauaaggucaacucugugauugagaaaaugaauacccaguuuacagcuguugguaaggaguucaaccaccuggaaaagcggaucgaaaauuuaaacaaaaagguggaugacggguuccuggauaucuggacuuacaaugccgagcuccuuguccuguuggaaaacgagcgcacccuagacuaucaugauagcaaugugaaaaaccuguacgagaagguacgaucacagcucaaaaacaaugcaaaggaaauuggcaacggauguuuugaguucuaucacaagugcgacaauacauguauggaaaguguuaaaaacggcacuuacgauuauccuaaguacuccgaggaagccaaacugaauagagaggagaucgacggggugaaacuugaaagcaccaggauuuaucaaauacuggcuaucuacucuacagucgcgucaaguuuggugcucgucgugagccugggagcaauuuccuuuuggaugugcucuaacgguucguuacagugccggaucuguaucuga

SEQ ID NO: 132885 - RNA, 1701 nt, Artificial Sequence
  derived and/or modified CDS sequence (opt3) from hemagglutinin__InfluenzaA__ADG42373
augaaggccauccuggugguccuccuuuacaccuucgcuacagcaaacgccgacacucugugcauuggcuaucacgcgaauaacagcacggauaccguugacacaguguuggagaaaaauguaacugugacccauuccgucaacuuacuggaagauaagcacaaugggaaacuauguaagcucagaggaguggcuccccugcaucuugguaaaugcaacauagccggcuggauccuggggaauccugagugugaaucuuugucaacagcaaguagcugguccuacauuguugagaccucuucgucagacaacggaacuugcuauccaggcgauuuuaucgacuacgaggagcucagggagcagcugagcaguguguccucuuucgaacgguuugagauuuucccgaagacaagcuccuggcccaaucacgauucaaacaagggugucaccgccgcuuguccucaugcaggggccaaaaguuuuuauaagaaucugaucuggcucgugaaaaagggaaacagcuacccaaaauuaucuaaguccuauauaaaugacaagggcaaagaaguacugguucuuuggggcauccaccaccccucaacgagcgcugaucaacagaguuuguaccagaacgccgacgcguacguguucgucgggacuucucgcuauuccaagaaauuuaagccugagauugcaauccgaccaaaagugcgugaucaggagggaagaaugaauuacuauuggacccugguggaacccggugacaagauuacauucgaggccacuggcaaccuagucguuccuagguacgcuuuugccauggaacggaacgcagggagcggaaucauaauuucggauaccccagugcaugacugcaauacaaccugucaaacgccgaaaggcgcuaucaacacuucucuccccuuccagaauauucacccuaucacaaucgguaagugcccaaaguauguaaaauccaccaagcugcgccuugccacugggcugagaaacgugcccucaauucagaguaggggauuguuuggcgcgauagccggcuucaucgaagggggauggacagguauggucgacggcugguacggguaucaucaccagaaugaacaaggaagcggcuacgcagcugaucucaaauccacccagaacgccauugacgagaucacgaauaaggugaacucuguuauagagaaaaugaauacccaguuuacagcuguggguaaggaguucaaccaccuggaaaagcggauugaaaauuuaaacaaaaaggucgaugacggguuccuggauaucuggacuuacaaugccgagcuccuugugcuguuggaaaacgagcgcacccuagacuaucaugauagcaauguaaagaaccuguacgagaagguucgaaaccagcucaaaaauaacgcaaaggaaaucggcaauggauguuuugaguucuaucacaagugcgacaacacauguauggaaucagugaaaaauggcacuuacgauuauccuaaguacagugaggaagccaaacugaacagagaggagauugacggggucaaacuugaauccaccaggaucuaucaaauucuggcuauauacagcacaguggcgucuucauugguccucgugguuagucugggagcaaucagcuuuuggaugugcuccaaugguucuuuacagugccggauuuguaucuga

SEQ ID NO: 132886 - RNA, 1701 nt, Artificial Sequence
  derived and/or modified CDS sequence (opt3) from hemagglutinin__InfluenzaA__ADG42393
augaaggccauccuggugguccuccuuuacaccuucgcuacagcaaacgccgacacucugugcauuggcuaucacgcgaauaacagcacggauaccguugacacaguguuggagaaaaauguaacugugacccauuccgucaacuuacuggaagauaagcacaaugagaaacuauguaagcucagagggguggcuccccugcaucuuggaaaaugcaacauagccgguuggauccugggcaauccugaaugugagucuuugucaacagcaaguagcugguccuacauuguugaaaccucuucgucagacaacgggacuugcuauccaggagauuuuaucgacuacgaggagcucagggaacagcugagcaguguguccucuuucgagcgguuugaaauuuucccgaagacaagcuccuggcccaaucacgauucaaacaagggcgucaccgccgcuuguccucaugccggugcaaaaaguuuuuauaagaaucugaucuggcucgugaaaaaggggaacagcuacccaaaauuaucuaaguccuauauaaaugacaagggaaaagagguacugguucuuuggggcauccaccaccccucaacgagcgcugaucaacagaguuuguaccagaacgccgacgcguacguguucgucggcacuucucgcuauuccaagaaauuuaagccugagauugcaauccgaccaaaagugcgugaacaggaggggagaaugaauuacuauuggacccugguggaacccggagauaagauuacauucgaggccacugguaaccuagucguuccuagguacgcuuuugccauggaacggaacgcaggcagcgggaucauaauuucggacaccccagugcaugauugcaauacaaccugucaaacgccgaaaggagcuaucaacacuucucuccccuuccagaauauucacccuaucacaaucggcaagugcccaaaguauguaaaauccaccaagcugcgccuugccacuggucugagaaacgugcccucaauucagaguaggggguuguuuggagcgauagccggcuucaucgagggcggguggacaggaauggucgacgguugguacggcuaucaucaccagaaugagcaagggagcggauacgcagcugaccucaaauccacccagaacgccauugaugaaaucacgaauaaggugaacucuguuauagagaaaaugaauacccaguuuacagcugugggcaaggaguucaaccaccuggaaaagcggauugaaaauuuaaacaaaaaggucgacgaugguuuccuggacaucuggacuuacaaugccgagcuccuugugcuguuggagaacgaacgcacccuagauuaucaugacagcaauguaaagaaccuguacgagaagguucgaucacagcucaaaaacaaugcaaaggaaaucgggaacggcuguuuugaguucuaucacaagugcgauaauacauguauggaaagugugaaaaacggaacuuacgacuauccuaaguacuccgaggaggccaaacugaauagagaagagauugauggcgucaaacuugaaagcaccaggaucuaucaaauucuggcuauauacucuacaguggcgucaaguuugguccuccuggugagcuuaggggcaaucuccuuuuggaugugcucuaacggaucgcugcagugccggauuuguaucuga

SEQ ID NO: 132887 - RNA, 1701 nt, Artificial Sequence; identical to SEQ ID NO: 131881
  derived and/or modified CDS sequence (opt3) from hemagglutinin__InfluenzaA__ADG42403

SEQ ID NO: 132888 - RNA, 1701 nt, Artificial Sequence; identical to SEQ ID NO: 132137
  derived and/or modified CDS sequence (opt3) from hemagglutinin__InfluenzaA__ADG42413

SEQ ID NO: 132889 - RNA, 1701 nt, Artificial Sequence; identical to SEQ ID NO: 132884
  derived and/or modified CDS sequence (opt3) from hemagglutinin__InfluenzaA__ADG42423

SEQ ID NO: 132890 - RNA, 1701 nt, Artificial Sequence; identical to SEQ ID NO: 132137
  derived and/or modified CDS sequence (opt3) from hemagglutinin__InfluenzaA__ADG42443

SEQ ID NO: 132891 - RNA, 1701 nt, Artificial Sequence
  derived and/or modified CDS sequence (opt3) from hemagglutinin__InfluenzaA__ADG42453
augaaggccauccuggugguccuccuuuacaccuucgcuacagcaaacgccgacacucugugcauuggcuaucacgcgaauaacagcacggauaccguugacacaguguuggagaaaaauguaacugugacccauuccgucaacauauuagaagauaagcacaaugggaaacuguguaagcuaagaggaguggcuccccuccaucuggguaaaugcaacaucgccggcuggauucuugggaauccugagugugaaucucugucaacagcaaguagcugguccuacaucguugagaccucuucgucagacaacggaacuugcuauccaggcgauuuuauugacuacgaagaguugagggagcagcucagcaguguguccucuuucgaacgguuugagaucuucccgaagacaagcuccuggcccaaucacgauucaaacaagggugucaccgccgcuuguccucaugcaggggccaaaaguuuuuauaagaaucugauauggcuggugaaaaagggaaacagcuacccaaaacucucuaaguccuauaucaaugacaagggcaaagaaguauuaguucuguggggcauucaccaccccucaacgagcgcugaucaacagagucuuuaccagaacgccgacgcguacguguucgucgggacuucucgcuauuccaagaaauuuaagccugagaucgcaauucgaccaaaagugcgugaucaggagggaagaaugaauuacuauuggaccuugguggaacccggugacaagaucacauucgaggccacuggcaaccuggucguuccuagguacgcuuuugccauggaacggaacgcagggagcggaauaauuaucucggauaccccagugcaugacugcaauacaaccugucaaacgccgaaaggcgcuauuaacacuucucuacccuuccagaauauccacccuaucacaauugguaagugcccaaaguauguaaaauccaccaagcuccgccuggccacugggcuuagaaacgugcccucaauacagaguaggggacuguuuggcgcgaucgccggcuucauugaagggggauggacagguauggucgacggcugguacggguaucaucaccagaaugaacaaggaagcggcuacgcagcugauuugaaauccacccagaacgccaucgacgagauaacgaauaaggugaacucuguuauugagaaaaugaauacccaguuuacagcuguggguaaggaguucaaccaccucgagaagcgggucgaaaaucugaacaaaaagguggaugacggguucuuagauaucuggacuuacaaugccgagcugcucguacuucuggaaaacgagcgcaccuuggacuaucaugauagcaauguuaaaaaccuauacgagaaggugcgaucacagcugaaaaacaaugcaaaggaaaucggcaacggauguuuugaguucuaucacaagugcgacaauacauguauggaaagugucaaaaacggcacuuacgauuauccuaaguacuccgaggaagccaaacucaauagagaggagauugacggggugaagcuggaaagcaccaggaucuaucaaauucuugcuauauacucuacagucgcgucaagucugguguugguugugagccucggagcaaucuccuuuuggaugugcucuaacgguucgcugcagugccggauuuguaucuga

SEQ ID NO: 132892 - RNA, 1701 nt, Artificial Sequence; identical to SEQ ID NO: 131070
  derived and/or modified CDS sequence (opt3) from hemagglutinin__InfluenzaA__ADG42463

SEQ ID NO: 132893 - RNA, 1701 nt, Artificial Sequence; identical to SEQ ID NO: 130717
  derived and/or modified CDS sequence (opt3) from hemagglutinin__InfluenzaA__ADG42473

SEQ ID NO: 132894 - RNA, 1701 nt, Artificial Sequence; identical to SEQ ID NO: 132137
  derived and/or modified CDS sequence (opt3) from hemagglutinin__InfluenzaA__ADG42483

SEQ ID NO: 132895 - RNA, 1701 nt, Artificial Sequence; identical to SEQ ID NO: 132269
  derived and/or modified CDS sequence (opt3) from hemagglutinin__InfluenzaA__ADG42493

SEQ ID NO: 132896 - RNA, 1701 nt, Artificial Sequence; identical to SEQ ID NO: 132330
  derived and/or modified CDS sequence (opt3) from hemagglutinin__InfluenzaA__ADG42503

SEQ ID NO: 132897 - RNA, 1701 nt, Artificial Sequence; identical to SEQ ID NO: 131818
  derived and/or modified CDS sequence (opt3) from hemagglutinin__InfluenzaA__ADG42513

SEQ ID NO: 132898 - RNA, 1701 nt, Artificial Sequence
  derived and/or modified CDS sequence (opt3) from hemagglutinin__InfluenzaA__ADG42533
augaaggccauccuggugguccuccuuuacaccuucgcuacagcaaaagccgacacucugugcauuggcuaucacgcgaacaauagcacggauaccguugacacaguguuggagaagaacguaacugugacccauuccgucaauuuacuggaagauaaacacaacgggaagcuauguaaacucagaggaguggcuccccugcaucuugguaagugcaauauagccggcuggauccuggggaacccugagugugaaucuuugucaacagcaaguagcugguccuacauuguugagaccucuucgucagacaauggaacuugcuauccaggcgauuuuaucgacuacgaggagcucagggagcagcugagcaguguguccucuuucgaacgguuugagauuuucccgaagacaagcuccuggcccaaccacgauucaaauaaaggugucaccgccgcuuguccucaugcaggggccaagaguuuuuauaaaaaccugaucuggcucgugaagaaaggaaauagcuacccaaaguuaucuaaguccuauauaaacgacaaaggcaaggaaguacugguucuuuggggcauccaccaccccucaacgagcgcugaucaacagaguuuguaccagaaugccgacgcguacguguucgucgggacuucucgcuauuccaaaaaguuuaaaccugagauugcaauccgaccaaaggugcgugaucaggagggaagaaugaacuacuauuggacccugguggaacccggugacaaaauuacauucgaggccacuggcaaucuagucguuccuagguacgcuuuugccauggaacggaacgcagggagcggaaucauaauuucggauaccccagugcaugacugcaacacaaccugucaaacgccgaagggcgcuaucaauacuucucuccccuuccagaacauucacccuaucacaaucgguaagugcccaaaauauguaaaguccaccaaacugcgccuugccacugggcugagaaauauucccucaauacagaguaggggauuguuuggcgcgaucgccggcuucauugaagggggauggacagguaugguggacggcugguacggguaucaucaccagaacgaacaaggaagcggcuacgcagcugaucucaaguccacccagaaugccaucgacgagauaacgaacaaagucaauucugugauugagaagaugaacacccaguuuacagcuguugguaaggaguucaaucaccuggaaaaacggaucgaaaacuuaaauaagaaaguggaugacggguuccuggauaucuggacuuacaacgccgagcuccuuguccuguuggaaaaugagcgcacccuagacuaucaugauagcaacgugaagaaucuguacgagaaaguacgaucacagcucaagaacaacgcaaaggaaauuggcaauggauguuuugaguucuaucacaaaugcgacaacacauguauggaaaguguuaagaauggcacuuacgauuauccuaaauacuccgaggaagccaagcugaacagagaggagaucgacggggugaaacuugaaagcaccaggauuuaucaaauacuggcuaucuacucuacagucgcgucaaguuuggugcucgucgugagccugggagcaauuuccuuuuggaugugcucuaaugguucguuacagugccggaucuguaucuga

SEQ ID NO: 132899 - RNA, 1701 nt, Artificial Sequence
  derived and/or modified CDS sequence (opt3) from hemagglutinin__InfluenzaA__ADG42553
augaaggccauccuggugguccuccuuuacaccuucgcuacagcaaacgccgacacucugugcauuggcuaucacgcgaauaacagcacggauaccguugacacaguguuggagaaaaauguaacugugacccauuccgucaacuuacuggaagauaagcacaaugggaaacuauguaagcucagaggaguggcuccccugcaucuugguaaaugcaacauagccggcuggauccuggggaauccugagugugaaucuuugucaacagcaaguagcugguccuacauuguugagaccucuucgucagacaacggaacuugcuauccaggcgauuuuaucgacuacgaagaacucagggagcagcugagcaguguguccucuuucgaacgguuugagauuuucccgaagacaagcuccuggcccaaucacgauucaaacaagggugucaccgccgcuuguagucaugcaggggccaagagcuuuuauaagaaucugaucuggcucgugaaaaagggaaacucuuacccuaaauuaaauaaguccuauauaaacgacaagggcaaagaaguacugguucuuuggggcauccaccacccaucaacgagcgcugaucaacagaguuuguaccagaaugccgacgcguacguguucgucgggacuucucgcuauuccaagaaauuuaagcccgagauugcaauccgaccuaaagugcgugagcaggaaggaagaaugaacuacuauuggacccugguggagccaggugauaagauuacauucgaagccacuggcaaccuagucguucccagguacgcuuuugccauggagcggaaugcagggagcggaaucauaauuucggacaccccugugcaugauugcaacacaaccugucaaacgccaaaaggcgcuaucaauacuucucucccguuccagaacauucaccccaucacaaucgguaagugcccuaaguauguaaaauccaccaagcugcgccuugccacugggcugagaaaugugccaucaauucagaguaggggauuguuuggcgcgauagccggcuucaucgaagggggauggacagguauggucgacggcugguacggguaucaucaccagaacgagcaaggaagcggcuacgcagcugaccucaaauccacccagaaugccauugaugagaucacgaacaagguaaauucuguuauagagaaaaugaacacccaguuuacagcuguggguaaggaguucaaucaccuggaaaagcggauugagaacuuaaauaaaaaggucgacgauggguuccuggacaucuggacuuacaacgccgaacuccuugugcuguuggagaaugagcgcacccuagauuaucaugacagcaacgugaaaaaccuguacgaaaagguucgaucacagcucaaaaauaacgcaaaggagaucggcaauggauguuuugaguucuaucacaagugcgauaacacauguauggaaagugugaaaaauggcacuuacgacuaucccaaguacuccgaagaggccaaacugaacagagaggaaauugauggggucaaacuugagagcaccaggaucuaucaaauucuggcuauauacucuacaguggcgucaaguuugguccucgugguuagccugggagcaaucuccuuuuggaugugcucuaaugguucguuacagugccggauuuguaucuga

SEQ ID NO: 132900 - RNA, 1701 nt, Artificial Sequence
  derived and/or modified CDS sequence (opt3) from hemagglutinin__InfluenzaA__ADG42573
augaaggccauccuggugguccuccuuuacaccuucgcuacagcaaacgccgacacucugugcauuggcuaucacgcgaauaacagcacggauaccguugacacaguguuggagaaaaauguaacugugacccauuccgucaacuuacuggaagauaagcacaaugggaaacuauguaagcucagaggaguggcuccccugcaucuugguaaaugcaacauagccggcuggauccuggggaauccugagugugaaucuuugucaacagcaaguagcugguccuacauuguugagaccucuucgucagacaacggaacuugcuauccaggcgauuuuaucgacuacgaggagcucagggagcagcugagcaguguguccucuuucgaacgguuugagauuuucccgaagacaagcuccuggcccaaucacgauucaaacaagggugucaccgccgcuuguccucaugcaggggccaaaaguuuuuauaagaaucugaucuggcucgugaaaaagggaaacagcuacccaaaauuaucuaaguccuauauaaaugacaagggcaaagaaguacugguucuuuggggcauccaccaccccucaacgagcgcugaucaacagaguuuguaccagaacgccgacgcguacguguucgucgggacuucucgcuauuccaagaaauuuaagccugagauugcaauccgaccaaaagugcgugaucaggagggaagaaugaauuacuauuggacccugauugaacccggugacaagaucacauucgaggccacuggcaaccuaguggucccuagguacgcuuuugccauggaacggaacgcagggagcggaauaauuaucucggauaccccaguucaugacugcaauacaaccugucaaacgccgaaaggcgcuauuaacacuucucuccccuuccagaauauccacccuaucacaauugguaagugcccaaaguaugugaaauccaccaagcugcgccuugccacugggcugagaaacguacccucaauacagaguaggggauuguuuggcgcgaucgccggcuucauugaagggggauggacagguaugguggacggcugguacggguaucaucaccagaaugaacaaggaagcggcuacgcagcugaucucaaauccacccagaacgccaucgacgagauaacgaauaaggucaacucugugauugagaaaaugaauacccaguuuacagcuguugguaaggaguucaaccaccuggaaaagcggaucgaaaauuuaaacaaaaagguggaugacggguuccuggauaucuggacuuacaaugccgagcuccuuguccuguuggaaaacgagcgcacccuagacuaucaugauagcaaugugaaaaagcuguacgagaaaguacgaucacagcucaagaacaacgcaaaggaaauuggcaauggauguuuugaguucuaucacaaaugcgacaacacauguauggaaaguguuaagaauggcacuuacgauuauccuaaauacuccgaggaagccaagcugaacagagaggagaucgacggggugaaacuugaaagcaccaggauuuaucaaauacuggcuaucuacucuacagucgcgucaaguuuggugcucgucgugagccugggagcaauuuccuuuuggaugugcucuaaugguucguuacagugccggaucuguaucuga

SEQ ID NO: 132901 - RNA, 1701 nt, Artificial Sequence
  derived and/or modified CDS sequence (opt3) from hemagglutinin__InfluenzaA__ADG42583
augaaggccauccuggugguccuccuuuacaccuucgcuacagcaaacgccgacacucugugcauuggcuaucacgcgaauaacagcacggauaccguugacacaguguuggagaaaaauguaacugugacccauuccgucaacuuacuggaagauaagcacaaugggaaacuauguaagcucagaggaguggcuccccugcaucuugguaaaugcaacauagccggcuggauccuggggaauccugagugugaaucuuugucaacagcaaguagcugguccuacauuguugagaccucuucgucagacaacggaacuugcuauccaggcgauuuuaucgacuacgaggagcucagggagcagcugagcaguguguccucuuucgaacgguuugagauuuucccgaagacaagcuccuggcccaaucacgauucaaacaagggugucaccgccgcuuguccucaugcaggggccaaaaguuuuuauaagaaucugaucuggcucgugaaaaagggaaacagcuacccaaaauuaucuaaguccuauauaaaugacaagggcaaagaaguacugguucuuuggggcauccaccaccccucaacgagcgcugaucaacagaguuuguaccagaacgccgacucuuacguguucgucgggacuucccgcuauagcaagaaauuuaagccugagauugcgauccgaccaaaagugcgugaucaggagggaagaaugaauuacuauuggacccugguggaacccggugacaagauuacauucgaggcaacuggcaaccuagucguuccuagguacgccuuugcuauggaacggaacgccgggucgggaaucauaauuucugauaccccagugcaugacugcaauacaaccugucaaacgccgaaaggcgcaaucaacacuucccuccccuuccagaauauucacccuaucacaaucgguaagugcccaaaguauguaaaaucaaccaagcugcgccuugcuacugggcugagaaacgugcccaguauucagagcaggggauuguuuggcgccauagcgggcuucaucgaagggggauggacagguauggucgacggcugguacggguaucaucaccagaaugaacaaggauccggcuacgccgcagaucucaaaucuacccagcacgcuauugacgagaucacgaacaaggugaauagcguuauagagaaaaugaacacccaguuuacagccguggguaaggaguucaaucaucuggaaaagcggauugaaaacuuaaauaaaaaggucgaugacggguuccuggauaucuggacuuacaacgcugagcuccuugugcuguuggaaaaugagcgcacccuagacuaucacgauucaaacguaaagaaucuguacgagaagguucgaagucagcucaaaaacaacgccaaggaaaucggcaauggauguuuugaguucuaucauaagugcgacaacacauguauggaauccgugaaaaauggcacuuacgauuauccuaaguacagcgaggaagcaaaacugaacagagaggagauugacggggucaaacuugaaucuaccaggaucuaucaaauucuggccauauacucaacaguggcuaguagcuugguccucgugguuucccugggagcgaucucuuuuuggaugugcucgaaugguagcuuacagugccggauuuguaucuga

SEQ ID NO: 132902 - RNA, 1701 nt, Artificial Sequence; identical to SEQ ID NO: 132314
  derived and/or modified CDS sequence (opt3) from hemagglutinin__InfluenzaA__ADG42593

SEQ ID NO: 132903 - RNA, 1701 nt, Artificial Sequence
  derived and/or modified CDS sequence (opt3) from hemagglutinin__InfluenzaA__ADG42603
augaaggccauccuggugguccuccuuuacaccuucgcuacagcaaacgccgacacucugugcauuggcuaucacgcgaauaacagcacggauaccguugacacaguguuggagaaaaauguaacugugacccauuccgucaacuuacuggaagauaagcacaaugggaaacuauguaagcucagaggaguggcuccccugcaucuugguaaaugcaacauagccggcuggauccuggggaauccugagugugaaucuuugucaacagcaaguagcugguccuacauuguugagaccucuucgucagacaacggaacuugcuauccaggcgauuuuaucgacuacgaggagcucagggagcagcugagcaguguguccucuuucgaacgguuugagauuuucccgaagacaagcuccuggcccaaucacgauucaaacaagggugucaccgccgcuuguccucaugcaggggccaaaaguuuuuauaagaaucugaucuggcucgugaaaaagggaaacagcuacccaaaauuacgcaagucuuauauaaaugacaagggcaaagaaguacugguucuuuggggcauccaccaccccuccacgucagcugaucaacagagcuuguaccagaacgccgacgcguacguguucgucgggacuucucgauauucuaagaaauuuaagccugagauugcaacccguccaaaagugagagaucaggagggaaggaugaauuacuauuggacacugguggaacccggugacaagaucacuuucgaggccaccggcaaccuagucguuccucgguacgcuuuugccauggaacgcaacgcaggguccggaauuaucauaagcgauacaccagugcaugacugcaauaccacgugucaaacuccgaaaggcucgauuaacacaucucuccccuuccagaauauccacccuauuaccaucgguaagugcccaaaguauguaaaauccacuaagcugagacuugcuacagggcugaggaacgugcccucaauccagagucggggauuguuuggcgccauugcgggcuucauagaagggggauggaccgguauggucgacggcugguacggguaucaucaccagaaugaacaaggaagcggcuacgccgcagaucucaaauccacgcagcacgcuaucgacgagauuaccaacaaggugaauaguguuaucgagaaaaugaacacacaguuuacugccguggguaaggaguucaaucaucuggaaaagcgcauagaaaacuuaaauaaaaaggucgaugacggguuccuggauauuuggaccuacaacgcugagcuccuugugcuguuggaaaaugagcgaacacuagacuaucacgauagcaacguaaagaaucuguacgagaagguuagaucacagcucaaaaacaacgccaaggaaaucggcaauggauguuuugaguucuaucauaagugcgacaacacuuguauggaaagugugaaaaauggcaccuacgauuauccuaaguacuccgaggaagcaaaacugaacagggaggagaucgacggggucaaacuugaaagcacacggauuuaucaaauccuggccauuuacucuaccguggcuucaaguuugguccucgugguuagccugggagcgauauccuuuuggaugugcucuaaugguucguuacagugccguaucuguauuuga

SEQ ID NO: 132904 - RNA, 1701 nt, Artificial Sequence
  derived and/or modified CDS sequence (opt3) from hemagglutinin__InfluenzaA__ADG42613
augaaggccauccuggugguccuccuuuacaccuucgcuacagcaaacgccgacacucugugcauuggcuaucacgcgaauaacagcacggauaccguugacacaguguuggagaaaaauguaacugugacccauuccgucaacauauuagaagauaagcacaaugggaaacuguguaagcuaagaggaguggcuccccuccaucuggguaaaugcaacaucgccggcuggauucuugggaauccugagugugaaucucugucaacagcaaguagcugguccuacaucguugagaccucuucgucagacaacggaacuugcuauccaggcgauuuuauugacuacgaagaguugagggagcagcucagcaguguguccucuuucgaacgguuugagaucuucccgaagacaagcuccuggcccaaucacgauucaaacaagggugucaccgccgcuuguccucaugcaggggccaaaaguuuuuauaagaaucugauauggcuggugaaaaagggaaacagcuacccaaaacucucuaaguccuauaucaaugacaagggcaaagaaguauuaguucuguggggcauucaccaccccucaacgagcgcugaucaacagagucuuuaccagaacgccgacgcguacguguucgucgggacuucucgcuauuccaagaaauuuaagccugagaucgcaauucgaccaaaagugcgugaucaggagggaagaaugaauuacuauuggaccuugguggaacccggugacaagaucacauucgaggccacuggcaaccuggucguuccuagguacgcuuuugccauggaacggaacgcagggagcggaauaauuaucucggauaccccagugcaugacugcaauacaaccugucaaacgccgaaaggcgcuauuaacacuucucuacccuuccagaauauccacccuaucacaauugguaagugcccaaaguauguaaaauccaccaagcuccgccuggccacugggcuuagaaacgugcccucaauacagaguaggggacuguuuggcgcgaucgccggcuucauugaagggggauggacagguauggucgacggcugguacggguaucaucaccagaaugaacaaggaagcggcuacgcagcugauuugaaauccacccagaacgccaucgacgagauaacgaauaaggugaacucuguuauugagaaaaugaauacccaguuuacagcuguggguaaggaguucaaccaccucgagaagcggaucgaaaaucugaacaaaaaggucgaugacggguucuuagauaucuggacuuacaaugccgagcugcucgugcuucuggaaaacgagcgcaccuuggacuaucaugauagcaauguuaaaaaccuauacgagaagguacgaucacagcugaaaaacaaugcaaaggaaauuggcaacggauguuuugaguucuaucacaagugcgacaauacauguauggaaagugugaaaaacggcacuuacgauuauccuaaguacuccgaggaagccaaacucaauagagagaagaucgacggggucaaacuggagagcaccaggauuuaucaaauacuugcuaucuacucuacaguggcgucaagucuggucuuggugguuagccucggagcaauuuccuuuuggaugugcucuaacgguucgcugcagugccggaucuguaucuga

SEQ ID NO: 132905 - RNA, 1701 nt, Artificial Sequence; identical to SEQ ID NO: 132344
  derived and/or modified CDS sequence (opt3) from hemagglutinin__InfluenzaA__ADG42623

SEQ ID NO: 132906 - RNA, 1701 nt, Artificial Sequence; identical to SEQ ID NO: 130717
  derived and/or modified CDS sequence (opt3) from hemagglutinin__InfluenzaA__ADG42633

SEQ ID NO: 132907 - RNA, 1701 nt, Artificial Sequence
  derived and/or modified CDS sequence (opt3) from hemagglutinin__InfluenzaA__ADG42643
augaaggccauccuggugguccuccuuuacaccuucgcuacagcaaacgccgacacucugugcauuggcuaucacgcgaauaacagcacggauaccguugacacaguguuggagaagaauguaacugugacccauuccgcuaacuuacuggaagauaagcacaaugggaaacuauguaagcucagaggagccgcaccccugcaucuugguaaaugcaacauagccggcuggauccuggggaauccugagugugaaucuuugucaacagcuaguagcugguccuacauugucgagaccucuucgucagacaacggaacuugcuauccaggcgauuuuaucgacuacgaggagcucagggagcagcugagcaguguguccucuuucgaacgguuugagauguucccgaagacaagcuccuggcccaaucacgauucaaacaaggguguuaccgcagccuguccucaugcuggggccaaaaguuuuuauaagaaucugauuuggcucgugaaaaagggaaacagcuacccaaaauuaucuaaguccuaugucaaugacaagggcaaagaagugcugguacuuuggggcauccaccaccccucaacgagcgcggaucaacagaguuuguaccagaacgcagacgccuacguuuucguggggacuucucgcuauuccaagaaauuuaagccugagauagcuauccgaccaaaaguccgugaucaggagggaagaaugaauuacuauuggacccugguggaacccggugacaagauuacauucgaggccacuggcaaccuaguggucccuagguacgcauuugcuauggaacggaacgccgggagcggaaucauuaucucggauaccccaguucaugacugcaauacaaccugucaaacgccgaaaggcgcgauaaacacuucucuccccuuccagaauauucacccuaucacaauugguaagugcccaaaguaugugaaauccaccaagcugcgccuugccacugggcugagaaacguacccucaauccagaguaggggauuguuuggcgcaaucgcuggcuucauugaagggggauggacagguaugguggacggcugguacggguaucaucaccagaaugaacaaggaagcggcuacgccgcugaucucaaauccacccagaacgccauagacgagaucacgaauaaggucaacucugugauugagaaaaugaauacccaguuuacagcaguugguaaggaguucaaccaccuggaaaagcggaucgaaaauuuaaacaaaaagguggaugacggguuccuggauauauggacuuacaaugccgagcuccuuguccuguuggaaaacgagcgcacccuagacuaucaugauagcaaugugaaaaaccuguacgagaagguacgaucacagcucaaaaacaaugcuaaggaaauuggcaacggauguuuugaguucuaucacaagugcgacaauacauguauggaaaguguuaaaaacggcacuuacgauuauccuaaguacuccgaggaagcgaaacugaauagagaggagaucgacggggugaaacuugaaagcaccaggaucuaucaaauucuggcaaucuacucuacagucgccucaaguuuggugcucgucgugagccugggagcuauuuccuuuuggaugugcucuaacgguucguuacagugccggauauguaucuga

SEQ ID NO: 132908 - RNA, 1701 nt, Artificial Sequence
  derived and/or modified CDS sequence (opt3) from hemagglutinin__InfluenzaA__ADG42653
augaaggccauccuggugguccuccuuuacaccagcgcuacagcaaacgccgacacucugugcauuggcuaucacgcgaauaacuccacggauaccguugacacaguguuggagaaaaauguaacugugacccauucugucaacuuacuggaagauaagcacaaugggaaacuauguaagcucagaggaguggcuccccugcaucuugguaaaugcaacauagccggcuggauccuggggaauccugagugugaaucauugaguacagcaagcuccuggucuuacauuguugagaccucgucaagcgacaacggaacuugcuauccaggcgauuucaucgacuacgaggagcucagggagcagcugaguuccgugucuagcuuugaacgguucgagauguuuccgaagacauccucauggcccaaucacgauaguaacaagggugucaccgccgcuuguccucaugcaggggccaagagcuucuauaagaaucugauuuggcucgugaaaaagggaaacucuuacccaaaauuauccaagucauauaucaaugacaagggcaaagaaguacugguucuuuggggcauacaccaccccagcacgagugcugaucaacagucuuuguaccagaacgccgacgcguacguguuugucgggacuucccgcuauagcaagaaauucaagccugagaucgcaauucgaccaaaagugcgugaucaggagggaagaaugaauuacuauuggacccugguggaacccggugacaagaucacauuugaggccacuggcaaccuagucguuccuagguacgcuuucgccauggaacggaacgcagggucgggaauuaucauaucugauaccccagugcaugacugcaauacaaccugucaaacgccgaaaggcgcuauuaacacuucccuccccuuucagaauauccacccuauuacaaucgguaagugcccaaaguauguaaaaucaaccaagcugcgccuugccacugggcugagaaacgugcccaguauccagagcaggggauuguucggcgcgauugccggcuuuauagaagggggauggacagguauggucgacggcugguacggguaucaucaccagaaugaacaaggauccggcuacgcagcugaucucaaaucuacccagaacgccaucgacgagauuacgaauaaggugaacagcguuaucgagaaaaugaauacccaguucacagcuguggguaaggaauuuaaccaccuggagaagcggauagaaaauuuaaacaaaaaggucgaugacggguuccuggauauuuggacuuacaaugccgagcuccuugugcuguuggaaaacgagcgcacccuagacuaucaugauucaaauguuaaaaaccuguacgagaagguacgaagucagcucaaaaacaaugcaaaggaaaucggcaacggauguuucgaguuuuaucacaagugcgacaauacauguauggaauccgugaaaaacggcacuuacgauuauccuaaguacagcgaggaagccaaacugaauagagaggagaucgacggggucaaacuugaaucuaccaggauuuaucaaauccuggcuauuuacucaacaguggcgaguagcuugguccucgugguuucccugggagcaauaucuuucuggaugugcucgaacgguagcuuacagugccggaucuguauuuga

SEQ ID NO: 132909 - RNA, 1701 nt, Artificial Sequence; identical to SEQ ID NO: 131881
  derived and/or modified CDS sequence (opt3) from hemagglutinin__InfluenzaA__ADG42663

SEQ ID NO: 132910 - RNA, 1701 nt, Artificial Sequence
  derived and/or modified CDS sequence (opt3) from hemagglutinin__InfluenzaA__ADG42673
augaaggccauccuggugguccuccuuuacaccuucgcuacagcaaacgccgacacucugugcauuggcuaucacgcgaauaacagcacggauaccguugacacaguguuggagaaaaauguaacugugacccauuccgucaacuuacuggaagauaagcacaaugggaaacuauguaagcucaaaggaguggcuccccugcaucuugguaagugcaacauagccggcuggauccuggggaauccugagugugaaucuuugucaacagcaggaaguuggagcuacauuguugagaccuccucuucggacaacggcacuugcuauccaggugauuuuaucgacuacgaagaacucagagagcagcugucaagcgugaguuccuucgaaagguuugagauuuucccgaagacaucuagcuggcccaaucacgauuccaacaaaggggucaccgccgcuuguccucaugcaggagccaagucauuuuauaaaaaucugaucuggcucgugaagaaaggcaacaguuacccaaaguuaagcaagucuuauauaaaugacaaaggcaaggaaguacugguucuuugggggauccaccaccccuccacgucagcugaucaacagagcuuguaccagaacgccgacgcguacguguucgucggaaccagucgguauucuaaaaaguuuaaaccugagauugcaauccgcccaaaggugcgagaucaggagggucguaugaauuacuauuggacucugguggaacccggcgacaaaauuacauucgaggccacugggaaccuagucguuccuagauacgcuuuugccauggaaaggaacgcaggauccggcaucauaauuagcgauaccccagugcaugacugcaauacaaccugucaaacgccgaagggugcuaucaacacuucgcuccccuuccagaauauucacccuaucacaaucgggaagugcccaaaauauguaaagucuaccaaacugcggcuugccacuggacugcgcaacgugcccuccauucagucaagaggcuuguuuggcgcgauagccggguucaucgagggagguuggacaggcauggucgacgggugguacggauaucaucaccagaaugaacaaggcagugguuacgcagcugaucucaagagcacccagaacgccauugacgggaucacgaauaaagugaacuccguuauagagaagaugaauacccaguuuacagcugugggcaaggaguucaaccaccuggagaaaaggauugagaauuuaaacaagaaagucgaugacggauuccuggauaucuggacuuacaaugccgaacuccuugugcuguuggagaacgaacggacccuagacuaucaugauucuaauguaaagaaccuguacgagaaaguucgcagccagcucaagaacaaugcaaaggagaucggcaacggguguuuugaguucuaucacaaaugcgacaauacauguauggaaucagugaagaacggaacuuacgauuauccuaaauacagugaagaggccaagcugaaucgagaagagauugacggugucaaacuugaguccaccagaaucuaucaaauucuggcuauauacagcacaguggcgucuucauugguccucgugguuagucugggcgcaaucagcuuuuggaugugcuccaacgggucuuuacagugcaggauuuguaucuga

SEQ ID NO: 132911 - RNA, 1701 nt, Artificial Sequence
  derived and/or modified CDS sequence (opt3) from hemagglutinin__InfluenzaA__ADG42683
augaaggccauccuggugguccuccuuuacaccuucgcuacagcaaacgccgacacucugugcauuggcuaucacgcgaauaacagcacggauaccguugacacaguguuggagaaaaauguaacugugacccauuccgucaacauauuagaagauaagcacaaugggaaacuguguaagcuaagaggaguggcuccccuccaucuggguaaaugcaacaucgccggcuggauucuugggaauccugagugugaaucucugucaacagcaaguagcugguccuacaucguugagaccucuucgucagacaacggaacuugcuauccaggcaauuuuauugauuacgaagaguugagggagcagcucagcaguguguccucuuucgaacgguuugagaucuucccgaagacaagcuccuggcccaaccacgacucaaauaagggugucaccgccgcuuguccucaugcaggggccaaaaguuuuuauaagaaccugauauggcuggugaaaaagggaaauagcuacccaaaacucucuaaguccuauaucaacgauaagggcaaagaaguauuaguucuguggggcauucaccaccccucaacgagcgcugaccaacagagucuuuaccagaaugccgaugcguacguguucgucgggacuucucgcuauuccaagaaauuuaagccugagaucgcaauucgaccaaaagugcgugaccaggagggaagaaugaacuacuauuggaccuugguggaacccggugauaagaucacauucgaggccacuggcaaccuggucguuccuagguacgcuuuugccauggaacggaaugcagggagcggaauaauuaucucggacaccccagugcaugauugcaacacaaccugucaaacgccgaaaggcgcuauuaauacuucucuacccuuccagaacauccacccuaucacaauugguaagugcccaaaguauguaaaauccaccaagcuccgccuggccacugggcuuagaaaugugcccucaauacagaguaggggacuguuuggcgcgaucgccggcuucauugaagggggauggacagguauggucgacggcugguacggguaucaucaccagaacgaacaaggaagcggcuacgcagcugacuugaaauccacccagaaugccaucgaugagauaacgaacaagguaaauucuguuauugagaaaaugaacacccaguuuacagcuguggguaaggaguucaaucaccucgagaagcggaucgaaaaccugaauaaaaaggucgacgauggguucuuagacaucuggacuuacaacgccgagcugcucgugcuucuggaaaaugagcgcaccuuggauuaucaugacagcaacgugaaaaaccuauacgagaagguucgaucacagcugaaaaauaacgcaaaggaaauuggcaauggauguuuugaguucuaucacaagugcgauaacacauguauggaaagugugaaaaauggcacuuacgacuauccuaaguacuccgaggaagccaaacucaacagagaggagaucgauggggucaagcuggaaagcaccaggauuuaucaaauacuugcuaucuacucuacaguggcgucaagucuggucuuggugguuagccucggagcaauuuccuuuuggaugugcucuaaugguucgcugcagugccggaucuguaucuga

SEQ ID NO: 132912 - RNA, 1701 nt, Artificial Sequence; identical to SEQ ID NO: 131881
  derived and/or modified CDS sequence (opt3) from hemagglutinin__InfluenzaA__ADG42693

SEQ ID NO: 132913 - RNA, 1701 nt, Artificial Sequence; identical to SEQ ID NO: 132589
  derived and/or modified CDS sequence (opt3) from hemagglutinin__InfluenzaA__ADG42703

SEQ ID NO: 132914 - RNA, 1701 nt, Artificial Sequence
  derived and/or modified CDS sequence (opt3) from hemagglutinin__InfluenzaA__ADG42723
augaaggccauccuggugguccuccuuuacaccuucgcuacagcaaacgccgacacucugugcauuggcuaucacgcgaauaacagcacggauaccguugacacaguguuggagaaaaauguaacugugacccauuccgucaacuuacuggaagauaagcacaaugggaaacuauguaagcucagaggaguggcuccccugcaucuugguaaaugcaacauagccggcuggauccuggggaauccugagugugaaucuuugucaacagcaaguagcugguccuacauuguugagaccucuucgucagacaacggaacuugcuauccaggcgauuuuaucgacuacgaggagcucagggagcagcugagcaguguguccucuuucgaacgguuugagauuuucccgaagacaagcuccuggcccaaucacgauucaaacaagggugucaccgccgcuuguccucaugcaggggccaaaaguuuuuauaagaaucugaucuggcucgugaaaaagggaaacagcuacccaaaauuaucuaaguccuauauaaaugacaagggcaaagaaguacugguucuuuggggcauccaccaccccucaacgagcgcugaucaacagaguuuguaccagaacgccgacgcguacguguucgucgggacuucucgcuauuccaagaaauuuaagccugagauggcaauucgaccaaaagugcgugaucaggagggaagaaugaauuacuauuggacccugguggaacccggugacaagaucacauucgaggccacuggcaaccuagucguuccuagguacgcuuuugccauggaacggaacgcagggagcggaauuaucauaucggauaccccagugcaugacugcaauacaaccugucaaacgccgaaaggcgcuauuaacacuucucuccccuuccagaauauccacccuauuacaaucgguaagugcccaaaguauguaaaauccaccaagcugcgccuugccacugggcugagaaacgugcccucaauccagaguaggggauuguuuggcgcgauugccggcuucauagaagggggauggacagguauggucgacggcugguacggguaucaucaccagaaugaacaaggaagcggcuacgcagcugaucucaaauccacccagaacgccaucgacaagauuacgaauaaagugaacucuguuaucgagaagaugaauacccaguuuacagcuguggguaaggaguucaaccaccuggaaaaacggauagagaauuuaaacaagaaagucgaugacggguuccuggauauuuggacuuacaaugccgaacuccuugugcuguuggagaacgaacgcacccuagacuaucaugauagcaauguaaagaaccuguacgagaaaguucgaucacagcucaagaacaaugcaaaggagaucggcaacggauguuuugaguucuaucacaaaugcgacaauacauguauggaaagugugaagaacggcacuuacgauuauccuaaauacuccgaagaggccaagcugaauagagaagagaucgacggggucaaacuugagagcaccaggauuuaucaaauccuggcuauuuacucuacaguggcgucaaguuugguccucgugguuagccugggagcaauauccuuuuggaugugcucuaacgguucguuacagugccggaucuguauuuga

SEQ ID NO: 132915 - RNA, 1701 nt, Artificial Sequence; identical to SEQ ID NO: 132344
  derived and/or modified CDS sequence (opt3) from hemagglutinin__InfluenzaA__ADG42743

SEQ ID NO: 132916 - RNA, 1701 nt, Artificial Sequence
  derived and/or modified CDS sequence (opt3) from hemagglutinin__InfluenzaA__ADG42753
augaaggccauccuggugguccuccuuuacaccuucgcuacagcaaacgccgacacucugugcauuggcuaucacgcgaauaacagcacggauaccguugacacaguguuggagaaaaauguaacugugacccauuccgucaacuuacuggaagauaagcacaaugggaaacuauguaagcucagaggaguggcuccccugcaucuugguaaaugcaacauagccggcuggauccuggggaauccugagugugaaucuuugucaacagcaaguagcugguccuacauuguugagaccucuucgucagacaacggaacuugcuauccaggcgauuuuaucgacuacgaggagcucagggagcagcugagcaguguguccucuuucgaacgguuugagauuuucccgaagacaagcuccuggcccaaucacgauucaaacaagggugucaccgccgcuuguccucaugcaggggccaaaaguuuuuauaagaaucugaucuggcucgugaaaaagggaaacagcuacccaaaauuaucuaaguccuauauaaaugacaagggcaaagaaguacugguucuuuggggcauccaccaccccucaacgagcacugaucaacagaguuuguaccagaacgcugacgccuacguguucgucgggaccucucgcuauuccaagaaauuuaagccugagauugcgauccgaccaaaagugcgugaucaggagggaagaaugaauuacuauuggacacugguggaacccggugacaagauuacuuucgaggcaaccggcaaccuagucguuccuagguacgccuuugcuauggaacggaacagcgggucgggaaucauaauuucugauacaccagugcaugacugcaauaccacgugucaaacuccgaaaggcgccaucaacacaucccuccccuuccagaauauucacccuaucaccaucgguaagugcccaaaguauguaaaaucaacuaagcugcgccuugcaacagggcugagaaacgugcccaguauucagagcaggggauuguuuggcgcuauagccggcuucaucgaagggggauggaccgguauggucgacggcugguacggguaucaucaccagaaugaacaaggauccggcuacgcggccgaucucaaaucuacgcagaacgcaauugacgagaucaccaauaaggugaacagcguuauagagaaaaugaauacacaguuuacugcuguggguaaggaguucaaccaccuggaaaagcggauugaaaauuuaaacaaaaaggucgaugacggguuccuggauaucuggaccuacaaugccgagcuccuugugcuguuggaaaacgagcgcacacuagacuaucaugauucaaauguaaagaaccuguacgagaagguucgaagucagcucaaaaacaaugcuaaggaaaucggcaacggauguuuugaguucuaucacaagugcgacaauacuuguauggaauccgugaaaaacggcaccuacgauuauccuaaguacagcgaggaagccaaacugaauagagaggagauugacggggucaaacuugaaucuacaaggaucuaucaaauucuggcaauauacucaaccguggccaguagcuugguccucgugguuucccugggagcuaucucuuuuuggaugugcucgaacgguagcuuacagugccggauuuguaucuga

SEQ ID NO: 132917 - RNA, 1701 nt, Artificial Sequence; identical to SEQ ID NO: 131881
  derived and/or modified CDS sequence (opt3) from hemagglutinin__InfluenzaA__ADG42763

SEQ ID NO: 132918 - RNA, 1701 nt, Artificial Sequence; identical to SEQ ID NO: 131881
  derived and/or modified CDS sequence (opt3) from hemagglutinin__InfluenzaA__ADG42773

SEQ ID NO: 132919 - RNA, 1701 nt, Artificial Sequence
  derived and/or modified CDS sequence (opt3) from hemagglutinin__InfluenzaA__ADG42783
augaaggccauccuggugguccuccuuuacaccuucgcuacagcaaacgccgacacucugugcauuggcuaucacgcgaauaacagcacggauaccguugacacaguguuggagaaaaauguaacugugacccauuccgucaacuuacuggaagauaagcacaaugggaaacuauguaagcucagaggaguggcuccccugcaucuugguaaaugcaacauagccggcuggauccuggggaauccugagugugaaucuuugucaacagcaaguagcugguccuacauuguugagaccucuucgucagacaacggaacuugcuauccaggcgauuuuaucgacuacgaggagcucagggagcagcugagcaguguguccucuuucgaacgguuugagauguucccgaagacaagcuccuggcccaaucacgauucaaacaagggugucaccgccgcuuguccucaugcaggggccaaaaguuuuuauaagaaucugauuuggcucgugaaaaagggaaacagcuacccaaaauuaucuaaguccuauaucaaugacaagggcaaagaaguacugguucuuuggggcauacaccaccccucaacgagcacugaucaacagaguuuguaccagaacgcugacgccuacguguucgucgggaccucucgcuauuccaagaaauuuaagccugagaucgcgauucgaccaaaagugcgugaucaggagggaagaaugaauuacuauuggacacugguggaacccggugacaagaucacuuucgaggcaaccggcaaccuagucguuccuagguacgccuuugcuauggaacggaacgccgggagcggaauuaucauaucggauacaccagugcaugacugcaauaccacgugucaaacuccgaaaggcgcaauuaacacaucucuccccuuccagaauauccacccuauuaccaucgguaagugcccaaaguauguaaaauccacuaagcugcgccuugcuacagggcugagaaacgugcccucaauccagaguaggggauuguuuggcgccauugcgggcuucauagaagggggauggaccgguauggucgacggcugguacggguaucaucaccagaaugaacaaggaagcggcuacgccgcagaucucaaauccacgcagaacgcuaucgacaagauuaccaauaaagugaacucuguuaucgagaagaugaauacacaguuuacugccguggguaaggaguucaaccaccuggaaaaacggauagagaauuuaaacaagaaagucgaugacggguuccuggauauuuggaccuacaaugcugaacuccuugugcuguuggagaacgaacgcacacuagacuaucaugauagcaauguaaagaaccuguacgagaaaguucgaucacagcucaagaacaaugccaaggagaucggcaacggauguuuugaguucuaucacaaaugcgacaauacuuguauggaaagugugaagaacggcaccuacgauuauccuaaauacuccgaagaggcaaagcugaauagagaagagaucgacggggucaaacuugagagcacaaggauuuaucaaauccuggccauuuacucuaccguggcuucaaguuugguccucgugguuagccugggagcgauauccuuuuggaugugcucuaacgguucguuacagugccggaucuguauuuga

SEQ ID NO: 132920 - RNA, 1701 nt, Artificial Sequence; identical to SEQ ID NO: 131881
  derived and/or modified CDS sequence (opt3) from hemagglutinin__InfluenzaA__ADG42793

SEQ ID NO: 132921 - RNA, 1701 nt, Artificial Sequence; identical to SEQ ID NO: 132919
  derived and/or modified CDS sequence (opt3) from hemagglutinin__InfluenzaA__ADG42803

SEQ ID NO: 132922 - RNA, 1701 nt, Artificial Sequence; identical to SEQ ID NO: 132269
  derived and/or modified CDS sequence (opt3) from hemagglutinin__InfluenzaA__ADG42813

SEQ ID NO: 132923 - RNA, 1701 nt, Artificial Sequence; identical to SEQ ID NO: 132412
  derived and/or modified CDS sequence (opt3) from hemagglutinin__InfluenzaA__ADG42823

SEQ ID NO: 132924 - RNA, 1701 nt, Artificial Sequence; identical to SEQ ID NO: 132314
  derived and/or modified CDS sequence (opt3) from hemagglutinin__InfluenzaA__ADG42833

SEQ ID NO: 132925 - RNA, 1701 nt, Artificial Sequence; identical to SEQ ID NO: 131881
  derived and/or modified CDS sequence (opt3) from hemagglutinin__InfluenzaA__ADG42843

SEQ ID NO: 132926 - RNA, 1701 nt, Artificial Sequence; identical to SEQ ID NO: 131881
  derived and/or modified CDS sequence (opt3) from hemagglutinin__InfluenzaA__ADG42853

SEQ ID NO: 132927 - RNA, 1701 nt, Artificial Sequence; identical to SEQ ID NO: 132435
  derived and/or modified CDS sequence (opt3) from hemagglutinin__InfluenzaA__ADG42863

SEQ ID NO: 132928 - RNA, 1701 nt, Artificial Sequence; identical to SEQ ID NO: 132455
  derived and/or modified CDS sequence (opt3) from hemagglutinin__InfluenzaA__ADG42883

SEQ ID NO: 132929 - RNA, 1701 nt, Artificial Sequence
  derived and/or modified CDS sequence (opt3) from hemagglutinin__InfluenzaA__ADG42893
augaaggccauccuggugguccuccuuuacaccuucgcuacagcaaacgccgacacucugugcauuggcuaucacgcgaauaacagcacggauaccguugacacaguguuggagaaaaauguaacugugacccauuccgucaacuuacuggaagauaagcacaaugggaaacuauguaagcucagaggaguggcuccccugcaucuugguaaaugcaacauagccggcuggauccuggggaauccugagugugaaucuuugucaacagcaaguagcugguccuacauuguugagaccucuucgucagacaacggaacuugcuauccaggcgauuuuaucgacuacgaggagcucagggagcagcugagcaguguguccucuuucgaacgguuugagauuuucccgaagacaagcuccuggcccaaucacgauucaaacaagggugucaccgccgcuuguccucaugcaggggccaaaaguuuuuauaagaaucugaucuggcucgugaaaaagggaaacagcuacccaaaauuaucuaaguccuauauaaaugacaagggcaaagaaguacugguucuuuggggcauccaccaccccucaacgagcgcugaucaacagaguuuguaccagaacgccgacgcguacguguucgucgggacuucucgcuauuccaagaaauuuaagccugagauugcaauccgaccaaaagugcgugaucaggagggaagaaugaauuacuauuggacccugguggaacccggugacaagauuacauucgaggccacuggcaaccuagucguuccuagguacgcuuuugccauggaacggaacgcagggagcggaaucauaauuucggauaccccagugcaugacugcaauacaaccugucaaacgccgaaaggcgcuaucaacacuucucuccccuuccagaauauucacccuaucacaaucgguaagugcccaaaguauguaaaauccaccaaccugcgccuugccacugggcugagaaaugugcccucaauucagaguaggggauuguuuggcgcgauagccggcuucaucgaagggggauggacagguauggucgacggcugguacggguaucaucaccagaacgaacaaggaagcggcuacgcagcugaucucaaguccacccagaaugccauugacgagaucacgaacaaaguuaauucugugauagagaagaugaacacccaguuuacagcuguggguaaagaguucaaucaccuggaaaagcggauugaaaacuuaaauaagaaagucgaugacggguuccuggauaucuggacuuacaacgccgagcuccuugugcuguuggaaaaugagcgcacccuagacuaucaugauagcaacguaaagaaccuguacgagaaaguucgaucacagcucaagaauaacgcaaaagaaaucggcaauggauguuuugaguucuaucacaagugcgacaacacauguauggaaagugugaagaauggcacuuacgauuauccuaaauacuccgaggaagccaagcugaacagagaggagauugacggggucaaacuugaaagcaccaggaucuaucaaauucuggcuauauacucuacaguggcgucaaguuugguccucgugguuagccugggagcaaucuccuuuuggaugugcucuaaugguucguuacagugccggauuuguaucuga

SEQ ID NO: 132930 - RNA, 1701 nt, Artificial Sequence; identical to SEQ ID NO: 130717
  derived and/or modified CDS sequence (opt3) from hemagglutinin__InfluenzaA__ADG42903

SEQ ID NO: 132931 - RNA, 1701 nt, Artificial Sequence; identical to SEQ ID NO: 131881
  derived and/or modified CDS sequence (opt3) from hemagglutinin__InfluenzaA__ADG42913

SEQ ID NO: 132932 - RNA, 1701 nt, Artificial Sequence; identical to SEQ ID NO: 132445
  derived and/or modified CDS sequence (opt3) from hemagglutinin__InfluenzaA__ADG42923

SEQ ID NO: 132933 - RNA, 1701 nt, Artificial Sequence
  derived and/or modified CDS sequence (opt3) from hemagglutinin__InfluenzaA__ADG57087
augaaggccauccuggugguccuccuuuacaccuucgcuacagcaaacgccgacacucugugcauuggcuaucacgcgaauaacagcacggauaccguugacacaguguuggagaaaaauguaacugugacccauuccgucaacuuacuggaagauaagcacaaugggaaacuauguaagcucagaggaguggcuccccugcaucuugguaaaugcaacauagccggcuggauccuggggaauccugagugugaaucuuugucaacagcaaguagcugguccuacauuguugagaccucuucgucagacaacggaacuugcuauccaggcgauuuuaucgacuacgaggagcucagggagcagcugagcaguguguccucuuucgaacgguuugagauuuucccgaagacaagcuccuggcccaaucacgauucaaacaagggugucaccgccgcuuguccucaugcaggggccaaaaguuuuuauaagaaucugaucuggcucgugaaaaagggaaacagcuacccaaaauuaucuaaguccuauauaaaugacaagggcaaagaaguacugguucuuuggggcauccaccaccccucaacgagcgcugaucaacagaguuuguaccagaacgccgacgcguacguguucgucgggacuucucgcuauuccaagaaauuuaagccugagauugcaauccgaccaaaagugcgugaucaggagggaagaaugaauuacuauuggacccugguggaacccggugacaagauuacauucgaggccacuggcaaccuagucguuccuagguacgcuuuugccauggaacggaacgcagggagcggaaucauaauuucggauaccccagugcaugacugcaauacaaccugucaaacgccgaaaggcgcuaucaacacuucucuccccuuccagaauauucacccuaucacaaucgguaagugcccaaaguauguaaaauccaccaagcugcgccuugccacugggcugagaaacgugcccucaauucagaguaggggauuguuuggcgcgauagccggcuucaucgaagggggauggacagguauggucgacggcugguacggguaucaucaccagaaugaacaaggaagcggcuacgcagcugaucucaaauccacccagaacgccauugacgagaucacgaauaaggugaacucuguuauagagaaaaugaauacccaguuuacagcuguggguaaggaguucaaccaccuggaaaagcggauugaaaauuuaaacaaaaaggucgaugacggguuccuggauaucuggacuuacaaugccgagcuccuugugcuguuggaaaacgagcgcacccuagacuaucaugauagcaauguaaagaaccuguacgagaagguucgaucacagcucaaaaacaaugcaaaggaaaucggcaacggauguuuugaguucuaucacaagugcgacaauacauguauggaaagugugaaaaacggcacuuacgauuauccuaaguacuccgaggaagccaaacugaauagagaggagauugacggggucaaacuugaaagcaccaggaucuaucaaauucuggcuauauacucuacaguggcgaucucauugguccucgugguuagucugggagcaauuagcuuuuggaugugcuccaacgguucuuuacggugccguaucuguaucuga

SEQ ID NO: 132934 - RNA, 1701 nt, Artificial Sequence; identical to SEQ ID NO: 130717
  derived and/or modified CDS sequence (opt3) from hemagglutinin__InfluenzaA__ADG57088

SEQ ID NO: 132935 - RNA, 1701 nt, Artificial Sequence
  derived and/or modified CDS sequence (opt3) from hemagglutinin__InfluenzaA__ADG57089
auggaggccauccuggugguccuccuuuacaccuucgcuacagcaaacgccgacacucugugcauuggcuaucacgcgaauaacagcacggauaccguugacacaguguuggaaaagaauguaacugugacccauuccgucaacuuacuggaggauaagcacaaugggaagcuauguaaacucagaggaguggcuccccugcaucuugguaagugcaacauagccggcuggauccuggggaauccugaaugugagucuuugucaacagcaaguagcugguccuacauuguugaaaccucuucgucagacaacggaacuugcuauccaggcgauuuuauccaguacgaggagcucagggaacaacugagcaguguguccucuuucgagcgguuugaaauuuucccgaaaacaagcuccuggcccaaucacgacucaaacaagggugucaccgccgcuuguccucaugcaggggccaagaguuuuuauaaaaaucugaucuggcucgugaagaaaggaaacagcuacccaaaguuaucuaaauccuauauaaaugauaagggcaaggagguacugguucuuuggggcauccaccaccccucaacgagcgcugaccagcagaguuuguaccagaacgccgaugcguacguguucgucgggucuucccgcuauagcaaaaaguuuaaaccugagauugcaauccgaccaaaggugcgugaccaagaaggaagaaugaauuacuauuggacucugguggagcccggugauaaaauuaccuucgaagccacaggcaaccuagucguuccuagguacgcuuuugccauggagcggaacgcagggucgggaaucauaauuucugacacuccagugcaugauugcaauaccacaugucagaccccgaagggcgcuaucaacacgucccuccccuuccacaauauucauccuaucacuaucgguaaaugcccaaaguauguaaagucaacaaaacugcgccuugccaccgggcugagaaacgugcccaguauucagagcaggggauuguuuggcgcgauagccggcuucaucgaagggggauggacugguauggucgacggcugguacggguaucaccaccagaaugagcaaggauccggcuacgcagcugaccucaagucuacacagaacgccauugaugagaucaccaauaaagugaacagcguuauagaaaagaugaauacgcaguuuaccgcuguggguaaagaguucaaccaucuggaaaagcggauugagaauuuaaacaagaaagucgacgauggguuccuggacaucuggacauacaaugccgaacuccuugugcuguuggagaacgagcgcacucuagauuaucacgacucaaauguaaagaaccuguacgaaaaaguucgaagucagcucaagaacaaugcagaggaaaucggcaacggauguuuugaguucuaucauaaaugcgauaauaccuguauggaauccgugaagaacggcacauacgacuauccuaaguacagcgaggaggccaaacugaauagagaagagauugauggggucaaacuugaaucuacuaggaucuaucaaauucuggcuauauacucaaccguggcgaguagcuugguccucgugguuucccugggagcaaucucuuuuuggaugugcucgaacgguagcuuacagugccggauuuguaucuga

SEQ ID NO: 132936 - RNA, 1701 nt, Artificial Sequence
  derived and/or modified CDS sequence (opt3) from hemagglutinin__InfluenzaA__ADG57090
augaaggccauccuggugguccuccuuuacaccuucgcuacagcaaacgccgacacucugugcauuggcuaucacgcgaauaacagcacggauaccguugacacaguguuggagaaaaauguaacugugacccauuccgucaacuuacuggaagauaagcacaaugggaaacuauguaagcucagaggaguggcuccccugcaucuugguaaaugcaacauagccggcuggauccuggggaauccugagugugaaucuuugucaacagcaaguagcugguccuacauuguugagaccucuucgucagacaacggaacuugcuauccaggcgauuuuaucgacuacgaagaacucagggagcagcugagcaguguguccucuuucgaacgguuugagauuuucccgaagacaagcuccuggcccaaucacgauucaaacaagggugucaccgccgcuuguccucaugcaggggccaaaaguuuuuauaagaaucugaucuggcucgugaaaaagggaaacagcuacccaaaauuaucuaaguccuauauaaaugacaagggcaaagaaguacugguucuuuggggcauccaccaccccucaacgagcgcugaucaacagaguauuuaccagaacgccgacgcguacguguucgucgggacuucucgcuauuccaagaaauuuaagccugagaucgcaauucgaccaaaagugcgugaucaggagggaagaaugaauuacuauuggaccuugguggaacccggugacaagaucacauucgaggccacuggcaaccuggucguuccuagguacgcuuuugccauggaacggaacgcagggagcggaauaauuaucucggauaccccagugcaugacugcaauacaaccugucaaacgccgaaaggcgcuauuaacacuucucuacccuuccagaauauccacccuaucacaauugguaagugcccaaaguauguaaaauccaccaagcuccgccuggccacugggcuuagaaacgugcccucaauacagaguaggggacuguuuggcgcgaucgccggcuucauugaagggggauggacagguauggucgacggcugguacggguaucaucaccagaaugaacaaggaagcggcuacgcagcugauuugaaauccacccagaacgccaucgacgagauaacgaauaaggugaacucuguuauugagaaaaugaauacccaguuuacagcuguggguaaggaguucaaccaccucgagaagcggaucgaaaaucugaacaaaaaggucgaugacggguucuuagauaucuggacuuacaaugcccagcugcucgugcuucuggagaacgaacgcaccuuggacuaucaugauagcaauguuaaaaaccuauacgagaagguacgaucacaacugaaaaacaaugcaaaggagauuggcaacggauguuuugaguucuaucacaagugcgacaauacauguauggagagugugaaaaacggcacuuacgauuauccuaaguacuccgaagaggccaaacucaauagagaagagaucgacggggucaagcuggagagcaccaggauuuaucagauacuugcuaucuacucuacaguggcgucaagucuggucuuggugguuagccucggagcaauuuccuuuuggaugugcucuaacgguucgcugcagugccggaucuguaucuga

SEQ ID NO: 132937 - RNA, 1701 nt, Artificial Sequence
  derived and/or modified CDS sequence (opt3) from hemagglutinin__InfluenzaA__ADG57091
auggaggccauccuggugguccuccuuuacaccuucgcuacagcaaacgccgacacucugugcauuggauaucacgcgaauaacagcacggauaccguugacacaguguuggaaaagaauguaacugugacccauuccgucaacuuacuggaggauaaacacaaugggaagcuauguaaacucagaggaguggcuccccugcaucuugguaagugcaacauagccggcuggauccuggggaauccugaaugugagucuuugucaacagcaaguagcugguccuacauuguugaaaccucuucgucagacaacggaacuugcuauccaggcgauuuuaucgacuacgaggagcucagggaacagcugagcaguguguccucuuucgagcgguuugaaauuuucccgaaaacaagcuccuggcccaaucacgauucaaacaagggugucaccgccgcuuguccucaugcaggggccaagaguuuuuauaaaaaucugaucuggcucgugaagaaaggaaacagcuacccaaaguuaucuaaauccuauauaaaugacaagggcaaggagguacugguucuuuggggcauccaccaccccucaacgagcgcugaucaacagaguuuguaccagaacgccgacgcguacguguucgucgggucuucccgcuauagcaaaaaguuuaaaccugagauugcaauccgaccaaaggugcgugaucaggaaggaagaaugaauuacuauuggacucugguggagcccggugacaaaauuaccuucgaagccacaggcaaccuagucguuccuagguacgcuuuugccauggagcggaacgcagggucgggaaucauaauuucugauacuccagugcaugacugcaauaccacaugucaaaccccgaagggcgcuaucaacacgucccuccccuuccacaauauucauccuaucacuaucgguaaaugcccaaaguauguaaagucaacaaaacugcgccuugccaccgggcugagaaacgugcccaguauucagagcaggggauuguuuggcgcgauagccggcuucaucgaacggggguggacuggaauggucgacgguugguacggcuaucaccaccagaaugagcagggguccggauacgcagcugaucucaagucuacacaaaacgccauugacgagaucaccaauaaagugaacagcguuauagaaaagaugaauacgcaguuuaccgcugugggcaaagaguucaaccaucuggaaaagcgcauugagaauuuaaacaagaaagucgaugacgguuuccuggauaucuggacauacaaugccgaacuccuugugcuguuggagaacgagcgaacucuagacuaucacgauucaaauguaaagaaccuguacgaaaaaguuagaagucagcucaagaacaaugcaaaagagaucgggaacggcuguuuugaguucuaucauaagugcgacaauaccuguauggaauccgugaagaacggaacauacgauuauccuaaauacagcgaagaggccaagcugaauagggaggaaauugacggcgucaaacuugagucuacucggaucuaucagauucuggcuauauacucaaccguggcgaguagcuugguccucgugguuucccugggggcaaucucuuuuuggaugugcucgaacggcagcuuacaaugccguauuuguaucuga

SEQ ID NO: 132938 - RNA, 1701 nt, Artificial Sequence
  derived and/or modified CDS sequence (opt3) from hemagglutinin__InfluenzaA__ADG57092
augaaggccauccuggugguccuccuuuacaccuucgcuacagcaaacgccgacacucugugcauuggcuaucacgcgaauaacagcacggauaccguugacacaguguuggagaaaaauguaacugugacccauuccgucaacuuacuggaagauaagcacaaugggaaacuauguaagcucagaggaguggcuccccugcaucuugguaaaugcaacauagccggcuggauccuggggaauccugagugugaaucuuugucaacagcaaguagcugguccuacauuguugagaccucuucgucagacaacggaacuugcuauccaggcgauuuuaucgacuacgaggagcucagggagcagcugagcaguguguccucuuucgaacgguuugagauuuucccgaagacaagcuccuggcccaaucacgauucaaacaagggugucaccgccgcuuguccucaugcaggggccaaaaguuuuuauaagaaucugaucuggcucgugaaaaagggaaacagcuacccaaaauuaauaaagucuuauaucaaugacaagggcaaagaaguacugguucuuuggggcauucaccaccccuccacgucagcugaucaacagagcuuguaccagaacgccgacgcguacguguucgucgggaccagucgcuauucuaagaaauuuaagccugagaucgcaauucgaccaaaagugcgugaucaggagggaagaaugaauuacuauuggacucugguggaacccggugacaagaucacauucgaggccacuggcaaccuagucguuccuagguacgcuuuugccauggaacggaacgcaggguccggaauaauuaucagcgauaccccagugcaugacugcaauacaaccugucaaacgccgaaaggcgcuauuaacacuucgcuccccuuccagaauauccacccuaucacaauugguaagugcccaaaguauguaaaaucuaccaagcugcgccuugccacugggcugagaaacgugcccuccauacagucaaggggauuguuuggcgcgaucgccggcuucauugaagggggauggacagguauggucgacggcugguacggguaucaucaccagaaugaacaaggaaguggcuacgcagcugaucucaaaagcacccagaacgccaucgacgagauaacgaauaaggugaacuccguuauugagaaaaugaauacccaguuuacagcuguggguaaggaguucaaccaccuggaaaagcggaucgaaaauuuaaacaaaaaggucgaugacggguuccuggauaucuggacuuacaaugccgagcuccuugugcuguuggaaaacgagcgcacccuagacuaucaugauucuaauguaaagaaccuguacgagaagguucgaagccagcucaaaaacaaugcaaaggaaauuggcaacggauguuuugaguucuaucacaagugcgacaauacauguauggaaucagugaaaaacggcacuuacgauuauccuaaguacagugaggaagccaaacugaauagagaggagaucgacggggucaaacuugaauccaccaggauuuaucaaauacuggcuaucuacagcacaguggcgucuucauugguccucgugguuagucugggagcaauuagcuuuuggaugugcuccaacgguucuuuacagugccggaucuguaucuga

SEQ ID NO: 132939 - RNA, 1701 nt, Artificial Sequence
  derived and/or modified CDS sequence (opt3) from hemagglutinin__InfluenzaA__ADG57093
auggaggccauccuggugguccuccuuuacaccuucgcuacagcaaacgccgacacucugugcauuggcuaucacgcgaauaacagcacggauaccguugacacaguguuggaaaagaauguaacugugacccauuccgucaacuuacuggaggauaaacacaaugggaagcuauguaaacucagaggaguggcuccccugcaucuugguaagugcaacauagccggcuggauccuggggaauccugaaugugagucuuugucaacagcaaguagcugguccuacauuguugaaaccucuucgucagacaacggaacuugcuauccaggcgauuuuaucgacuacgaggagcucagggaacagcugagcaguguguccucuuucgagcgguuugaaauuuucccgaaaacaagcuccuggcccaaucacgauucaaacaagggugucaccgccgcuuguccucaugcaggggccaagaguuuuuauaaaaaucugaucuggcucgugaagaaaggaaacagcuacccaaaguuaucuaaauccuauauaaaugacaagggcaaggagauccugguacuuuggggcauucaccaccccucaacgagcgcugaucaacagaguuuguaccagaacgccgacgcguacguuuucguguggucuucccgcuauagcaaaaaguuuaaaccugagaucgcaauucgaccaaagguccgugaucaggaagggagaaugaauuacuauuggacucugguggagcccggagacaaaaucaccuucgaagccacagguaaccuacucgugccuagguacgcuuuugccauggagcggaacgcaggcucggggauaauuaucucugauacuccaguccaugacugcaauaccacaugucaaaccccgaagggagcuauuaacacgucccugcccuuccacaauauccauccuaucacuauuggcaaaugcccaaaguauguuaagucaacaaaacuucgccuggccaccgguuugagaaacgugcccaguauacagagcagggggcucuuuggagcgaucgccggcuucauugaaggcggguggacuggaaugguagacgguugguacggcuaucaccaccagaaugagcagggguccggauacgcagcugaucugaagucuacacaaaacgccaucgacgagauaaccaauaaagugaacagcgucauugaaaagaugaauacgcaguuuaccgcugugggcaaagaguucaaccauuuagaaaagcggaucgagaaucugaacaagaaaguugaugacgguuuccucgauaucuggacauacaaugccgaacuucugguguugcuagagaacgagcgcacucuggacuaucacgauucaaaugucaagaaccucuacgaaaaagugcgaagucagcugaagaacaaugcaaaagagauugggaacggcuguuuugaguucuaucauaagugcgacaauaccuguauggaauccguaaagaacggaacauacgauuauccuaaauacagcgaagaggccaaacuuaauagagaggaaaucgacggcguuaagcuggagucuacuaggauuuaucagauauuggcuaucuacucaaccguggcgaguagccucguccugguggucuccuuaggggcaauuucuuuuuggaugugcucgaacggaagccugcaaugccggaucuguaucuga

SEQ ID NO: 132940 - RNA, 1701 nt, Artificial Sequence
  derived and/or modified CDS sequence (opt3) from hemagglutinin__InfluenzaA__ADG57094
augaaggccauccuggugguccuccuuuacaccuucgcuacagcaaacgccgacacucugugcguuggcuaucacgcgaauaacagcacggauaccguggacacaguauuggagaaaaaugugacugucacccauuccgugaacuuacuggaagauaagcacaaugggaaacuauguaagcucagaggaguugcuccccugcaucuugguaaaugcaacauugccggcuggauacuggggaauccugagugugaaucuuugucaacagcaaguagcugguccuacaucguggagaccucuucgucagacaacggaacuugcuauccaggcgauuuuauugacuacgaggagcucagggagcagcugagcagugucuccucuuucgaacgguuugagaucuucccgaagacaagcuccuggcccaaucacgauucaaacaagggugugaccgccgcuuguccucaugcaggggccaaaaguuuuuauaagaaucugauuuggcucguaaagaagggaaacagcuacccaaaauuaucuaaguccuauaucaaugacaagggcaaagaaguucuggugcuuuggggcauacaccaccccucaacgagcgcugaucaacagaguuuguaccagaacgccgacgcguacgucuucguggggacuucucgcuauuccaagaaauuuaagccugagaucgcaauucgaccaaaagugcgugauagagagggaaggaugaauuacuauuggacccuggucgaacccggugacaagaucacauucgaggccacuggcaaccuaguugugccucgguacgcuuuugccauggaacgcaacgcagggagcggaauuaucauaucggauaccccaguacaugacugcaauacaaccugucagacgccgaaaggcgcuauuaacacuucucuccccuuccaaaauauccacccuauuacaaucgguaagugcccaaaguaugugaaauccaccaagcugagacuugccacugggcugaggaacguccccucaauccagagucggggauuguuuggcgcgauugccggcuucauagaagggggauggacagguaugguggacggcugguacggguaucaucaccagaaugaacagggaagcggcuacgcagcugaucucaaauccacccaaaacgccaucgacgagauuacgaauaagguuaacucugugaucgagaaaaugaauacccaguuuacagcugucgguaaggaguucaaccaccuggaaaagcgcauagaaaauuuaaacaaaaagguggaugacggguuccuggauauuuggacuuacaaugccgagcuccuuguacuguuggaaaacgagcgaacccuagacuaucaugauagcaauguuaaaaaccuguacgagaaggugagaucacagcucaaaaacaaugcaaaggaaaucggcaacggauguuuugaguucuaucacaagugcgacaauacauguauggaaagugucaaaaacggcacuuacgauuauccuaaguacuccgaggaagccaaacugaauagggaggagaucgacggggugaaacuugaaagcacccggauuuaucagauccuggcuauuuacucuacagucgcgucaaguuuggugcucguugugagccugggagcaauauccuuuuggaugugcucuaacgguucguuacaaugccguaucuguauuuga

SEQ ID NO: 132941 - RNA, 1701 nt, Artificial Sequence; identical to SEQ ID NO: 130717
  derived and/or modified CDS sequence (opt3) from hemagglutinin__InfluenzaA__ADG57095

SEQ ID NO: 132942 - RNA, 1701 nt, Artificial Sequence
  derived and/or modified CDS sequence (opt3) from hemagglutinin__InfluenzaA__ADG57097
auggaggccauccuggugguccuccuuuacaccuucgcuacagcaaacgccgacacucugugcauuggcuaucacgcgaauaacagcacggauaccguugacacaguguuggaaaagaauguaacugugacccauuccgucaacuuacuggaggauaaacacaaugggaagcuauguaaacucagaggaguggcuccccugcaucuugguaagugcaacauagccggcuggauccuggggaauccugaaugugagucuuugucaacagcaaguagcugguccuacauuguugaaaccucuucgucagacaacggaacuugcuauccaggcgauuuuaucgacuacgaggagcucagggaacagcugagcaguguguccucuuucgagcgguuugaaauuuucccgaaaacaagcuccuggcccaaucacgauucaaacaagggugucaccgccgcuuguccucaugcaggggccaagaguuuuuauaaaaaucugaucuggcucgugaagaaaggaaacagcuacccaaaguuaucuaaauccuauauaaaugacaagggcaaggagguacugguucuuuggggcauccaccaccccucaacgagcgcugaucaacagaguuuguaccagaacgccgacgcguacguguucgucgggucuucccgcuauagcaaaaaguuuaaaccugagauugcaauccgaccaaaggugcguggacaggaagguagaaugaauuacuauuggacucugguggagcccggcgauaaaauuaccuucgaagccacagggaaccuagucguuccuagguacgcuuuugccauggagcggaacgcaggaucgggcaucauaauuucugacacuccagugcaugauugcaauaccacaugucaaaccccgaagggugcuaucaacacgucccuccccuuccacaauauucauccuaucacuaucgggaaaugcccaaaguauguaaagucaacaaaacugcgccuugccaccggacugagaaacgugcccaguauucagagcaggggcuuguuuggcgcgauagccggguucaucgaaggagguuggacuggcauggucgacgggugguacggauaucaccaccagaaugagcagggcuccgguuacgcagcugaccucaagucuacacaaaacgccauugaugagaucaccaauaaagugaacagcguuauagaaaagaugaauacgcaguuuaccgcuguggggaaagaguucaaccaucuggaaaagcggauugagaauuuaaacaagaaagucgacgauggcuuccuggacaucuggacauacaaugccgaacuccuugugcuguuggagaacgagcgcacucuagauuaucacgacucaaauguaaagaaccuguacgaaaaaguucgaagucagcucaagaacaaugcaaaagagaucggaaacggcuguuuugaguucuaucauaagugcgauaauaccuguauggaauccgugaagaacgggacauacgacuauccuaaauacagcgaagaggccaagcugaauagagaggaaauugauggagucaaacuugagucuacuaggaucuaucagauucuggcuauauacucaaccguggcgaguagcuugguccucgugguuucccugggugcaaucucuuuuuggaugugcucgaacggcagcuuacaaugccggauuuguaucuga

SEQ ID NO: 132943 - RNA, 1701 nt, Artificial Sequence; identical to SEQ ID NO: 131881
  derived and/or modified CDS sequence (opt3) from hemagglutinin__InfluenzaA__ADG57098

SEQ ID NO: 132944 - RNA, 1701 nt, Artificial Sequence
  derived and/or modified CDS sequence (opt3) from hemagglutinin__InfluenzaA__ADG57099
augaaggccauccuggugguccuccuuuacaccuucgcuacagcaaacgccgacacucugugcauuggcuaucacgcgaauaacagcacggauaccguugacacaguguuggagaaaaauguaacugugacccauuccgucaacuuacuggaagauaagcacaaugggaaacuauguaagcucagaggaguggcuccccugcaucuugguaaaugcaacauagccggcuggauccuggggaauccugagugugaaucuuugucaacagcaaguagcugguccuacauuguugagaccucuucgucagacaacggaacuugcuauccaggcgauuuuaucgacuacgaggagcucagggagcagcugagcaguguguccucuuucgaacgguuugagauuuucccgaagacaagcuccuggcccaaucacgauucaaacaagggugucaccgccgcuuguccucaugcaggggccaaaaguuuuuauaagaaucugaucuggcucgugaaaaagggaaacagcuacccaaaauuaucuaaguccuauauaaaugacaagggcaaagaaguacugguucuuuggggcauccaccaccccucaacgagcgcugaucaacagaguuuguaccagaacgccgacgcguacguguucgucgggacuucucgcuauuccaagaaauuuaagccugagauugcaauccgaccaaaagugcgugaucaggagggaagaaugaauuaccauuggacccugguggaacccggugacaagauuacauucgaggccacuggcaaccuagucguuccuagguaugcuuuugccauggaacggaacgcagggagcggaaucauaauuaccgauacaccagugcacgacugcaauaccacgugucaaacuccgaaaggcgcuguaaacacaucgcuccccuuccagaauauccauccuauuaccaucgguaagugcccaaaguacgugaaaucuacuaagcugcgccuugccacagggcugagaaacguccccuccauccagucaaggggauuguuuggcgcgauugccggcuucauagaagggggauggaccgguaugguggacggcugguauggguaccaccaccagaaugaacaaggaaguggcuaugcagcugaucucaaaagcacgcagaacgccaucgacaagauuaccaauaaaguuaacuccgugaucgagaagaugaauacacaguuuacugcugucgguaaggaguucaaccaucuggaaaaacggauagagaauuuaaacaagaaaguggaugacggguuccuggauauuuggaccuacaaugccgaacuccuuguacuguuggagaacgaacgcacacuagacuaccacgauucuaauguuaagaaccuguaugagaaagugcgaagccagcucaagaacaaugcaaaggagaucggcaacggauguuuugaguucuaccauaaaugcgacaauacuuguauggaaucagucaagaacggcaccuaugauuacccuaaauauagugaagaggccaagcugaauagagaagagaucgacggggugaaacuugaguccacaaggauuuaccaaauccuggcuauuuauagcaccgucgcgucuucauuggugcucguugugagucugggagcaaucagcuuuuggaugugcuccaacgguucuuuacagugccggauauguauuuga

SEQ ID NO: 132945 - RNA, 1701 nt, Artificial Sequence
  derived and/or modified CDS sequence (opt3) from hemagglutinin__InfluenzaA__ADG57100
augaaggccauccuggugguccuccuuuacaccuucgcuacagcaaacgccgacacucugugcauuggcuaucacgcgaauaacagcacggauaccguugacacaguguuggagaaaaauguaacugugacccauuccgucaacuuacuggaagauaagcacaaugggaaacuauguaagcucagaggaguggcuccccugcaucuugguaaaugcaacauagccggcuggauccuggggaauccugagugugaaucuuugucaacagcaaguagcugguccuacauuguugagaccucuucgucagacaacggaacuugcuauccaggcgauuuuaucgacuacgaggagcucagggagcagcugagcaguguguccucuuucgaacgguuugagauuuucccgaagacaagcuccuggcccaaucacgauucaaacaagggugucaccgccgcuuguccucaugcaggggccaaaaguuuuuauaagaaucugaucuggcucgugaaaaagggaaacagcuacccaaaauuaucuaaguccuauauaaaugacaagggcaaagaaguacugguucuuuggggcauccaccaccccucaacgagcgcugaucaacagaguuuguaccagaacgccgacgcguacguguucgucgggacuucucgcuauuccaagaaauuuaagccugagauugcaauccgaccaaaagugcgugaucaggagggaagaaugaauuacuauuggacccugguggaacccggugacaagauuacauucgaggccacuggcaaccuagucguuccuagguacgcuuuugccauggaacggaacgcagggagcggaaucauaauuucggauaccccagugcaugacugcaauacaaccugucaaacgccgaaaggcgcuaucaacacuucucuccccuuccagaauauucacccuaucacaaucgguaagugcccaaaguauguaaaauccaccaagcugcgccuugccacugggcugagaaacgugcccucaauucagaguaggggauuguuuggcgcgauagccggcuucaucgaagggggauggacagguauggucgacggcugguacggguaucaucaccagaaugaacaaggaagcggcuacgcagcugaucucaaauccacccagaacgccauugacaagaucacgaauaaagugaacucuguuauagagaagaugaauacccaguuuacagcuggugggaaggaguucaaccaccuggaaaaacggauugagaauuuaaacaagaaaguggaugacggcuuccuggauaucuggacuuacaaugccgaacuccuuguccuguuggagaacgaacgcacccuagacuaucaugauagcaaugugaagaaccuguacgagaaaguacgaucacagcucaagaacaaugcaaaggagaucggaaacggcuguuuugaguucuaucacaaaugcgacaauacauguauggaaaguguuaagaacgggacuuacgauuauccuaaauacuccgaagaggccaagcugaauagagaagagauugacggagugaaacuugagagcaccaggaucuaucaaauucuggcuauauacucuacagucgcgucaaguuuggugcucgucgugagccugggugcaaucuccuuuuggaugugcucuaacggcucguuacagugccggauuuguaucuga

SEQ ID NO: 132946 - RNA, 1701 nt, Artificial Sequence; identical to SEQ ID NO: 130717
  derived and/or modified CDS sequence (opt3) from hemagglutinin__InfluenzaA__ADG58939

SEQ ID NO: 132947 - RNA, 1701 nt, Artificial Sequence; identical to SEQ ID NO: 130717
  derived and/or modified CDS sequence (opt3) from hemagglutinin__InfluenzaA__ADG58940

SEQ ID NO: 132948 - RNA, 1701 nt, Artificial Sequence
  derived and/or modified CDS sequence (opt3) from hemagglutinin__InfluenzaA__ADG58941
augaaggccauccuggugguccuccuuuacaccuucgcuacagcaaacgccgacacucugugcauuggcuaucacgcgaauaacagcacggauaccguugacacaguguuggagaaaaauguaacugugacccauuccgucaacuuacuggaagauaagcacaaugggaaacuauguaagcucagaggaguggcuccccugcaucuugguaaaugcaacauagccggcuggauccuggggaauccugagugugaaucuuugucaacagcaaguagcugguccuacauuguugagaccucuucgucagacaacggaacuugcuauccaggcgauuuuaucgacuacgaggagcucagggagcagcugagcaguguguccucuuucgaacgguuugagauuuucccgaagacaagcuccuggcccaaucacgauucaaacaagggugucaccgccgcuuguccucaugcaggggccaaaaguuuuuauaagaaucugaucuggcucgugaaaaagggaaacagcuacccaaaauuaucuaaguccuauauaaaugacaagggcaaagaaguacugguucuuuggggcauccaccaccccucaacgagcgcugaucaacagaguuuguaccagaacgccgacacuuacguguucgucgggaccucucgcuauuccaagaaauuuaagccugagauugcgauccgaccaaaagugcgugaucaggagggaagaaugaauuacuauuggacacugguggaacccggugacaagauuacuuucgaggcaaccggcaaccuagucguuccuagguacgccuuugcuauggaacggaacgccgggagcggaaucauaauuucggauacaccagugcaugacugcaauaccacgugucaaacuccgaaaggcgcaaucaacacaucucuccccuuccagaauauucacccuaucaccaucgguaagugcccaaaguauguaaaauccacuaagcugcgccuugcuacagggcugagaaacgugcccucaauucagaguaggggauuguuuggcgccauagcgggcuucaucgaagggggauggaccgguauggucgacggcugguacggguaucaucacgaaaaugagcagggaagcggcuacgccgcagaucucaaauccacgcaaaacgcuauugacgagaucaccaauaaggugaacucuguuauagaaaagaugaauacacaguuuacugccguggguaaggaguucaaccaccuggaaaagcggauugagaauuuaaacaaaaagaucgaugacggguuccuggauaucuggaccuacaaugcugaacuccuuguccuguuggagaacgagcgcacacuagacuaucaugauagcaaugugaaaaaccuguacgaaaagguacgaucacagcucaaaaacaaugccaaggagauuggcaacggauguuuugaguucuaucacaagugcgacaauacuuguauggaaaguguuaaaaacggcaccuacgauuauccuaaguacuccgaagaggcaaaacugaauagagaggaaaucgacggggugaaacuugagagcacaaggauuuaucagauacuggccaucuacucuaccgucgcuucaaguuuggugcucgucgugagccugggagcgauuuccuuuuggaugugcucuaacgguucguuacaaugccggaucuguaucuga

SEQ ID NO: 132949 - RNA, 1701 nt, Artificial Sequence
  derived and/or modified CDS sequence (opt3) from hemagglutinin__InfluenzaA__ADG58942
augaaggccauccuggugguccuccuuuacaccuucgcuacagcaaacgccgacacucugugcauuggcuaucacgcgaauaacagcacggauaccguugacacaguguuggagaaaaauguaacugugacccauuccgucaacuuacuggaagauaagcacaaugggaaacuauguaagcucagaggaguggcuccccugcaucuugguaaaugcaacauagccggcuggauccuggggaauccugagugugaaucuuugucaacagcaaguagcugguccuacauuguugagaccucuucgucagacaacggaacuugcuauccaggcgauuuuaucgacuacgaggagcucagggagcagcugagcaguguguccucuuucgaacgguuugagauuuucccgaagacaagcuccuggcccaaucacgauucaaacaagggugucaccgccgcuuguccucaugcaggggccaaaaguuuuuauaagaaucugaucuggcucgugaaaaagggaaacagcuacccaaaauuaucuaaguccuauauaaaugacaagggcaaagaaguacugguucuuuggggcauccaccaccccucaacgagcgcugaucaacagaguuuguaccagaacgccgacacuuacguguucgucgggaccucucgcuauuccaagaaauuuaagccugagauugcgauccgaccaaaagugcgugaucaggagggaagaaugaauuacuauuggacacugguggaacccggugacaagauuacuuucgaggcaaccggcaaccuagucguuccuagguacgccuuugcuauggaacggaacgccgggagcggaaucauaauuucggauacaccagugcaugacugcaauaccacgugucaaacuccgaaaggcgcaaucaacacaucucuccccuuccagaauauucacccuaucaccaucgguaagugcccaaaguauguaaaauccacuaagcugcgccuugcuacagggcugagaaacgugcccucaauucagaguaggggauuguuuggcgccauagcgggcuucaucgaagggggauggaccgguauggucgacggcugguacggguaucuccaucagaaugaacaaggaagcggcuacgccgcagaucugaaauccacgcagaacgcuauugacgagaucaccaauaaggugaacucuguuauagagaaaaugaauacacaguuuacugccguggguaaggaguucaaccacuuagaaaagcggauugaaaaucugaacaaaaagaucgaugacggguuccucgauaucuggaccuacaaugcugagcuucuggucuugcuagaaaacgagcgcacacuggacuaucacgauagcaaugugaaaaaccucuacgagaagguacgaucacagcugaaaaacaaugccaaggaaauuggcaacggauguuuugaguucuaucauaagugcgacaauacuuguauggaaaguguuaaaaacggcaccuacgauuauccuaaguacuccgaggaagcaaaacuuaauagagaggagaucgacggggugaagcuggaaagcacaaggauuuaucaaauauuggccaucuacucuaccgucgcuucaagucucgugcuggucgugagcuuaggagcgauuuccuuuuggaugugcucuaacgguucgcugcagugccggaucuguaucuga

SEQ ID NO: 132950 - RNA, 1701 nt, Artificial Sequence; identical to SEQ ID NO: 130717
  derived and/or modified CDS sequence (opt3) from hemagglutinin__InfluenzaA__ADG58943

SEQ ID NO: 132951 - RNA, 1701 nt, Artificial Sequence
  derived and/or modified CDS sequence (opt3) from hemagglutinin__InfluenzaA__ADG58944
augaaggccauccuggugguccuccuuuacaccuucgcuacagcaaacgccgacacucugugcauuggcuaucacgcgaauaacagcacggauaccguugacacaguguuggagaaaaauguaacugugacccauuccgucaacuuacuggaagauaagcacaaugggaaacuauguaagcucagaggaguggcuccccugcaucuugguaaaugcaacauagccggcuggauccuggggaauccugagugugaaucuuugucaacagcaaguagcugguccuacauuguugagaccucuucgucagacaacggaacuugcuauccaggcgauuuuaucgacuacgaggagcucagggagcagcugagcaguguguccucuuucgaacgguuugagauuuucccgaagacaagcuccuggcccaaucacgauucaaacaagggugucaccgccgcuuguccucaugcaggggccaaaaguuuuuauaagaaucugaucuggcucgugaaaaagggaaacagcuacccaaaauuaucuaaguccuauauaaaugacaagggcaaagaaguacugguucuuuggggcauccaccaccccucaacgagcgcugaucaacagaguuuguaccagaacgccgacgcguacguguucgucgggacuucucgcuauuccaagaaauuuaagccugagauugcaauccgaccaaaagugcgugaucaggagggaagaaugaauuacuauuggacccugguggaacccggugacaagauuacauucgaggccacuggcaaccuacucgucccuagguacgcuuuugccauggaacggaacgcagggagcggaaucauaauuucggauaccccaguucaugacugcaauacaaccugucaaacgccgaaaggcgcuaucaacacuucucugcccuuccagaauauucacccuaucacaaucgguaagugcccaaaguaugugaaauccaccaaacuucgccuggccacuggguugagaaacguacccucaauucagaguaggggacucuuuggcgcgauagccggcuucaucgaagggggauggacagguaugguggacggcugguacggguaucaucaccagaaugaacaaggaagcggcuacgcagcugaucugaaguccacccagaacgccauugacgagaucacgaauaaggucaacucugugauagagaaaaugaauacccaguuuacagcuguugguaaggaguucaaccacuuagaaaagcggauugaaaaucugaacaaaaagguggaugacggguuccucgauaucuggacuuacaaugccgagcuucuggucuugcuagaaaacgagcgcacccuggacuaucaugauagcaaugugaaaaaccucuacgagaagguacgaucacagcugaaaaacaaugcaaaggaaaucggcaacggauguuuugaguucuaucacaagugcgacaauacauguauggaaaguguuaaaaacggcacuuacgauuauccuaaguacuccgaggaagccaaacuuaauagagaggagauugacggggugaagcuggaaagcaccaggaucuaucaaauuuuggcuauauacucuacagucgcgucaagucucgugcuggucgugagcuuaggagcaaucuccuuuuggaugugcucuaacgguucgcugcagugccggauuuguaucuga

SEQ ID NO: 132952 - RNA, 1701 nt, Artificial Sequence; identical to SEQ ID NO: 131515
  derived and/or modified CDS sequence (opt3) from hemagglutinin__InfluenzaA__ADG58946

SEQ ID NO: 132953 - RNA, 1701 nt, Artificial Sequence; identical to SEQ ID NO: 130717
  derived and/or modified CDS sequence (opt3) from hemagglutinin__InfluenzaA__ADG58947

SEQ ID NO: 132954 - RNA, 1701 nt, Artificial Sequence
  derived and/or modified CDS sequence (opt3) from hemagglutinin__InfluenzaA__ADG58948
augaaggccauccugauugugcuccuuuacaccuucgcuacagcaaacgccgacacucugugcauaggcuaucacgcgaauaacagcacggauaccgucgacacaguuuuggagaaaaaugugacuguaacccauuccgugaacuuacuggaagauaagcacaaugggaaacuauguaagcucagaggagucgcuccccugcaucuugguaaaugcaacaucgccggcuggauucuggggaauccugagugugaaucuuugucaacagcaaguagcugguccuacaucguggagaccucuucgucagacaacggaacuugcuauccaggcgauuuuauugacuacgaggagcucagggagcagcugagcaguguuuccucuuucgaacgguuugagaucuucccgaagacaagcuccuggcccaaucacgauucaaacaagggugugaccgccgcuuguccucaugcaggggccaaaaguuuuuauaagaaucugauauggcucgucaaaaagggaaacagcuacccaaaauuaucuaaguccuauaucaaugacaagggcaaagaagugcugguacuuuggggcauucaccaccccucaacgagcgcugaucaacagaguuuguaccagaacgccgacacuuacguuuucguggggaccucucgcuauuccaagaaauuuaagccugagaucgcgauucgaccaaaaguccgugaucaggagggaagaaugaauuacuauuggacacugguggaacccggugacaagaucacuuucgaggcaaccggcaaccuaguggucccuagguacgccuuugcuauggaacggaacgccgggagcggaauaauuaucucggauacaccaguucaugacugcaauaccacgugucaaacuccgaaaggcgcaauuaacacaucucuccccuuccagaauauccacccuaucaccauugguaagugcccaaaguaugugaaauccacuaagcugcgccuugcuacagggcugagaaacguacccucaauacagaguaggggauuguuuggcgccaucgcgggcuucauugaagggggauggaccgguaugguggacggcugguacggguaucaucaccagaaugaacaaggaagcggcuacgccgcagaucucaaauccacgcagaacgcuaucgacgagauaaccaauaaggucaacucugugauugagaaaaugaauacacaguuuacugccguugguaaggaguucaaccaccuggaaaagcggaucgaaaauuuaaacaaaaagaucgaugacggguuccuggauauuuggaccuacaaugcugagcuccuugugcuguuggaaaacgagcgcacacuagacuaucaugauagcaaugucaaaaaccuguacgagaaggugcgaucacagcucaaaaacaaugccaaggaaaucggcaacggauguuuugaguucuaucacaagugcgacaauacuuguauggaaaguguaaagaacggcaccuacgauuauccuaaguacuccgaggaagcaaaacugaauagagaggagauugacgggguuaaacuugaaagcacaaggauauaucaaauccuggccauuuacucuaccguggcuucaaguuugguccucguggucagccugggagcgaucuccuuuuggaugugcucuaacgguucguuacagugccggaucuguauuuga

SEQ ID NO: 132955 - RNA, 1701 nt, Artificial Sequence
  derived and/or modified CDS sequence (opt3) from hemagglutinin__InfluenzaA__ADG58949
augaaggccauccuggugguccuccuuuacaccuucgcuacagcaaacgccgacacucugugcauuggcuaucacgcgaauaacagcacggauaccguugacacaguguuggagaagaauguaacugugacccauuccgucaacuuacuggaagauaagcacaaugggaaacuauguaagcucagaggaguggcuccccugcaucuugguaaaugcaacauagccggcuggauccuggggaauccugagugugaaucuuugucaacagcaaguagcugguccuacauuguugagaccucuucgucagacaacggaacuugcuauccaggcgauuuuaucgacuacgaggagcucagggagcagcugagcaguguguccucuuucgaacgguuugagauuuucccgaagacaagcuccuggcccaaucacgauucaaacaagggugucaccgccgcuuguccucaugcaggggccaaaaguuuuuauaagaaucugaucuggcucgugaaaaagggaaacagcuacccaaaauuaucuaaguccuauauaaaugacaagggcaaagaaguacugguucuuuggggcauccaccaccccucaacgagcgcugaucaacagaguuuguaccagaacgccgacacuuacguguucgucgggaccucucgcuauuccaagaaauuuaagccugagauugcgauccgaccaaaagugcgugaucaggagggaagaaugaauuacuauuggacacugguggaacccggugacaagauuacuuucgaggcaaccggcaaccuagucguuccuagguacgccuuugcuauggaacggaacgccgggagcggaaucauaauuucggauacaucugugcaugacugcaauaccacgugucaaacuccaaaaggcgcaaucaacacaucccucccguuccagaauauucaccccaucaccaucgguaagugcccuaaguauguaaaaucaacuaagcugcgccuugcuacagggcugagaaacgugccaaguauucagagcaggggauuguuuggcgccauagcgggcuucaucgaagggggauggaccgguauggucgacggcugguacggguaucaucaccagaaugaacaaggauccggcuacgccgcagaucucaaaucuacgcagaacgcuauugacgagaucaccaauaaggugaacagcguuauagagaaaaugaauacacaguuuacugccguggguaaggaguucaaccaccuggaaaagcggauugaaaauuuaaacaaaaagaucgaugacggguuccuggauaucuggaccuacaaugcugagcuccuuguccuguuggaaaacgagcgcacacuagacuaucaugauucaaaugugaaaaaccuguacgagaagguacgaagucagcucaaaaacaaugccaaggaaauuggcaacggauguuuugaguucuaucacaagugcgacaauacuuguauggaauccguuaaaaacggcaccuacgauuaucccaaguacagcgaggaagcaaaacugaauagagaggagaucgacggggugaaacuugaaucuacaaggauuuaucaaauacuggccaucuacucaaccgucgcuaguagcuuggugcucgucgugucccugggagcgauuucuuuuuggaugugcucgaacgguagcuuacagugccggaucuguaucuga

SEQ ID NO: 132956 - RNA, 1701 nt, Artificial Sequence
  derived and/or modified CDS sequence (opt3) from hemagglutinin__InfluenzaA__ADG58951
augaaggccauccuggugguccuccuucacaccuucgcuacagcaaacgccgacacucugugcauuggcuaccaugcgaauaacagcacggauaccguugacacaguguuggagaaaaauguaacugugacccacuccgucaacuuacuggaagauaagcauaaugggaaacuauguaagcucagaggaguggcuccccugcaccuugguaaaugcaacauagccggcuggauccuggggaauccugagugugaaucuuugucaacagcaaguagcugguccuauauuguugagaccucuaacucgggaaauggcacuugcuacccaggugaauuuaucgacuaugaggagcucagggaacagcugucaagcgugaguuccuucgagcgguuugaaauuuucccgaagacaucuagcuggcccaaccaugauuccaauaagggggucaccgccgcuuguccucacgcaggagccaaaucauuuuacaagaaccugaucuggcucgugaaaaagggcaauaguuauccaaaauuaagcaagucuuacauaaacgacaagggcaaagagguacugguucuuugggggauccaccaucccuccacgucagcugaucaacagagcuuguaucagaaugccgacgcguacguguucgucggaaccagucgcuacucuaagaaauuuaagccugagauugcaauccgaccaaaagugcgugaucaggaagguagaaugaacuauuacuggacucugguggagcccggcgacaagauuacauucgaagccacugggaaccuagucguuccuagguaugcuuuugccauggagcggaaugcaggauccggcaucauaauuagcgauaccccagugcacgacugcaacacaaccugucaaacgccgaaaggugcuaucaauacuucgcuccccuuccagaacauucauccuaucacaaucgggaagugcccaaaguacguaaaaucuaccaagcugcgccuugccacuggacugagaaaugugcccuccauucagucaaggggcuuguuuggcgcgauagccggguucaucgaaggagguuggacaggcauggucgaugggugguauggauaccaccaccagaacgagcaaggcagugguuaugcagcugaccucaaaagcacccagaaugccauugacgagaucacgaacaagguaaauuccguuauagaaaagaugaacacccaguuuacagcuguggggaaggaguucaaucaucuggaaaagcggauugagaacuuaaauaaaaaggucgaugacggcuuccuggauaucuggacuuacaacgccgaacuccuugugcuguuggagaaugagcgcacccuagacuaccacgauucuaacgugaaaaaccuguaugaaaagguucgaagccagcucaaaaauaacgcaaaggagaucggaaauggcuguuuugaguucuaccauaagugcgacaacacauguauugaaucagugaaaaaugggacuuaugauuacccuaaguauagugaagaggccaaacugaacagagaggaaaucgacggagucaaacuugaguccaccaggauuuaccaaauacuggcuaucuauagcacaguggcgucuucauugguccucgugguuagucugggugcaauuagcuuuuggaugugcuccaauggcucuuuacagugccggaucuguaucuga

SEQ ID NO: 132957 - RNA, 1701 nt, Artificial Sequence; identical to SEQ ID NO: 132956
  derived and/or modified CDS sequence (opt3) from hemagglutinin__InfluenzaA__ADG58952

SEQ ID NO: 132958 - RNA, 1701 nt, Artificial Sequence; identical to SEQ ID NO: 132956
  derived and/or modified CDS sequence (opt3) from hemagglutinin__InfluenzaA__ADG58953

SEQ ID NO: 132959 - RNA, 1701 nt, Artificial Sequence; identical to SEQ ID NO: 132956
  derived and/or modified CDS sequence (opt3) from hemagglutinin__InfluenzaA__ADG58954

SEQ ID NO: 132960 - RNA, 1701 nt, Artificial Sequence; identical to SEQ ID NO: 132956
  derived and/or modified CDS sequence (opt3) from hemagglutinin__InfluenzaA__ADG58955

SEQ ID NO: 132961 - RNA, 1701 nt, Artificial Sequence; identical to SEQ ID NO: 132956
  derived and/or modified CDS sequence (opt3) from hemagglutinin__InfluenzaA__ADG58956

SEQ ID NO: 132962 - RNA, 1701 nt, Artificial Sequence
  derived and/or modified CDS sequence (opt3) from hemagglutinin__InfluenzaA__ADG58957
augaaggccauccuggugguccuccuucacaccuucgcuacagcaaacgccgacacucugugcauuggcuaccaugcgaauaacagcacggauaccguugacacaguguuggagaaaaauguaacugugacccacuccgucaacuuacuggaagauaagcauaaugggaaacuauguaagcucagaggaguggcuccccugcaccuugguaaaugcaacauagccggcuggauccuggggaauccugagugugaaucuuugucaacagcaaguagcugguccuauauuguugagaccucuaacucgggaaauggcacuugcuacccaggugaauuuaucgacuaugaggagcucagggaacagcugucaagcgugaguuccuucgagcgguuugaaauuuucccgaagacaucuagcuggcccaaccaugauuccaauaagggggucaccgccgcuuguccucacgcaggagccaaaucauuuuacaagaaccugaucuggcucgugaaaaagggcaauaguuauccaaaauuaagcaagucuuacauaaacgacaagggcaaagagguacugguucuuugggggauccaccaucccuccacgucagcugaucaacagagcuuguaucagaaugccgacgcguacguguucgucggaaccagucgcuacucuaagaaauuuaagccugagauugcaauccgaccaaaagugcgugaucaggaagguagaaugaacuauuacuggacucugguggagcccggcgacaagauuacauucgaagccacugggaaccuagucguuccuagguaugcuuuugccauggagcggaaugcaggauccggcaucauaauuagcgauaccccagugcacgacugcaacacaaccugucaaacgccgaaaggugcuaucaauacuucgcuccccuuccagaacauucauccuaucacaaucgggaagugcccaaaguacguaaaaucuaccaagcugcgccuugccacuggacugagaaaugugcccuccauucagucaaggggcuuguuuggcgcgauagccggguucaucgaaggagguuggacaggcauggucgaugggugguauggauaccaccaccagaacgagcaaggcagugguuaugcagcugaccucaaaagcacccagaaugccauugacgagaucacgaacaagguaaauuccguuauagaaaagaugaacacccaguuuacagcuguggggaaggaguucaaucaucuggaaaagcggauugagaacuuaaauaaaaaggucgaugacggcuuccuggauaucuggacuuacaacgccgaacuccuugugcuguuggagaaugagcgcacccuagacuaccacgauucuaacgugaaaaaccuguaugaaaagguucgaagccagcucaaaaauaacgcaaaggagaucggaaauggcuguuuugaguucuaccauaagugcgacaacacauguauggaaucagugaaaaaugggacuuaugauuacccuaaguauagugaagaggccaaacugaacagagaggaaauugacggagucaaacuugaguccaccaggaucuaccaaauucuggcuauauauagcacaguggcgucuucauugguccucgugguuagucugggugcaaucagcuuuuggaugugcuccaauggcucuuuacagugccggauuuguaucuga

SEQ ID NO: 132963 - RNA, 1701 nt, Artificial Sequence
  derived and/or modified CDS sequence (opt3) from hemagglutinin__InfluenzaA__ADG58959
augaaggccauccuggugguccuccuuuacaccuucgcuacagcaaacgccgacacucugugcauuggcuaucacgcgaauaacagcacggauaccguugacacaguguuggagaaaaauguaacugugacccauuccgucaacuuacuggaagauaagcacaaugggaaacuauguaagcucagaggaguggcuccccugcaucuugguaaaugcaacauagccggcuggauccuggggaauccugagugugaaucuuugucaacagcaaacaguuggagcuacauuguugagaccuccucuucggacaauggaacuugcuauccaggcgauuuuaucgacuacgaggagcucagggagcagcugucaagcgugaguuccuucgaacgguuugagauuuucccgaagacaucuagcuggcccaaccacgauuccaauaagggugucaccgccgcuuguccucaugcaggggccaaaucauuuuauaagaaccugaucuggcucgugaaaaagggaaauaguuacccaaaauuaagcaagucuuauauaaacgacaagggcaaagaaguacugguucuuuggggcauccaccaccccuccacgucagcugaucaacagagcuuguaccagaaugccgacgcguacguguucgucgggacuucccgcuauucuaagaaauuuaagccugagauugcaauccgaccaaaagugcgugaucaggagggaagaaugaacuacuauuggacccugguggaacccggugacaagauuacauucgaggccacuggcaaccuagucguuccuagguacgcuuuugccauggaacggaaugcaggguccggaaucauaauuagcgauaccccagugcaugacugcaacacaaccugucaaacgccgaaaggcgcuaucaauacuucgcuccccuuccagaacauucacccuaucacaaucgguaagugcccaaaguauguaaaaucuaccaagcugcgccuugccacugggcugagaaaugugcccuccauucagucaaggggauuguuuggcgcgauagccggcuucaucgaagggggauggacagguauggucgacggcugguacggguaucaucaccagaacgaacaaggaaguggcuacgcagcugaucucaaaagcacccagaaugccauugacgagaucacgaacaaggugaauaguguuauagagaaaaugaacacccaguuuacagcuguggguaaggaguucaaucaccuggaaaagcggauugaaaacuuaaauaaaaaggucgaugacggguuccuggauaucuggacuuacaacgccgagcuccuugugcuguuggaaaaugagcgcacccuagacuaucaugauucuaacguaaagaaccuguacgagaagguucgaagccagcucaaaaauaacgcaaaggaaaucggcaauggauguuuugaguucuaucacaagugcgacaacacauguauggaaucagugaaaaauggcacuuacgauuauccuaaguacagugaggaagccaaacugaacagagaggagauugacggggucaaacuugaauccaccaggaucuaucaaauucuggcuauauacagcacaguggcgucuucauugguccucgugguuagucugggagcaaucagcuuuuggaugugcuccaaugguucuuuacagugccggauuuguaucuga

SEQ ID NO: 132964 - RNA, 1701 nt, Artificial Sequence; identical to SEQ ID NO: 132881
  derived and/or modified CDS sequence (opt3) from hemagglutinin__InfluenzaA__ADG58960

SEQ ID NO: 132965 - RNA, 1701 nt, Artificial Sequence; identical to SEQ ID NO: 132881
  derived and/or modified CDS sequence (opt3) from hemagglutinin__InfluenzaA__ADG58961

SEQ ID NO: 132966 - RNA, 1701 nt, Artificial Sequence; identical to SEQ ID NO: 132881
  derived and/or modified CDS sequence (opt3) from hemagglutinin__InfluenzaA__ADG58962

SEQ ID NO: 132967 - RNA, 1701 nt, Artificial Sequence; identical to SEQ ID NO: 132881
  derived and/or modified CDS sequence (opt3) from hemagglutinin__InfluenzaA__ADG58963

SEQ ID NO: 132968 - RNA, 1701 nt, Artificial Sequence; identical to SEQ ID NO: 132881
  derived and/or modified CDS sequence (opt3) from hemagglutinin__InfluenzaA__ADG58964

SEQ ID NO: 132969 - RNA, 1701 nt, Artificial Sequence; identical to SEQ ID NO: 132881
  derived and/or modified CDS sequence (opt3) from hemagglutinin__InfluenzaA__ADG58965

SEQ ID NO: 132970 - RNA, 1701 nt, Artificial Sequence; identical to SEQ ID NO: 132881
  derived and/or modified CDS sequence (opt3) from hemagglutinin__InfluenzaA__ADG58966

SEQ ID NO: 132971 - RNA, 1701 nt, Artificial Sequence; identical to SEQ ID NO: 132881
  derived and/or modified CDS sequence (opt3) from hemagglutinin__InfluenzaA__ADG58967

SEQ ID NO: 132972 - RNA, 1701 nt, Artificial Sequence; identical to SEQ ID NO: 132881
  derived and/or modified CDS sequence (opt3) from hemagglutinin__InfluenzaA__ADG58968

SEQ ID NO: 132973 - RNA, 1701 nt, Artificial Sequence; identical to SEQ ID NO: 130717
  derived and/or modified CDS sequence (opt3) from hemagglutinin__InfluenzaA__ADG59628

SEQ ID NO: 132974 - RNA, 1701 nt, Artificial Sequence; identical to SEQ ID NO: 130717
  derived and/or modified CDS sequence (opt3) from hemagglutinin__InfluenzaA__ADG59629

SEQ ID NO: 132975 - RNA, 1701 nt, Artificial Sequence; identical to SEQ ID NO: 130717
  derived and/or modified CDS sequence (opt3) from hemagglutinin__InfluenzaA__ADG59630

SEQ ID NO: 132976 - RNA, 1701 nt, Artificial Sequence; identical to SEQ ID NO: 130717
  derived and/or modified CDS sequence (opt3) from hemagglutinin__InfluenzaA__ADG59631

SEQ ID NO: 132977 - RNA, 1701 nt, Artificial Sequence; identical to SEQ ID NO: 130717
  derived and/or modified CDS sequence (opt3) from hemagglutinin__InfluenzaA__ADG59632

SEQ ID NO: 132978 - RNA, 1701 nt, Artificial Sequence; identical to SEQ ID NO: 131818
  derived and/or modified CDS sequence (opt3) from hemagglutinin__InfluenzaA__ADG59633

SEQ ID NO: 132979 - RNA, 1701 nt, Artificial Sequence; identical to SEQ ID NO: 131818
  derived and/or modified CDS sequence (opt3) from hemagglutinin__InfluenzaA__ADG59634

SEQ ID NO: 132980 - RNA, 1701 nt, Artificial Sequence; identical to SEQ ID NO: 130717
  derived and/or modified CDS sequence (opt3) from hemagglutinin__InfluenzaA__ADG59635

SEQ ID NO: 132981 - RNA, 1701 nt, Artificial Sequence
  derived and/or modified CDS sequence (opt3) from hemagglutinin__InfluenzaA__ADG59636
augaaggccauccuggugguccuccuuuacaccuucgcuacagcaaacgccgacacucugugcauuggcuaucacgcgaauaacagcacggauaccguugacacaguguuggagaagaauguaacugugacccauuccgucaacuuacuggaagauaagcacaaugggaaacuauguaagcucagaggaguggcuccccugcaucuugguaaaugcaacauagccggcuggauccuggggaauccugagugugaaucuuugucaacagcaaguagcugguccuacauuguugagaccucuucgucagacaacggaacuugcuauccaggcgauuuuaucgacuacgaagaacucagggagcagcugagcaguguguccucuuucgaacgguuugagauuuucccgaagacaagcuccuggcccaaucacgauucaaacaagggugucaccgccgcuuguccucaugcaggggccaaaaguuuuuauaagaaucugaucuggcucgugaaaaagggaaacagcuacccaaaauuaucuaaguccuauauaaaugacaagggcaaagaaguacugguucuuuggggcauccaccaccccucaacgagcgcugaucaacagaguuuguaccagaacgccgacgcguacguguucgucgggacuucucgcuauuccaagaaauuuaagccugagauugcaauccgaccaaaagugcguggacaggaggguagaaugaauuacuauuggacccugguggaacccggcgauaagauuacauucgaggccacugggaaccuagucguuccuagguacgcuuuugccauggaacggaacgcaggaagcggcaucauaauuucggacaccccagugcaugauugcaauacaaccugucaaacgccgaaaggugcuaucaacacuucucuccccuuccagaauauucacccuaucacaaucgggaagugcccaaaguauguaaaauccaccaagcugcgccuugccacuggacugagaaacauucccucaauacagaguaggggcuuguuuggcgcgaucgccggguucauugagggagguuggacaggcaugguggacgggugguacggauaucaucaccagaaugaacaaggcagcgguuacgcagcugaccucaaauccacccagaacgccaucgaugagauaacgaauaaggucaacucugugauugagaaaaugaauacccaguuuacagcuguugggaaggaguucaaccaccuggagaagcggaucgaaaauuuaaacaaaaagguggacgauggcuuccuggacaucuggacuuacaaugccgagcuccuuguccuguuggaaaacgagcgcacccuagauuaucaugacagcaaugugaaaaaccuguacgagaagguacgaucacagcucaaaaacaaugcaaaggaaauuggaaacggcuguuuugaguucuaucacaagugcgauaauacauguauggaaaguguuaaaaacgggacuuacgacuauccuaaguacuccgaggaagccaaacugaauagagaggagaucgauggagugaaacuugaaagcaccaggauuuaucaaauacuggcuaucuacucuacagucgcgucaaguuuggugcucgucgugagccugggugcaauuuccuuuuggaugugcucuaacggcucguuacagugccggaucuguaucuga

SEQ ID NO: 132982 - RNA, 1701 nt, Artificial Sequence; identical to SEQ ID NO: 131465
  derived and/or modified CDS sequence (opt3) from hemagglutinin__InfluenzaA__ADG59638

SEQ ID NO: 132983 - RNA, 1701 nt, Artificial Sequence; identical to SEQ ID NO: 131818
  derived and/or modified CDS sequence (opt3) from hemagglutinin__InfluenzaA__ADG59639

SEQ ID NO: 132984 - RNA, 1701 nt, Artificial Sequence; identical to SEQ ID NO: 131070
  derived and/or modified CDS sequence (opt3) from hemagglutinin__InfluenzaA__ADG59641

SEQ ID NO: 132985 - RNA, 1701 nt, Artificial Sequence; identical to SEQ ID NO: 131560
  derived and/or modified CDS sequence (opt3) from hemagglutinin__InfluenzaA__ADG59643

SEQ ID NO: 132986 - RNA, 1701 nt, Artificial Sequence; identical to SEQ ID NO: 130704
  derived and/or modified CDS sequence (opt3) from hemagglutinin__InfluenzaA__ADG59644

SEQ ID NO: 132987 - RNA, 1701 nt, Artificial Sequence; identical to SEQ ID NO: 130717
  derived and/or modified CDS sequence (opt3) from hemagglutinin__InfluenzaA__ADG59646

SEQ ID NO: 132988 - RNA, 1701 nt, Artificial Sequence; identical to SEQ ID NO: 131818
  derived and/or modified CDS sequence (opt3) from hemagglutinin__InfluenzaA__ADG59647

SEQ ID NO: 132989 - RNA, 1701 nt, Artificial Sequence; identical to SEQ ID NO: 131881
  derived and/or modified CDS sequence (opt3) from hemagglutinin__InfluenzaA__ADG59648

SEQ ID NO: 132990 - RNA, 1701 nt, Artificial Sequence; identical to SEQ ID NO: 131881
  derived and/or modified CDS sequence (opt3) from hemagglutinin__InfluenzaA__ADG59649

SEQ ID NO: 132991 - RNA, 1701 nt, Artificial Sequence; identical to SEQ ID NO: 131881
  derived and/or modified CDS sequence (opt3) from hemagglutinin__InfluenzaA__ADG59650

SEQ ID NO: 132992 - RNA, 1701 nt, Artificial Sequence; identical to SEQ ID NO: 131881
  derived and/or modified CDS sequence (opt3) from hemagglutinin__InfluenzaA__ADG59651

SEQ ID NO: 132993 - RNA, 1701 nt, Artificial Sequence; identical to SEQ ID NO: 130717
  derived and/or modified CDS sequence (opt3) from hemagglutinin__InfluenzaA__ADG59652

SEQ ID NO: 132994 - RNA, 1701 nt, Artificial Sequence; identical to SEQ ID NO: 130717
  derived and/or modified CDS sequence (opt3) from hemagglutinin__InfluenzaA__ADG59653

SEQ ID NO: 132995 - RNA, 1701 nt, Artificial Sequence; identical to SEQ ID NO: 132981
  derived and/or modified CDS sequence (opt3) from hemagglutinin__InfluenzaA__ADG59655

SEQ ID NO: 132996 - RNA, 1701 nt, Artificial Sequence; identical to SEQ ID NO: 131818
  derived and/or modified CDS sequence (opt3) from hemagglutinin__InfluenzaA__ADG59656

SEQ ID NO: 132997 - RNA, 1701 nt, Artificial Sequence
  derived and/or modified CDS sequence (opt3) from hemagglutinin__InfluenzaA__ADG59657
augaaggccauccuggugguccuccuuuacaccuucgcuacagcaaacgccgacacucugugcauuggcuaucacgcgaauaacagcacggauaccguugacacaguguuggagaaaaauguaacugugacccauuccgucaacuuacuggaagauaagcacaaugggaaacuauguaagcucagaggaguggcuccccugcaucuugguaaaugcaacauagccggcuggauccuggggaauccugagugugaaucuuugucaacagcaaguagcugguccuacauuguugagaccucuucgucagacaacggaacuugcuauccaggcgauuuuaucgacuacgaggagcucagggagcagcugagcaguguguccucuuucgaacgguuugagauuuucccgaagacaagcuccuggcccaaucacgauucaaacaagggugucaccgccgcuuguccucaugcaggggccaaaaguuuuuauaagaaucugaucuggcucgugaaaaagggaaacagcuacccaaaauuaucuaaguccuauauaaaugacaagggcaaagaaguacugguucuuuggggcauccaccaccccucaacgagcgcugaucaacagaguuuguaccagaacgccgacgcguacguguucgucgggucuuccaaguauagcaaaaaguuuaaaccugagauugcaauccgcccaaaggugcgagaucaggagggacguaugaauuacuauuggacucugguggaacccggugacaaaauuaccuucgaggccacaggcaaccuagucguuccuagauacgcuuuugccauggaaaggaacgcagggucgggaaucauaauuucugauacuccagugcaugacugcaauaccacaugucaaaccccgaagggcgcuaucaacacgucccuccccuuccagaauauucacccuaucacuaucgguaagugcccaaaauauguaaagucaacaaaacugcggcuugccaccgggcugcgcaacgugcccaguacucagagcagaggauuguuuggcgcgauugccggcuucauagaagggggauggacagguauggucgacggcugguacggguaucaucaccagaaugaacaaggauccggcuacgcagcugaucucaagucuacccagaacgccaucgacgagauuacgaauaaagugaacagcguuaucgagaagaugaauacccaguuuacagcuguggguaaggaauuuaaccaccuggagaaaaggauagaaaauuuaaacaagaaagucgaugacggguuccuggauauuuggacuuacaaugccgagcuccuugugcuguuggaaaacgagcggacccuagacuaucaugauucaaauguaaagaaccuguacgagaaaguucgcagucagcucaagaacaaugcaaaggaaaucggcaacggauguuucgaguucuaucacaaaugcgacaauacauguauggaauccgugaagaacggcacuuacgauuauccuaaauacagcgaggaagccaagcugaaucgagaggagaucgacggggucaaacuugaaucuaccagaauuuaucaaauccuggcuauuuacucaacaguggcgaguagcuugguccucgugguuucccugggagcaauaucuuuuuggaugugcucgaacgguagcuuacagugcaggaucuguauuuga

SEQ ID NO: 132998 - RNA, 1701 nt, Artificial Sequence
  derived and/or modified CDS sequence (opt3) from hemagglutinin__InfluenzaA__ADG59658
augaaggccauccuggugguccuccuuuacaccuucgcuacagcaaacgccgacacucugugcauuggcuaucacgcgaauaacagcacggauaccauagacacaguuuuggagaagaaugugacuguaacccauuccgugaacuuacuggaagauaagcacaaugggaaacuauguaagcucagaggagucgcuccccugcaucuugguaaaugcaacaucgccggcuggauucuggggaauccugagugugaaucuuugucaacagcaaguagcugguccuacaucguggagaccucuucgucagacaacggaacuugcuauccaggcgauuuuauugacuacgaggagcucagggagcagcugagcaguguuuccucuuucgaacgguuugagaucuucccgaagacaagcuccuggcccaaucacgauucaaacaagggugugaccgccgcuuguccucaugcaggggccaaaaguuuuuauaagaaucugauauggcucgucaaaaagggaaacagcuacccaaaauuaucuaaguccuauaucaaugacaagggcaaagaagugcugguacuuuggggcauucaccaccccucaacgagcgcugaucaacagaguuuguaccagaacgccgacgcguacguuuucguggggacuucucgcuauuccaagaaauuuaagccugagaucgcaauucgaccaaaaguccguaaucaggagggaagaaugaacuacuauuggacccugguggaacccggugauaagaucacauucgaggccacuggcaaccuaguggucccuagguacgcuuuugccauggaacggaaugcagggagcggaauaauuaucucggacaccccaguucaugauugcaacacaaccugucaaacgccgaaaggcgcuauuaauacuucucuccccuuccagaacauccacccuaucacaauugguaagugcccaaaguaugugaaauccaccaagcugcgccuugccacugggcugagaaauauacccucaauccagaguaggggauuguuuggcgcgauugccggcuucaucgaagggggauggacagguaugguagacggcugguacggguaucaucaccagaacgaacaaggaagcggcuacgcagcugaccucaaauccacccagaaugccauagaugagauuacgaacaagguaaauucugucaucgagaaaaugaacacccaguuuacagcuguggguaaggaguucaaucaccuggaaaagcggaucgaaaacuuaaauaaaaagguugacgauggguuccuggacauuuggacuuacaacgccgagcuccuugugcuguuggaaaaugagcgcacccuagauuaucaugacagcaacgucaaaaaccuguacgagaaggugcgaucacagcucaaaaauaacgcaaaggaaaucggcaauggauguuuugaguucuaucacaagugcgauaacacauguauggaaagugugaaaaauggcacuuacgacuauccuaaguacuccgaggaagccaaacugaacagagaggagauugaugggguuaaacuugaaagcaccaggauauaucaaauccuggcuauuuacucuacaguggcgucaaguuugguccucguggucagccugggagcaaucuccuuuuggaugugcucuaaugguucguuacagugccggaucuguauuuga

SEQ ID NO: 132999 - RNA, 1701 nt, Artificial Sequence; identical to SEQ ID NO: 131164
  derived and/or modified CDS sequence (opt3) from hemagglutinin__InfluenzaA__ADG59659

SEQ ID NO: 133000 - RNA, 1701 nt, Artificial Sequence; identical to SEQ ID NO: 131164
  derived and/or modified CDS sequence (opt3) from hemagglutinin__InfluenzaA__ADG59660

SEQ ID NO: 133001 - RNA, 1701 nt, Artificial Sequence; identical to SEQ ID NO: 131070
  derived and/or modified CDS sequence (opt3) from hemagglutinin__InfluenzaA__ADG59662

SEQ ID NO: 133002 - RNA, 1701 nt, Artificial Sequence
  derived and/or modified CDS sequence (opt3) from hemagglutinin__InfluenzaA__ADG59663
augaaggccauccuggugguccuccuuuacaccuucgcuacagcaaacgccgacacucugugcauuggcuaucacgcgaauaacagcacggauaccguugacacaguguuggagaaaaauguaacugugacccauuccgucaacuuacuggaagauaagcacaaugggaaacuauguaagcucagaggaguggcuccccugcaucuugguaaaugcaacauagccggcuggauccuggggaauccugagugugaaucuuugucaacagcaaguagcugguccuacauuguugagaccucuucgucagacaacggaacuugcuauccaggcgauuuuaucgacuacgaggagcucagggagcagcugagcaguguguccucuuucgaacgguuugagauuuucccgaagacaagcuccuggcccaaucacgauucaaacaagggugucaccgccgcuuguccucaugcaggggccaaaaguuuuuauaagaaucugaucuggcucgugaaaaagggaaacagcuacccaaaauuaucuaaguccuauauaaaugacaagggcaaagaaguacugguucuuuggggcauccaccaccccucaacgagcgcugaucaacagaguuuguaccagaacgccgacgcguacguguucgucgggacuucucgcuauuccaagaaauuuaagccugagauugcaauccgaccaaaagugcgugaucaggagggaagaaugaauuacuauuggacccugguggaacccggugacaagauuacauucgaggccacuggcaaccuagucguuccuagguacgcuuuugccauggaacggaacgcagggagcggaaucauaauuucggauaccccauuccaugacugcaauacaaccugucaaacgccgaaaggcgcuaucaacacuucucuccccuuucagaauauucacccuaucacaaucgguaagugcccaaaguaugugaaauccaccaagcugcgccuugccacugggcugagaaacauucccucaauacagaguaggggauuguucggcgcgaucgccggcuuuauugaagggggauggacagguaugguagacggcugguacggguaucaucaccagaaugaacaaggaagcggcuacgcagcugaucucaaauccacccagaacgccaucgacgagauaacgaauaaggugaacucugucauugagaaaaugaauacccaguucacagcuguggguaaggaguucaaccaccuggaaaagcggaucgaaaauuuaaacaaaaagguugaugacggguuucuggauaucuggacuuacaaugccgagcuccuugugcuguuggaaaacgagcgcacccuagacuaucaugauagcaaugucaaaaaccuguacgagaaggugcgaucacagcucaaaaacaaugcaaaggaaauuggcaacggauguuucgaguuuuaucacaagugcgacaauacauguauggaaaguguaaagaacggcacuuacgauuauccuaaguacuccgaggaagccaaacugaauagagaggagaucgacgggguuaaacuugaaagcaccaggauuuaucaaauacuggcuaucuacucuacaguggcgucaaguuugguccucguggucagccugggagcaauuuccuucuggaugugcucuaacgguucguuacagugccggaucuguaucuga

SEQ ID NO: 133003 - RNA, 1701 nt, Artificial Sequence; identical to SEQ ID NO: 131070
  derived and/or modified CDS sequence (opt3) from hemagglutinin__InfluenzaA__ADG59664

SEQ ID NO: 133004 - RNA, 1701 nt, Artificial Sequence
  derived and/or modified CDS sequence (opt3) from hemagglutinin__InfluenzaA__ADG59666
augaaggccauccuggugguccuccuuuacaccuucgcuacagcaaacgccgacacucugugcauuggcuaucacgcgaauaacagcacggauaccguugacacaguguuggagaagaauguaacugugacccauuccgucaacuuacuggaagauaagcacaaugggaaacuauguaagcucagaggaguggcuccccugcaucuugguaaaugcaacauagccggcuggauccuggggaauccugagugugaaucuuugucaacagcaaguagcugguccuacauuguugagaccucuucgucagacaacggaacuugcuauccaggcgauuuuaucgacuacgaggagcucagggagcagcugagcaguguguccucuuucgaacgguuugagauuuucccgaagacaagcuccuggcccaaucacgauucaaacaagggugucaccgccgcuuguccucaugcaggggccaaaaguuuuuauaagaaucugaucuggcucgugaaaaagggaaacagcuacccaaaauuaucuaaguccuauauaaaugacaagggcaaagaaguacugguucuuuggggcauccaccaccccucaacgagcgcugaucaacagaguuuguaccagaacgccgacgcguacguguucgucgggacuucucgcuauuccaagaaauuuaagccugagauugcaauccgaccaaaagugcgugaucaggagggaagaaugaauuacuauuggacccugguggaacccggugacaagauuacauucgaggccacuggcaaccuagucguuccuagguacgcuuuugccauggaacgggaugcagggagcggaaucauaauuucggacaccccagugcaugacugcaacacaaccugucaaacgccgaaaggcgcuaucaauacuucucuccccuuccagaacauucacccuaucacaaucgguaagugcccaaaguauguaaaauccaccaagcugcgccuugccacugggcugagaaaugugcccucaauucagaguaggggauuguuuggcgcgauagccggcuucaucgaagggggauggacagguauggucgauggcugguacggguaucaucaccagaacgaacaaggaagcggcuacgcagcugaccucaaauccacccagaaugccauugaugagaucacgaacaagguuaauucugugauagagaaaaugaacacccaguuuacagcuguggguaaggaguucaaucaccuggaaaagcggauugaaaacuuaaauaaaaagaucgacgauggguuccuggacaucuggacuuacaacgccgagcuccuuguccuguuggaaaaugagcgcacccuagauuaucaugacagcaacgugaaaaaucuguacgagaagguacgaucacagcucaaaaacaacgcaaaggaaauuggcaauggauguuuugaguucuaucacaagugcgauaacacauguauggaaaguguuaaaaauggcacuuacgacuauccuaaguacuccgaggaagccaaacugaacagagaggagaucgauggggugaaacuugaaagcaccaggauuuaucaaauacuggcuaucuacucugcggucgcaucaaguuuggugcucgucgugagccugggagccauuuccuuuuggaugugcucuaaugguucguuacagugccggaucuguaucuga

SEQ ID NO: 133005 - RNA, 1701 nt, Artificial Sequence; identical to SEQ ID NO: 131819
  derived and/or modified CDS sequence (opt3) from hemagglutinin__InfluenzaA__ADG59667

SEQ ID NO: 133006 - RNA, 1701 nt, Artificial Sequence
  derived and/or modified CDS sequence (opt3) from hemagglutinin__InfluenzaA__ADG59669
augaaggccauccuggugguccuccuuuacaccuucgcuacagcaaacgccgacacucugugcauuggcuaucacgcgaauaacagcacggauaccguugacacaguguuggagaaaaauguaacugugacccauuccgucaacuuacuggaagauaagcacaaugggaaacuauguaagcucagaggaguggcuccccugcaucuugguaaaugcaacauagccggcuggauccuggggaauccugagugugaaucuuugucaacagcaaguagcugguccuacauuguugagaccucuucgucagacaacggaacuugcuauccaggcgauuuuaucgacuacgaggagcucagggagcagcugagcaguguguccucuuucgaacgguuugagauuuucccgaagacaagcuccuggcccaaucacgauucaaacaagggugucaccgccgcuuguccucaugcaggggccaaaaguuuuuauaagaaucugaucuggcucgugaaaaagggaaacagcuacccaaaauuaucuaaguccuauauaaaugacaagggcaaagaaguacugguucuuuggggcauccaccaccccucaacgagcgcugaucaacagaguuuguaccagaacgccgacgcguacguguucgucgggacuucucgcuauuccaagaaauuuaagccugagauugcaauccgaccaaaagugcgugagcaggaaggaagaaugaauuacuauuggacccugguggaucccggugacaagauuacauucgaggccacuggcaaccuagucguuccuagguacgcuuuugccauggaacggaacgcagggagcggaaucauaauuucggauaccccagugcaugacugcaauacaaccugucaaacgccgaaaggcgcuaucaacacuucucuccccuuccagaauauucacuccaucacaaucgguaagugcccuaaguauguaaaaucaaccaagcugcgccuugccacugggcugagaaacgugccaaguauucagagcaggggauuguuuggcgcgauagccggcuucaucgaagggggauggacagguauggucgacggcugguacggguaucaucaccagaaugaacaaggauccggcuacgcagcugaucucaaaucuacccagaacgccauugacgagaucacgaauaaggugaacagcguuauagagaaaaugaauacccaguuuacagcuguggguaaggaguucaaccaccuggaaaagcggauugaaaauuuaaacaaaaaggucgaugacggguuccuggauaucuggacuuacaaugccgagcuccuugugcuguuggaaaacgagcgcacccuagacuaucaugauucaaauguaaagaaccuguacgagaagguucgaagucagcucaaaaacaaugcaaaggaaaucggcaacggauguuuugaguucuaucacaagugcgacaauacauguauggaauccgugaaaaacggcacuuacgauuaucccaaguacagcgaggaagccaaacugaauagagaggagauugacggggucaaacuugaaucuaccaggaucuaucaaauucuggcuauauacucaacaguggcgaguagcuugguccucgugguuucccugggagcaaucucuuuuuggaugugcucgaacgguagcuuacagugccggauuuguaucuga

SEQ ID NO: 133007 - RNA, 1701 nt, Artificial Sequence; identical to SEQ ID NO: 133006
  derived and/or modified CDS sequence (opt3) from hemagglutinin__InfluenzaA__ADG59670

SEQ ID NO: 133008 - RNA, 1701 nt, Artificial Sequence; identical to SEQ ID NO: 133006
  derived and/or modified CDS sequence (opt3) from hemagglutinin__InfluenzaA__ADG59671

SEQ ID NO: 133009 - RNA, 1701 nt, Artificial Sequence; identical to SEQ ID NO: 133006
  derived and/or modified CDS sequence (opt3) from hemagglutinin__InfluenzaA__ADG59672

SEQ ID NO: 133010 - RNA, 1701 nt, Artificial Sequence
  derived and/or modified CDS sequence (opt3) from hemagglutinin__InfluenzaA__ADG59673
augaaggccauccuggugguccuccuuuacaccuucgcuacagcaaacgccgacacucugugcauuggcuaucacgcgaauaacagcacggauaccguugacacaguguuggagaaaaauguaacugugacccauuccgucgauuuacuggaagacaagcacaacgggaaacuauguaagcucagaggaguggcuccccugcaucuuggugagugcaauauagccggcuggauccuggggaacccugaaugugagucuuugucaacagcaaguagcugguccuacauuguugaaaccucuucgucagauaauggaacuugcuauccaggcgacuuuaucgauuacgaggagcucagggaacagcugagcaguguguccucuuucgagcgguuugaaauuuucccgaaaacaagcuccuggcccaaccacgacucaaauaagggugucaccgccgcuuguccucaugcaggggccaagaguuuuuauaaaaaccugaucuggcucgugaagaaaggaaauagcuacccaaaguuaucuaaauccuauauaaacgauaagggcaaggagguacugguucuuuggggcauccaccaccccucaacgagcgcugaccaacagaguuuguaccagaaugccgaugcguacguguucgucgggacuucucgcuauuccaaaaaguuuaaaccugagauugcaauccgaccaaaggugcgugaccaggaaggaagaaugaacuacuauuggacccugguggagcccggugauaaaauuacauucgaagccacuggcaaucuagucguuccuagguacgcuuuugccauggagcggaacgcagggagcggaaucauaauuucggacaccccagugcaugacugcaacacaaccugucaaacgccgaagggcgcuaucaauacuucucuccccuuccagaacauucacccuaucacaaucgguaaaugcccaaaguauguaaaguccaccaaacugcgccuugccacugggcugagaaaugugcccucaauucagaguaggggauuguuuggcgcgauagccggcuucaucgaagggggauggacagguauggucgauggcugguacggguaucaucaccagaacgagcaaggaagcggcuacgcagcugaccucaaguccacccagaaugccauugaugagaucacgaacaaaguuaauucugugauagaaaagaugaacacccaguuuacagcuguggguaaagaguucaaucaccuggaaaagcggauugagaacuuaaauaagaaagucgacgauggguuccuggacaucuggacuuacaacgccgaacuccuugugcuguuggagaaugagcgcacccuagauuaucaugacagcaacguaaagaaucuguacgaaaaaguucgaucacagcucaagaacaacgcaaaagagaucggcaauggauguuuugaguucuaucacaagugcgauaacacauguauggaaagugugaagaauggcacuuacgacuauccuaaauacuccgaagaggccaagcugaacagagaggaaauugauggggucaaacuugagagcaccaggaucuaucaaauucuggcuauauacucuacaguggcgucaaguuugguccucgugguuagccugggagcaaucuccuuuuggaugugcucuaaugguucguuacagugccggauuuguaucuga

SEQ ID NO: 133011 - RNA, 1701 nt, Artificial Sequence
  derived and/or modified CDS sequence (opt3) from hemagglutinin__InfluenzaA__ADG59674
augaaggccauccuggugguccuccuuuacaccuucgcuacagcaaacgccgacacucugugcguuggcuaucacgcgaauaacagcacggauaccguggacacaguauuggagaaaaaugugacugucacccauuccgugaacuuacuggaagauaagcacaaugggaaacuauguaagcucagaggaguugcuccccugcaucuugguaaaugcaacauugccggcuggauacuggggaauccugagugugaaucuuugucaacagcaaguagcugguccuacaucguggagaccucuucgucagacaacggaacuugcuauccaggcgauuuuauugacuacgaagaacucagggagcagcugagcagugucuccucuuucgaacgguuugagaucuucccgaagacaagcuccuggcccaaucacgauucaaacaagggugugaccgccgcuuguccucaugcaggggccaaaaguuuuuauaagaaucugauuuggcucguaaagaagggaaacagcuacccaaaauuaucuaaguccuauaucaaugacaagggcaaagaaguucuggugcuuuggggcauacaccaccccucaacgagcgcugaucaacagaguuuguaccagaacgccgacgcguacgucuucguggggacuucucgcuauuccaagaaauuuaagccugagaucgcaauucgaccaaaagugcgugagcaggaaggaagaaugaauuacuauuggacccuggucgagcccggugauaagaucacauucgaagccacuggcaaccuaguugugccuagguacgcuuuugccauggagcggaacgcagggagcggaauuaucauaucggacaccccaguacaugauugcaauacaaccugucaaacgccgaaaggcgcuauuaacacuucucuccccuuccagaaugugcacccuaucacaauugguaagugcccaaaguaugucaaauccaccaagcugcgccuugccacugggcugagaaacgugcccucaauccagaguaggggauuguuuggcgcgaucgccggcuucauugaagggggauggacagguaugguugacggcugguacggguaucaucaccagaaugagcaaggaagcggcuacgcagcugaccucaaauccacccagaacgccauagaugagaucacgaauaaggugaacucugucauugagaaaaugaauacccaguuuacagcuguggguaaggaguucaaccaccuggaaaagcggaucgagaauuuaaacaaaaagguagacgauggguuccuggacauauggacuuacaaugccgaacuccuuguucuguuggagaacgagcgcacccuagauuaucaugacagcaaugugaaaaaccuguacgaaaagguccgaucacagcucaaaaacaaugcaaaggagauuggcaacggauguuuugaguucuaucacaagugcgauaauacauguauggaaagugugaaaaacggcacuuacgacuauccuaaguacuccgaagaggccaaacugaauagagaggaaaucgauggggucaaacuugagagcaccaaaaucuaucaaauucuggcuaucuacucuacaguggcgucaaguuugguucucgugguaagccugggagcaauuuccuuuuggaugugcucuaacgguucguuacagugcaggauauguaucuga

SEQ ID NO: 133012 - RNA, 1701 nt, Artificial Sequence
  derived and/or modified CDS sequence (opt3) from hemagglutinin__InfluenzaA__ADG59675
augaaggccauccuggugguccuccuuuacaccuucgcuacagcaaacgccgacacucugugcauuggcuaucacgcgaauaacagcacggauaccguugacacaguguuggagaaaaauguaacugugacccauuccgucaacuuacuggaagauaagcacaaugggaaacuauguaagcucagaggaguggcuccccugcaucuugguaaaugcaacauagccggcuggauccuggggaauccugagugugaaucuuugucaacagcaaguagcugguccuacauuguugagaccucuucgucagacaacggaacuugcuauccaggcgauuuuaucgacuacgaggagcucagggagcagcugagcaguguguccucuuucgaacgguuugagauuuucccgaagacaagcuccuggcccaaucacgauucaaacaagggugucaccgccgcuuguccucaugcaggggccaaaaguuuuuauaagaaucugaucuggcucgugaaaaagggaaacagcuacccaaaauuaucuaaguccuauauaaaugacaagggcaaagaaguacugguucuuuggggcauccaccaccccucaacgagcgcugaucaacagaguuuguaccagaacgccgacgcguacguguucgucgggucuucccgcuauagcaagaaauuuaagccugagauugcaauccgaccaaaagugcgugaucaggagggaagaaugaauuacuauuggacucugguggaacccggugacaagauuaccuucgaggccacaggcaaccuagucguuccuagguacgcuuuugccauggaacggaacgcagggucgggaaucauaauuucugauacuccagugcaugacugcaauaccacaugucaaaccccgaacggcgcuaucaauacgucccuccccuuccacaacauucauccuaucacuaucgguaaaugcccaaaguauguaaagucaacaaaacugcgccuugccaccgggcugagaaaugugcccaguauucagagcaggggauuguuuggcgcgauagccggcuucaucgaagggggauggacugguauggucgacggcugguacggguaucaccaccagaacgaacagggauccggcuacgcagcugaucucaagucuacacaaaaugccauugacgagaucaccaacaaagugaauagcguuauagagaagaugaacacgcaguuuaccgcuguggguaaagaguucaaucaucuggaaaagcggauugaaaacuuaaauaagaaagucgaugacggguuccuggauaucuggacauacaacgccgagcuccuugugcuguuggaaaaugagcgcacucuagacuaucacgauucaaacguaaagaaccuguacgagaaaguucgaagucagcucaagaauaacgcaaaagaaaucggcaauggauguuuugaguucuaucauaagugcgacaacaccuguauggaauccgugaagaauggcacauacgauuauccuaaauacagcgaggaagccaagcugaacagagaggagauugacggggucaaacuugaaucuacuaggaucuaucagauucuggcuauauacucaaccguggcgaguagcuugguccucgugguuucccugggagcaaucucuuuuuggaugugcucgaaugguagcuuacaaugccggauuuguaucuga

SEQ ID NO: 133013 - RNA, 1701 nt, Artificial Sequence
  derived and/or modified CDS sequence (opt3) from hemagglutinin__InfluenzaA__ADG59676
augaaggccauccuggugguccuccuuuacaccuucgcuacagcaaacgccgacacucugugcauuggcuaucacgcgaauaacagcacggauaccguugacacaguguuggagaagaauguaacugugacccauuccgucaacuuacuggaagauaagcacaaugggaaacuauguaagcucagaggaguggcuccccugcaucuugguaaaugcaacauagccggcuggauccuggggaauccugagugugaaucuuugucaacagcaaguagcugguccuacauuguugagaccucuucgucagacaacggaacuugcuauccaggcgauuuuaucgacuacgaggagcucagggagcagcugagcaguguguccucuuucgaacgguuugagauuuucccgaagacaagcuccuggcccaaucacgauucaaacaagggugucaccgccgcuuguccucaugcaggggccaaaaguuuuuauaagaaucugaucuggcucgugaaaaagggaaacagcuacccaaaauuaucuaaguccuauauaaaugacaagggcaaagaaguacugguucuuuggggcauccaccaccccucaacgagcgcugaucaacagaguuuguaccagaacgccgacgcguacguguucgucgggacuucucgcuauuccaagaaauuuaagccugagauugcaauccgaccaaaagugcgugaucaggagggaagaaugaauuacuauuggacccugguggaacccggugacaagauuacauucgaggccacuggcaaccuagucguuccuagguacgcuuuugccauggaacggaacgcagggagcggaaucauaauuucggauaccccagugcaugacugcaaugcuacaugucaaaccccgaaaggcgccaucaacacgucucuccccuuccagaauauucacccuaucacuaucgguaagugcccaaaguauguaaaauccacaaagcugcgccuugcgaccgggcugagaaacauucccucaauacagaguaggggauuguuuggcgccaucgcaggcuucauugaagggggauggacugguaugguggacggcugguacggguaucaucaccagaaugaacaaggaagcggcuacgcugccgaucucaaauccacacagaacgcuaucgacgagauaaccaauaaggucaacucugugauugagaaaaugaauacgcaguuuaccgccguugguaaggaguucaaccaccuggaaaagcggaucgaaaauuuaaacaaaaagguggaugacggguuccuggauaucuggacauacaaugcagagcuccuuguccuguuggaaaacgagcgcacucuagacuaucaugauagcaaugugaaaaaccuguacgagaagguacgaucacagcucaaaaacaaugccaaggaaauuggcaacggauguuuugaguucuaucacaagugcgacaauaccuguauggaaaguguuaaaaacggcacauacgauuauccuaaguacuccgaggaagcuaaacugaauagagaggagaucgacggggugaaacuugaaagcacuaggauuuaucaaauacuggcgaucuacucuaccgucgcaucaaguuuggugcucgucgugagccugggagccauuuccuuuuggaugugcucuaacgguucguuacagugccggaucuguaucuga

SEQ ID NO: 133014 - RNA, 1701 nt, Artificial Sequence; identical to SEQ ID NO: 131818
  derived and/or modified CDS sequence (opt3) from hemagglutinin__InfluenzaA__ADG59678

SEQ ID NO: 133015 - RNA, 1701 nt, Artificial Sequence; identical to SEQ ID NO: 132981
  derived and/or modified CDS sequence (opt3) from hemagglutinin__InfluenzaA__ADG59680

SEQ ID NO: 133016 - RNA, 1701 nt, Artificial Sequence; identical to SEQ ID NO: 132981
  derived and/or modified CDS sequence (opt3) from hemagglutinin__InfluenzaA__ADG59681

SEQ ID NO: 133017 - RNA, 1701 nt, Artificial Sequence
  derived and/or modified CDS sequence (opt3) from hemagglutinin__InfluenzaA__ADG59683
augaaggccauccuggugguccuccuuuacaccuucgcuauugcaaacgccgacacacugugcauaggcuaucacgcgaauaacagcacugauacgguugacaccguguugaaaaagaauguaacagugacucauuccgucaacuuacuggaggauaaacacaaugggaagcuauguaaacucagaggaguggcuccccugcaucuugguaagugcaacaucgccggcuggauucuggggaauccugaaugugagucuuugucaaccgcaaguagcugguccuacaucguugaaacaucuucgucagacaacggaaccugcuauccaggcgauuuuauugacuacgaggaacucagggagcagcugagcaguguguccucuuucgagcgguuugaaaucuucccgaagacuagcuccuggcccaaucacgauucaaacaaaggugucacagccgcuuguccucaugcaggggccaagaguuuuuauaaaaaucugauauggcucgugaagaaaggaaacagcuacccaaaguuaucuaaguccuauaucaaugacaaaggcaaggagguacugguucuuuggggcauucaccaccccucaaccagcgcugaucaacagaguuuguaccagaacgccgacgcguacguguucgucgggacgucucgcuauuccaaaaaguuuaaaccugaaaucgcaauucgaccaaaggugcgugaucaggagggaagaaugaauuacuauuggacucugguggagcccggugacaaaaucaccuucgaagccacaggcaaccuagucguuccuagguacgcuuuugccauggagcggaacgcagggagcggaauagugauuucggauacuccaguacaugacugcaauaccacaugucaaaccccgaagggcgcuaucaacacgucucuccccuuccagaauauucacccuaucacuaucgguaagugcccaaaauaugugaaguccacaaaacugcgccuugccaccgggcugagaaacguccccucaauucagaguaggggauuguuuggcgcgauagccggcuucaucgaagggggauggacugguaugguggacggcugguacggguaucaucaccagaaugagcaaggaagcggcuacgcagcugaucucaaguccacacagaacgccauugacgaaaucaccaauaaaguuaacucugugauagagaagaugaauacgcaguuuaccgcugucgguaaggaguucaaccaccuggaaaaacggauugagaauuuaaacaagaaaguggaugacggguuccuggauaucuggacauacaaugccgaacuccuuguacuguuggagaacgaacgcacucuagacuaucaugauagcaauguuaagaaccuguacgagaaagugcgaucacagcucaagaacaaugcaaaggagaucggcaacggauguuuugaguucuaucacaaaugcgacaauaccuguauggaaagugucaagaacggcacauacgauuauccuaaauacuccgaagaggccaagcugaauagagaagagauugacggggugaaacuugagagcacuaggaucuaucaaauucuggcuauauacucuaccgucgcgucaaguuuggugcucguugugagccugggagcaaucuccuuuuggaugugcucuaacgguucguuacagugccggauuuguaucuga

SEQ ID NO: 133018 - RNA, 1701 nt, Artificial Sequence; identical to SEQ ID NO: 131818
  derived and/or modified CDS sequence (opt3) from hemagglutinin__InfluenzaA__ADG59684

SEQ ID NO: 133019 - RNA, 1701 nt, Artificial Sequence
  derived and/or modified CDS sequence (opt3) from hemagglutinin__InfluenzaA__ADG59685
augaaggccauccuggugguccuccuuuacaccuucgcuacagcaaacgccgacacucugugcauuggcuaucacgcgaauaacagcacggauaccauagacacaguuuuggagaaaaaugugacuguaacccauuccgugaacuuacuggaagauaagcacaaugggaaacuauguaagcucagaggagucgcuccccugcaucuugguaaaugcaacaucgccggcuggauucuggggaauccugagugugaaucuuugucaacagcaaguagcugguccuacaucguggagaccucuucgucagacaacggaacuugcuauccaggcgauuuuauugacuacgaggagcucagggagcagcugagcaguguuuccucuuucgaacgguuugagaucuucccgaagacaagcuccuggcccaaucacgauucaaacaagggugugaccgccgcuuguccucaugcaggggccaaaaguuuuuauaagaaucugauauggcucgucaaaaagggaaacagcuacccaaaauuaucuaaguccuauaucaaugacaagggcaaagaagugcugguacuuuggggcauucaccaccccucaacgagcgcugaucaacagaguuuguaccagaacgccgacgcguacguuuucguggggacuucucgcuauuccaagaaauuuaagccugagaucgcaauucgaccaaaaguccgugaucaggagggaagaaugaauuacuauuggacccugguggaacccggugacaagaucacauucgaggccacuggcaaccuaguggucccuagguacgcuuuugccauggaacggaacgcagggagcggaauaauuaucucggauaccccaguucaugacugcaauacaaccugucaaacgccgaaaggcgcuauuaacacuucucuccccuuccagaauauccacccuaucacaauugguaagugcccaaaguaugugaaauccaccaagcugcgccuugccacugggcugagaaacauacccucaauccagaguaggggauuguuuggcgcgauugccggcuucaucgaagggggauggacagguaugguagacggcugguacggguaucaucaccagaaugaacaaggaagcggcuacgcagcugaucucaaauccacccagaacgccauagacgagauuacgaauaaggugaacucugucaucgagaaaaugaauacccaguuuacagcuguggguaaggaguucaaccaccuggaaaagcggaucgaaaauuuaaacaaaaagguugaugacggguuccuggauauuuggacuuacaaugccgagcuccuugugcuguuggaaaacgagcgcacccuagacuaucaugauagcaaugucaaaaaccuguacgagaaggugcgaucacagcucaaaaacaaugcaaaggaaaucggcaacggauguuuugaguucuaucacaagugcgacaauacauguauggaaaguguaaagaacggcacuuacgauuauccuaaguacuccgaggaagccaaacugaauagagaggagauugacgggguuaaacuugaaagcaccaggauauaucaaauccuggcuauuuacucuacaguggcgucaaguuugguccucguggucagccugggagcaaucuccuuuuggaugugcucuaacgguucguuacagugccggaucuguauuuga

SEQ ID NO: 133020 - RNA, 1701 nt, Artificial Sequence; identical to SEQ ID NO: 131818
  derived and/or modified CDS sequence (opt3) from hemagglutinin__InfluenzaA__ADG59686

SEQ ID NO: 133021 - RNA, 1701 nt, Artificial Sequence; identical to SEQ ID NO: 132981
  derived and/or modified CDS sequence (opt3) from hemagglutinin__InfluenzaA__ADG59687

SEQ ID NO: 133022 - RNA, 1701 nt, Artificial Sequence
  derived and/or modified CDS sequence (opt3) from hemagglutinin__InfluenzaA__ADG59688
augaaggccauccuggugguccuccuuuacaccauugcuacagcaaacgccgacacucugugcauaggcuaucacgcgaauaacagcacggauaccaucgacacaguuuuggagaaaaaugugacuguaacccauuccgugaacuuacuggaagauaagcacaaugggaaacuauguaagcucagaggagucgcuccccugcaucuugguaaaugcaacauugccggcuggauccuggggaauccugagugugaaucuuugucaacagcaaguagcugguccuacauuguggagaccucuucgucagacaacggaacuugcuauccaggcgauuucaucgacuacgaggaacucagggagcagcugagcaguguuuccucuuuugaacgguucgagauauuuccgaagacaagcuccuggcccaaucacgauucaaacaagggugugaccgccgcuuguccucaugcaggggccaaaaguuucuauaagaaucugaucuggcucgucaaaaagggaaacagcuacccaaaauuaucuaaguccuauauuaaugacaagggcaaagaagugcugguacuuuggggcauccaccaccccucaacgagcgcugaucaacagaguuuguaccagaacgccgacgcguacguuuuuguggggacuucucgcuauuccaagaaauucaagccugagauugcaauccgaccaaaaguccguggacaggaggguagaaugaauuacuauuggacccugguggaacccggcgauaagauaacauuugaggccacugggaaccuaguggucccuagguacgcuuucgccauggaacggaacgcaggaagcggcauuaucauuucggacaccccaguucaugauugcaauacaaccugucaaacgccgaaaggugcuaucaacacuucucuccccuuucagaauauccacccuauuacaauagggaagugcccaaaguaugugaaauccaccaagcugcgccuugccacuggacugagaaacauccccucaauucagaguaggggcuuguucggcgcgaucgccggguuuauagagggagguuggacaggcaugguagacgggugguacggauaucaucaccagaaugaacaaggcagcgguuacgcagcugaccucaaauccacccagaacgccauugaugagaucacgaauaaggugaacucugucaucgagaaaaugaauacccaguucacagcuguggggaaggaauuuaaccaccuggagaagcggauugaaaauuuaaacaaaaagguugacgauggcuuccuggacaucuggacuuacaaugccgagcuccuugugcuguuggaaaacgagcgcacccuagauuaucaugacagcaaugucaaaaaccuguacgagaaggugcgaucacagcucaaaaacaaugcaaaggaaauuggaaacggcuguuucgaguuuuaucacaagugcgauaauacauguauggaaaguguaaagaacgggacuuacgacuauccuaaguacuccgaggaagccaaacugaauagagaggagauagauggaguuaaacuugaaagcaccaggaucuaucaaauucuggcuaucuacucuacaguggcgucaaguuugguccucguggucagccugggugcaaucuccuucuggaugugcucuaacggcucguuacagugccggauuuguauauga

SEQ ID NO: 133023 - RNA, 1701 nt, Artificial Sequence; identical to SEQ ID NO: 130717
  derived and/or modified CDS sequence (opt3) from hemagglutinin__InfluenzaA__ADG59689

SEQ ID NO: 133024 - RNA, 1701 nt, Artificial Sequence; identical to SEQ ID NO: 130717
  derived and/or modified CDS sequence (opt3) from hemagglutinin__InfluenzaA__ADG59691

SEQ ID NO: 133025 - RNA, 1701 nt, Artificial Sequence
  derived and/or modified CDS sequence (opt3) from hemagglutinin__InfluenzaA__ADG59693
augaaggccauccuggugguccuccuuuacaccuucgcuacagcaaacgccgacacucugugcauuggcuaucacgcgaauaacagcacggauaccguugacacaguguuggagaagaauguaacugugacccauuccgucaacuuacuggaagauaagcacaaugggaaacuauguaagcucagaggaguggcuccccugcaucuugguaaaugcaacauagccggcuggauccuggggaauccugagugugaaucuuugucaacagcaaguagcugguccuacauuguugagaccucuucgucagacaacggaacuugcuauccaggcgauuuuaucgacuacgaggagcucagggagcagcugagcaguguguccucuuucgaacgguuugagauuuucccgaagacaagcuccuggcccaaucacgauucaaacaagggugucaccgccgcuuguccucaugcaggggccaaaaguuuuuauaagaaucugaucuggcucgugaaaaagggaaacagcuacccaaaauuaucuaaguccuauauaaaugacaagggcaaagaaguacugguucuuuggggcauccaccaccccucaacgagcgcugaucaacagaguuuguaccagaacgccgacgcguacguguucgucgggacuucucgcuauuccaagaaauuuaagccugagauugcaauccgaccaaaagugcguaaucaggagggaagaaugaacuacuauuggacccugguggaacccggugauaagauuacauucgaggccacuggcaaccuagucguuccuagguacgcuuuugccauggaacggaaugcagggagcggaaucauaauuucggacaccccagugcaugauugcaacacaaccugucaaacgccgaaaggcgcuaucaauacuucucuccccuuccagaacauucacccuaucacaaucgguaagugcccaaaguauguaaaauccaccaagcugcgccuugccacugggcugagaaauauucccucaauacagaguaggggauuguuuggcgcgaucgccggcuucauugaagggggauggacagguaugguggacggcugguacggguaucaucaccagaacgaacaaggaagcggcuacgcagcugaccucaaauccacccagaaugccaucgaugagauaacgaacaaggucaauucugugauugagaaaaugaacacccaguuuacagcuguugguaaggaguucaaucaccuggaaaagcggaucgaaaacuuaaauaaaaagguggacgauggguuccuggacaucuggacuuacaacgccgagcuccuuguccuguuggaaaaugagcgcacccuagauuaucaugacagcaacgugaaaaaccuguacgagaagguacgaucacagcucaaaaauaacgcaaaggaaauuggcaauggauguuuugaguucuaucacaagugcgauaacacauguauggaaaguguuaaaaauggcacuuacgacuauccuaaguacuccgaggaagccaaacugaacagagaggagaucgauggggugaaacuugaaagcaccaggauuuaucaaauacuggcuaucuacucuacagucgcgucaaguuuggugcucgucgugagccugggagcaauuuccuuuuggaugugcucuaaugguucguuacagugccggaucuguaucuga

SEQ ID NO: 133026 - RNA, 1701 nt, Artificial Sequence
  derived and/or modified CDS sequence (opt3) from hemagglutinin__InfluenzaA__ADG59696
augaaggccauccuggugguccuccuuuacaccuucgcuacagcaaacgccgacacucugugcauuggcuaucacgcgaauaacagcacggauaccguugacacaguguuggagaaaaauguaacugugacccauuccgucaacuuacuggaagauaagcacaaugggaaacuauguaagcucagaggaguggcuccccugcaucuugguaaaugcaacauagccggcuggauccuggggaauccugagugugaaucuuugucaacagcaaguagcugguccuacauuguugagaccucuucgucagacaacggaacuugcuauccaggcgauuuuaucgacuacgaagaacucagggagcagcugagcaguguguccucuuucgaacgguuugagauuuucccgaagacaagcuccuggcccaaucacgauucaaacaagggugucaccgccgcuuguccucaugcaggggccaaaaguuuuuauaagaaucugaucuggcucgugaaaaagggaaacagcuacccaaaauuaucuaaguccuauauaaaugacaagggcaaagaaguacugguucuuuggggcauccaccaccccucaacgagcgcugaucaacagaguuuguaccagaacgccgacgcguacguguucgucgggacuucucgcuauuccaagaaauuuaagccugagauugcaauccgaccaaaagugcgugagcaggaaggaagaaugaauuacuauuggacccugguggagcccggugauaagauuacauucgaagccacuggcaaccuagucguuccuagguacgcuuuugccauggagcgggacgcagggagcggaaucauaauuucggauaccccagugcaugacugcaacacaaccugucaaacgccgaaaggcgcuaucaauacuucucuccccuuccagaacauucacccuaucacaaucgguaagugcccaaaguauguaaaauccaccaagcugcgccuugccacugggcugagaaaugugcccucaauucagaguaggggauuguuuggcgcgauagccggcuucaucgaagggggauggacagguauggucgacggcugguacggguaucaucaccagaacgagcaaggaagcggcuacgcagcugaucucaaauccacccagaaugccauugacgagaucacgaacaagguaaauucuguuauagaaaagaugaacacccaguuuacagcuguggguaaggaguucaaucaccuggaaaagcggauugagaacuuaaauaaaaaggucgaugacggguuccuggauaucuggacuuacaacgccgaacuccuugugcuguuggagaaugagcgcacccuagacuaucaugauagcaacgugaaaaaucuguacgaaaagguucgaucacagcucaaaaacaacgcaaaggagaucggcaauggauguuuugaguucuaucacaagugcgacaacacauguauggagagugugaaaaauggcacuuacgauuauccuaaguacuccgaagaggccaaacugaacagagaggaaauugacggggucaaacuugagagcaccaggaucuaucaaauucuggcuauauacucuacaguggcgucaaguuugguccucgugguuagccugggagcaaucuccuuuuggaugugcucuaaugguucguuacagugccggauuuguaucuga

SEQ ID NO: 133027 - RNA, 1701 nt, Artificial Sequence
  derived and/or modified CDS sequence (opt3) from hemagglutinin__InfluenzaA__ADG59697
augaaggccauccuggugguccuccuuuacaccuucgcuacagcaaacgccgacacucugugcauuggcuaucacgcgaauaacagcacggauaccguugacacaguguuggagaaaaauguaacugugacccauuccgucaacuuacuggaagauaagcacaaugggaaacuauguaagcucagaggaguggcuccccugcaucuugguaaaugcaacauagccggcuggauccuggggaauccugagugugaaucuuugucaacagcaaguagcugguccuacauuguugagaccucuucgucagacaacggaacuugcuauccaggcgauuuuaucgacuacgaagaacucagggagcagcugagcaguguguccucuuucgaacgguuugagauuuucccgaagacaagcuccuggcccaaucacgauucaaacaagggugucaccgccgcuuguccucaugcaggggccaaaaauuuuuauaagaaccugaucuggcucgugaaaaagggaaauaguuacccaaaauuaagcaagucuuauauaaacgacaagggcaaagaaguacugguucuuuggggcauccaccaccccuccacgucagcugaucaacagagcuuguaccagaaugccgacgcguacguguucgucgggacuucccgcuauucuaagaaauuuaagccugagauugcaauccgaccaaaagugcguggacaggaggguagaaugaacuacuauuggacccugguggaacccggcgauaagauuacauucgaggccacugggaaccuagucguuccuagguacgcuuuugccauggaacggaaugcaggauccggcaucauaauuagcgacaccccagugcaugauugcaacacaaccugucaaacgccgaaaggugcuaucaauacuucgcuccccuuccagaacauucacccuaucacaaucgggaagugcccaaaguauguaaaaucuaccaagcugcgccuugccacuggacugagaaaugugcccuccauucagucaaggggcuuguuuggcgcgauagccggguucaucgagggagguuggacaggcauggucgacgggugguacggauaucaucaccagaacgaacaaggcagugguuacgcagcugaccucaaaagcacccagaaugccauugaugagaucacgaacaaggugaauaguguuauagagaaaaugaacacccaguuuacagcuguggggaaggaguucaaucaccuggagaagcggauugaaaacuuaaauaaaaaggucgacgauggcuuccuggacaucuggacuuacaacgccgagcuccuugugcuguuggaaaaugagcgcacccuagauuaucaugacucuaacguaaagaaccuguacgagaagguucgaagccagcucaaaaauaacgcaaaggaaaucggaaauggcuguuuugaguucuaucacaagugcgauaacacauguauggaaucagugaaaaaugggacuuacgacuauccuaaguacagugaggaagccaaacugaacagagaggagauugauggagucaaacuugaauccaccaggaucuaucaaauucuggcuauauacagcacaguggcgucuucauugguccucgugguuagucugggugcaaucagcuuuuggaugugcuccaauggcucuuuacagugccggauuuguaucuga

SEQ ID NO: 133028 - RNA, 1701 nt, Artificial Sequence
  derived and/or modified CDS sequence (opt3) from hemagglutinin__InfluenzaA__ADG59700
augaaggccauccuggugguccuccuuuacaccuucgcuacagcaaacgccgacacucugugcauuggcuaucacgcgaauaacagcacggauaccguugacacaguguuggagaaaaauguaacugugacccauuccgucaacuuacuggaagauaagcacaaugggaaacuauguaagcucagaggaguggcuccccugcaucuugguaaaugcaacauagccggcuggauccuggggaauccugagugugaaucuuugucaacagcaaguagcugguccuacauuguugagaccucuucgucagacaacggaacuugcuauccaggcgauuuuaucgacuacgaggagcucagggagcagcugagcaguguguccucuuucgaacgguuugagauuuucccgaagacaagcuccuggcccaaucacgauucaaacaagggugucaccgccgcuuguccucaugcaggggccaaaaguuuuuauaagaaucugaucuggcucgugaaaaagggaaacagcuacccaaaauuaucuaaguccuauauaaaugacaagggcaaagaaguacugguucuuuggggcauccaccaccccucaacgagcgcugaucaacagaguuuguaccagaacgccgacgcguacguguucgucgggacuucucgcuauuccaagaaauuuaagccugagauugcaauccgaccaaaagugcgugaucaggagggaagaaugaauuacuauuggacccugguggaacccggugacaagauuacauucgaggccacuggcaaccuagucguuccuagguacgcuuuugccauggaacggaacgcagggagcggaaucauaauuucggauaccccagugcaugacugcaauacaaccugucaaacgcucaaaggcgcuaucaacacuucucugccguuccagaauauucaccccaucacaaucgguaagugcccuaaguauguaaaauccaccaaacuucgccuggccacuggguugagaaacauuccaucaauacagaguaggggacucuuuggcgcgaucgccggcuucauugaagggggauggacagguaugguggacggcugguacggguaucaucaccagaaugaacaaggaagcggcuacgcagcugaucugaaguccacccagaacgccaucgacgagauaacgaauaaggucaacucugugauugagaaaaugaauacccaguuuacagcuguugguaaggaguucaaccacuuagaaaagcggaucgaaaaucugaacaaaaagguggaugacggguuccucgauaucuggacuuacaaugccgagcuucuggucuugcuagaaaacgagcgcacccuggacuaucaugauagcaaugugaaaaaccucuacgagaagguacgaucacagcugaaaaacaaugcaaaggaaauuggcaacggauguuuugaguucuaucacaagugcgacaauacauguauggaaaguguuaaaaacggcacuuacgauuaucccaaguacuccgaggaagccaaacuuaauagagaggagaucgacggggugaagcuggaaagcaccaggauuuaucaaauauuggcuaucuacucuacagucgcgucaagucucgugcuggucgugagcuuaggagcaauuuccuuuuggaugugcucuaacgguucgcugcagugccggaucuguaucuga

SEQ ID NO: 133029 - RNA, 1701 nt, Artificial Sequence
  derived and/or modified CDS sequence (opt3) from hemagglutinin__InfluenzaA__ADG59701
augaaggccauccuggugguccuccuuuacaccuucgcugcagccaacgcggacacacugugcauuggcuaucacgcuaauaacagcacugauacgguugacaccguguuggagaaaaauguaacagugacucauuccgucaacuuacuggaagauaagcacaaugggaaacuauguaagcucagaggaguggcaccccugcaucuugguaaaugcaacauagccggcuggauccuggggaauccugagugugaaucuuugucaaccgccaguagcugguccuacauuguugagacaucuucgucagacaacggaaccugcuauccaggcgauuuuaucgacuacgaggagcucagggagcagcugagcaguguguccucuuucgaacgguuugagauuuucccgaagacuagcuccuggcccaaucacgauucaaacaagggugucacagcugcauguccucaugccggggcuaaaaguuuuuauaagaaucugaucuggcucgugaaaaagggaaacagcuacccaaaauuaucuaaguccuauauaaaugacaagggcaaagaaguacugguucuuuggggcauccaccaccccucaaccagcgccgaucaacagaguuuguaccagaacgcggacgcauacguguucgucgggacgucucgcuauuccaagaaauuuaagccugagauugccauccgaccaaaagugcgugaucaggagggaagaaugaauuacuauuggacucugguggaacccggugacaagauuaccuucgaggcuacaggcaaccuagucguuccuagguacgccuuugcaauggaacggaacgcugggagcggaaucauaauuucggauacuccagugcaugacugcaauaccacaugucaaaccccgaaaggcgccaucaacacgucucuccccuuccagaauauucacccuaucacuaucgguaagugcccaaaguauguaaaauccacaaagcugcgccuugcgaccgggcugagaaacgugcccucaauucagaguaggggauuguuuggcgccauagcaggcuucaucgaagggggauggacugguauggucgacggcugguacggguaucaucaccagaaugaacaaggaagcggcuacgcugccgaucucaaauccacacagaacgcuauugacaagaucaccaauaaagugaacucuguuauagagaagaugaauacgcaguuuaccgccguggguaaggaguucaaccaccuggaaaaacggauugagaauuuaaacaagaaagucgaugacggguuccuggauaucuggacauacaaugcagaacuccuugugcuguuggagaacgaacgcacucuagacuaucaugauagcaauguaaagaaccuguacgagaaaguucgaucacagcucaagaacaaugccaaggagaucggcaacggauguuuugaguucuaucacaaaugcgacaauaccuguauggaaagugugaagaacggcacauacgauuauccuaaauacuccgaagaggcuaagcugaauagagaagagauugacggggucaaacuugagagcacuaggaucuaucaaauucuggcgauauacucuaccguggcaucaaguuugguccucgugguuagccugggagccaucuccuuuuggaugugcucuaacgguucguuacagugccggauuuguaucuga

SEQ ID NO: 133030 - RNA, 1701 nt, Artificial Sequence
  derived and/or modified CDS sequence (opt3) from hemagglutinin__InfluenzaA__ADG59702
augaaggccauccuggugguccuccuuuacaccuucgcuacagcaaacgccgacacucugugcauuggcuaucacgcgaauaacagcacggauaccguugacacaguguuggagaagaauguaacugugacccauuccgucaacuuacuggaagauaagcacaaugggaaacuauguaagcucagaggaguggcuccccugcaucuugguaaaugcaacauagccggcuggauccuggggaauccugagugugaaucuuugucaacagcaaguagcugguccuacauuguugagaccucuucgucagacaacggaacuugcuauccaggcgauuuuaucgacuacgaggagcucagggagcagcugagcaguguguccucuuucgaacgguuugagauuuucccgaagacaagcuccuggcccaaucacgauucaaacaagggugucaccgccgcuuguccucaugcaggggccaaaaguuuuuauaagaaucugaucuggcucgugaaaaagggaaacagcuacccaaaauuaucuaaguccuauauaaaugacaagggcaaagaaguacugguucuuuggggcauccaccaccccucaacgagcgcugaucaacagaguuuguaccagaacgccgacgcguacguguucgucgggacuucucgcuauuccaagaaauuuaagccugagauugcaauccgaccaaaagugcgugaucaggagggaagaaugaauuacuauuggacccugguggaacccggugacaagauuacauucgaggccacuggcaaccuagucguuccuagguacgcuuuugccauggaacggaacgcagggagcggaaucauaauuucggauaccccagugcaugacugcaauacaaccugucaaacgccgaaaggcgcuaucaacacuucucuccccuuccagaauauucacccuaucacaaucgguaagugcccaaaguauguaaaauccaccaagcugcgccuugccacugggcugagaaacauucccucaauacagaguaggggauuguuuggcgcgaucgccggcuucauugaagggggauggacagguaugguggacggcugguacggguaucaucaccagaaugaacaaggaagcggcuacgcagcugaucucaaauccacccagaacgccaucgacgagauaacgaauaaggucaacucugugauugagaaaaugaauacccaguuuacagcuguugguaaggaguucaaccaccuggaaaagcggaucgaaaauuuaaacaaaaagguggaugacggguuccuggauaucuggacuuacaaugccgagcuccuuguccuguuggaaaacgagcgcaaucuagacuaucaugauagcaacgugaaaaaccuguacgagaagguacgaucacagcucaaaaauaacgcaaaggaaauuggcaauggauguuuugaguucuaucacaagugcgacaacaccuguauggaaaguguuaaaaauggcacauacgauuauccuaaguacuccgaggaagccaaacugaacagagaggagaucgacggggugaaacuugaaagcacuaggauuuaucaaauacuggcuaucuacucuaccgucgcgucaaguuuggugcucgucgugagccugggagcaauuuccuuuuggaugugcucuaaugguucguuacagugccggaucuguaucuga

SEQ ID NO: 133031 - RNA, 1701 nt, Artificial Sequence
  derived and/or modified CDS sequence (opt3) from hemagglutinin__InfluenzaA__ADG59703
augaaggccauccuggugguccuccuuuacaccuucgcuacagcaaacgccgacacucugugcauuggcuaucacgcgaauaacagcacggauaccguugacacaguguuggagaagaauguaacugugacccauuccgucaacuuacuggaagauaagcacaaugggaaacuauguaagcucagaggaguggcuccccugcaucuugguaaaugcaacauagccggcuggauccuggggaauccugagugugaaucuuugucaacagcaaguagcugguccuacauuguugagaccucuucgucagacaacggaacuugcuauccaggcgauuuuaucgacuacgaggagcucagggagcagcugagcaguguguccucuuucgaacgguuugagauuuucccgaagacaagcuccuggcccaaucacgauccuaacaagggugucaccgccgcuuguccacaugcaggggccaaaucauuuuauaagaaucugaucuggcucgugaaaaagggaaacaguuaccccaaauuaagcaagucuuauauaaaugacaagggcaaagaaguacugguucuuuggggcauccaccacccuuccacgucagcugaucaacagagcuuguaccagaacgccgacgcguacguguucgucgggacuagccgcuauucuaagaaauuuaagccagagauugcaauccgacccaaagugcgugaucaggagggaagaaugaauuacuauuggacccugguggaaccuggugacaagauuacauucgaggccacuggcaaccuagucguuccaagguacgcuuuugccauggaacggaacgcaggguccggaaucgugauaagcgauaccccgguacaugacugcaauacaaccugucaaacgcccaaaggcgcuauuaacacuucgcucccuuuccagaauauccacccaauuacaaucgguaagugccccaaguaugugaaaucuaccaagcugcgccuugccacugggcugagaaacgucccuuccauccagucaaggggauuguuuggcgcgauugccggcuucauagaagggggauggacagguaugguggacggcugguacggguaucaucaccagaaugaacaaggaaguggcuacgcagcugaucucaaaagcacccagaacgccaucgacgagauuacgaauaagguuaacuccgugaucgagaaaaugaauacccaguuuacagcugucgguaaggaguucaaccaccuggaaaagcggauagaaaauuuaaacaaaaagguggaugacggguuccuggauauuuggacuuacaaugccgagcuccuuguacuguuggaaaacgagcgcacccuagacuaucaugauucuaauguuaaaaaccuguacgagaaggugcgaagccagcucaaaaacaaugcaaaggaaaucggcaacggauguuuugaguucuaucacaagugcgacaauacauguauggaaucagucaaaaacggcacuuacgauuauccaaaguacagugaggaagccaaacugaauagagaggagaucgacggggugaaacuugaauccaccaggauuuaucaaauccuggcuauuuacagcacagucgcgucuucauuggugcucguugugagucugggagcaauaaguuuuuggaugugcuccaacgguucuuuacagugccggaucuguauuuga

SEQ ID NO: 133032 - RNA, 1701 nt, Artificial Sequence; identical to SEQ ID NO: 130732
  derived and/or modified CDS sequence (opt3) from hemagglutinin__InfluenzaA__ADG76646

SEQ ID NO: 133033 - RNA, 1701 nt, Artificial Sequence
  derived and/or modified CDS sequence (opt3) from hemagglutinin__InfluenzaA__ADG76652
augaaggccauccuggugguccuccuuuacaccuucgcuacagcaaacgccgacacucugugcauuggcuaucacgcgaauaacagcacggauaccguugacacaguguuggagaaaaauguaacugugacccauuccgucaacuuacuggaagauaagcacaaugggaaacuauguaagcucagaggaguggcuccccugcaucuugguaaaugcaacauagccggcuggauccuggggaauccugagugugaaucuuuuucaacaaguagcuccuggucuuacauuguugagaccccaucgucagacaacggaacuugcuauccgggcgauuucaucgacuacgaagaguugagggagcagcucagcaguguguccucuuuugaacgguucgagauuuuucccaagacaagcuccuggccuaaucacgauucaaacaagggugucaccgcagccuguccacaugcuggggcaaaaaguuucuauaagaaucugaucuggcuggugaaaaagggaaacagcuaccccaaacucucuaaguccuauauaaaugacaagggcaaagaaguauuaguucuguggggcauccaccacccuucaacgagcgccgaucaacagagucuuuaccagaacgcugacacuuacguguuugucgggucuucccgcuauagcaagaaauucaagccagagauugccauccgacccaaagugcgugaucaggagggaagaaugaauuacuauuggaccuugguggaaccuggugacaagauuacauuugaggcgacuggcaaccuggucguuccaagguacgcauucgccauggaacggaacgcugggucgggaaucauaauuucugauaccccggugcaugacugcaauacaaccugucaaacgcccaaaggcgccaucaacacuucccuaccuuuucagaauauucacccaaucacaaucgguaagugccccaaguauguaaaaucaaccaagcuccgccuggcaacugggcuuagaaacauuccuaguauacagagcaggggacuguucggcgcuaucgccggcuuuauugaagggggauggacagguaugguggacggcugguacggguaucaucaccagaaugaacaaggauccggcuacgcggccgauuugaaaucuacccagaacgcaaucgacgagauaacgaauaaggucaacagcgugauugagaaaaugaauacccaguucacagcuguugguaaggaguucaaccaccucgagaagcggaucgaaaaucugaacaaaaagguggaugacggguuuuuagauaucuggacuuacaaugccgagcugcucguccuucuggaaaacgagcgcaccuuggacuaucaugauucaaaugugaaaaaccuauacgagaagguacgaagucagcugaaaaacaaugcuaaggaaauuggcaacggauguuucgaguuuuaucacaagugcgacaauacauguauggaauccguuaaaaacggcacuuacgauuauccaaaguacagcgaggaagccaaacucaauagagaggagaucgacggggugaagcuggaaucuaccaggauuuaucaaauacuugcaaucuacucaacagucgccaguagccugguguuggucgugucccucggagcuauuucuuucuggaugugcucgaacgguagccugcagugccggaucuguaucuga

SEQ ID NO: 133034 - RNA, 1701 nt, Artificial Sequence; identical to SEQ ID NO: 130959
  derived and/or modified CDS sequence (opt3) from hemagglutinin__InfluenzaA__ADH01808

SEQ ID NO: 133035 - RNA, 1701 nt, Artificial Sequence
  derived and/or modified CDS sequence (opt3) from hemagglutinin__InfluenzaA__ADH01818
augaaggccauccuggugguccuccuuuacaccuucgcuacagcaaacgccgacacucugugcauuggcuaucacgcgaauaacagcacggauaccguugacacaguguuggagaaaaauguaacugugacccauuccgucaacuuacuggaagauaagcacaaugggaaacuauguaagcucagaggaguggcuccccugcaucuugguaaaugcaacauagccggcuggauccuggggaauccugagugugaaucuuugucaacagcaaguagcugguccuacauuguugagaccucuucgucagacaacggaacuugcuauccaggcgauuuuaucgacuacgaggagcucagggagcagcugagcaguguguccucuuucgaacgguuugagauuuucccgaagacaagcuccuggcccaaucacgauucaaacaagggugucaccgccgcuuguccucaugcaggggccaaaaguuuuuauaagaaucugaucuggcucgugaaaaagggaaacagcuacccaaaauuaucuaaguccuauauaaaugacaagggcaaagaaguacugguucuuuggggcauccaccaccccucaacgagcgcugaucaacagaguuuguaccagaacgccgacgcguacguguucgucgggacuucucgcuauuccaagaaauuuaagccugagauugcaauccgaccaaaagugcgugaucaggagggaagaaugaauuacuauuggacccugguggaacccggugacaagauuacauucgaggccacuggcaaccuagucguuccuagguacgcuuuugccauggaacggaacgcagggagcggaaucauaauuucggauaccccagugcaugacugcaauacaaccugucaaacgccgaaaggcgcuaucaacacuucucuccccuuccagaauauucacccuaucacaaucgguaagugcccaaaguauguaaaauccaccaagcugcgccuugccacugggcugagaaacgugcccucaauucagaguaggggauuguuuggcgcgauagccggcuucaucgaagggggauggacagguauggucgacggcugguacggguaucaucaccagaaugaacaaggaagcggcuacgcagcugaucucaaauccacccagaacgccauugacgagaucacgaauaaggugaacucuguuauagagaaaaugaauacccaguuuacagcuguggguaaggaguucaaccaccuggaaaagcggauugaaaauuuaaacaaaaaggucgaugacggguuccuggauaucuggacuuacaaugccgagcuccuugugcuguuggaaaacgagcgcacccuagacuaucaugauagcaauguaaagaaccuguacgagaagguucgaucacagcucaaaaacaaugcaaaggaaaucggcaacggauguuuugaguucuaucacaagugcgacaauacauguauggaaagugugaaaaacggcacuuacgauuauccuaaguacuccgaggaagccaaacugaauagagaggagauugacggggucaaacuugaaagcaccaggaucuaucaaauucuggcuauauacucuacaguggcgucaaguuugguccucaucgugagccugggagcaauuuccuuuuggaugugcucuaacgguucguuacagugccggaucuguaucuga

SEQ ID NO: 133036 - RNA, 1701 nt, Artificial Sequence; identical to SEQ ID NO: 130959
  derived and/or modified CDS sequence (opt3) from hemagglutinin__InfluenzaA__ADH01828

SEQ ID NO: 133037 - RNA, 1701 nt, Artificial Sequence; identical to SEQ ID NO: 130717
  derived and/or modified CDS sequence (opt3) from hemagglutinin__InfluenzaA__ADH01838

SEQ ID NO: 133038 - RNA, 1701 nt, Artificial Sequence; identical to SEQ ID NO: 130959
  derived and/or modified CDS sequence (opt3) from hemagglutinin__InfluenzaA__ADH01848

SEQ ID NO: 133039 - RNA, 1701 nt, Artificial Sequence; identical to SEQ ID NO: 130959
  derived and/or modified CDS sequence (opt3) from hemagglutinin__InfluenzaA__ADH01858

SEQ ID NO: 133040 - RNA, 1701 nt, Artificial Sequence; identical to SEQ ID NO: 130717
  derived and/or modified CDS sequence (opt3) from hemagglutinin__InfluenzaA__ADH01868

SEQ ID NO: 133041 - RNA, 1701 nt, Artificial Sequence; identical to SEQ ID NO: 130717
  derived and/or modified CDS sequence (opt3) from hemagglutinin__InfluenzaA__ADH01878

SEQ ID NO: 133042 - RNA, 1701 nt, Artificial Sequence; identical to SEQ ID NO: 130959
  derived and/or modified CDS sequence (opt3) from hemagglutinin__InfluenzaA__ADH01888

SEQ ID NO: 133043 - RNA, 1701 nt, Artificial Sequence; identical to SEQ ID NO: 130717
  derived and/or modified CDS sequence (opt3) from hemagglutinin__InfluenzaA__ADH01898

SEQ ID NO: 133044 - RNA, 1701 nt, Artificial Sequence; identical to SEQ ID NO: 130808
  derived and/or modified CDS sequence (opt3) from hemagglutinin__InfluenzaA__ADH01908

SEQ ID NO: 133045 - RNA, 1701 nt, Artificial Sequence
  derived and/or modified CDS sequence (opt3) from hemagglutinin__InfluenzaA__ADH01918
augaaggccauccuggugguccuccuuuacaccuucgcuacagcaaacgccgacacucugugcauuggcuaucacgcgaauaacagcacggauaccguugacacaguguuggagaaaaauguaacugugacccauuccgucaacuuacuggaagauaagcacaaugggaaacuauguaagcucagaggaguggcuccccugcaucuugguaaaugcaacauagccggcuggauccuggggaauccugagugugaaucuuugucaacagagaguagcugguccuacauuguugaaaccucuucgucagacaacggaacuugcuauccaggcgauuuuaucgacuacgaggagcucagggaacagcugagcaguguguccucuuucgagcgguuugaaauuuucccgaagacaagcuccuggcccaaucacgauucaaacaagggugucaccgcagccuguccucaugcuggggcaaaaaguuuuuauaagaaucugaucuggcucgugaaaaagggaaacagcuacccaaaauuaucuaaguccuauauaaaugacaaggagaaagagguacugguucuuuggggcauccaccaccccucaacgagcgccgaucaacagaguuuguaccagaacgcugacgccuacguguucgucggcacuucucgcuauuccaagaaauuuaagccugaaauugcgauccgaccaaaagugcgugaucaggaggggagaaugaauuacuauuggacccugguggaacccggagacaagauuacauucgaggcaacugguaaccuagucguuccuagguacgccuuugcuauggaacggaacgccggcagcgggaucauaauuucggauaccccagugcaugacugcaauacaaccugucaaacgccgaaaggagcaaucaacacuucucuccccuuccagaauauucacccuaucacaaucggcaagugcccaaaguauguaaaauccaccaagcugcgccuugcuacuggucugagaaacgugcccucaauucagaguaggggguuguuuggagccauagcgggcuucaucgagggcggguggacaggaauggucgacgguugguacggcuaucaucaccagaaugagcaagggagcggauacgccgcagaucucaaauccacccagaacgcuauugacaagaucacgaauaaagugaacucuguuauagaaaagaugaauacccaguuuacagccgugggcaaggaguucaaccaccuggaaaaacggauugagaauuuaaacaagaaagucgaugacgguuuccuggauaucuggacuuacaaugcugaacuccuugugcuguuggagaacgagcgcacccuagacuaucaugauagcaauguaaagaaccuguacgaaaaaguucgaucacagcucaagaacaaugccaaggagaucgggaacggcuguuuugaguucuaucacaaaugcgacaauacauguauggaaagugugaagaacggaacuuacgauuauccuaaauacuccgaagaggcaaagcugaauagagaggaaauugacggcgucaaacuugagagcaccaggaucuaucaaauucuggccauauacucuacaguggcuucaaguuugguccucgugguuagccugggggcgaucuccuuuuggaugugcucuaacggaucguuacagugccggauuuguaucuga

SEQ ID NO: 133046 - RNA, 1701 nt, Artificial Sequence
  derived and/or modified CDS sequence (opt3) from hemagglutinin__InfluenzaA__ADH01928
augaaggccauccuggugguccuccuuuacaccuucgcuacagcaaacgccgacacucugugcauuggcuaucacgcgaauaacagcacggauaccguugacacaguguuggagaaaaauguaacugugacccauuccgucaacuuacuggaagauaagcacaaugggaaacuauguaagcucagaggaguggcuccccugcaucuugguaaaugcaacauagccggcuggauccuggggaauccugagugugaaucuuugucaacagcaaguagcugguccuacauuguugagaccucuucgucagacaacggaacuugcuauccaggcgauuuuaucgacuacgaggagcucagggagcagcugagcagugccuccucuuucgaacgguuugagauuuucccgaagacaagcuccuggcccaaucacgauucaaacaagggugugaccgcugcauguccucaugccggggcuaaaaguuuuuauaagaaucugaucuggcucgucaaaaagggaaacagcuacccaaaauuaucuaaguccuauauaaaugacaagggcaaagaagugcugguacuuuggggcauccaccaccccucaacgagcgccgaucaacagaguuuguaccagaacgcggacgcauacguuuucguggggacuucucgcuauuccaagaaauuuaagccugagauugccauccgaccaaaaguccgugaucaggagggaagaaugaauuacuauuggacccugguggaacccggugacaagauuacauucgaggcuacuggcaaccuaguggucccuagguacgccuuugcaauggaacggaacgcugggagcggaaucauaauuucggauaccccaguucaugacugcaauacaaccugucaaacgccgaaaggcgccaucaacacuucucuccccuuccagaauauucacccuaucacaaucgguaagugcccaaaguaugugaaauccaccaagcugcgccuugcgacugggcugagaaacauucccucaauacagaguaggggauuguuuggcgccaucgcaggcuucauugaagggggauggacagguaugguagacggcugguacggguaucaucaccagaaugaacaaggaagcggcuacgcugccgaucucaaauccacccagaacgcuaucgacgagauaacgaauaaggugaacucugucauugagaaaaugaauacccaguuuacagccguggguaaggaguucaaccaccuggaaaagcggaucgaaaauuuaaacaaaaagguugaugacggguuccuggauaucuggacuuacaaugcagagcuccuugugcuguuggaaaacgagcgcacccuagacuaucaugauagcaaugucaaaaaccuguacgagaaggugcgaucacagcucaaaaacaaugccaaggaaauuggcaacggauguuuugaguucuaucacaagugcgacaauacauguauggaaaguguaaagaacggcacuuacgauuauccuaaguacuccgaggaagcuaaacugaauagagaggagaucgacgggguuaaacuugaaagcaccaggauuuaucaaauacuggcgaucuacucuacaguggcaucaaguuugguccucguggucagccugggagccauuuccuuuuggaugugcucuaacgguucguuacagugccggaucuguaucuga

SEQ ID NO: 133047 - RNA, 1701 nt, Artificial Sequence
  derived and/or modified CDS sequence (opt3) from hemagglutinin__InfluenzaA__ADH01938
augaaggccauccuggugguccuccuuuacaccuucgcuacagcaaacgccgacacucugugcauuggcuaucacgcgaauaacagcacggauaccguugacacaguguuggagaaaaauguaacugugacccauuccgucaacuuacuggaagauaagcacaaugggaaacuauguaagcucagaggaguggcuccccugcaucuugguaaaugcaacauagccggcuggauccuggggaauccugagugugaaucuuugucaacagcaaguagcugguccuacauuguugagaccucuucgucagacaacggaacuugcuauccaggcgauuuuaucgacuacgaagaacucagggagcagcugagcaguguguccucuuucgaacgguuugagauuuucccgaagacaagcuccuggcccaaucacgauucaaacaagggugucaccgccgcuuguccucaugcaggggccaaaaguuuuuauaagaaucugaucuggcucgugaaaaagggaaacagcuacccaaaauuaucuaaguccuauauaaaugacaagggcaaagaaguacugguucuuuggggcauccaccaccccucaacgagcgcugaucaacagaguuuguaccagaacgccgacgcguacguguucgucgggacuucucgcuauuccaagaaauuuaagccugagauugcaauccgaccaaaagugcgugaucaggagggaagaaugaauuacuauuggacccugguggaacccggugacaagauuacauucgaggccacuggcaaccuagucguuccuagguacgcuuuugccauggaacggaacgcagggagcggaaucauaauuucggauaccccagugcaugacugcaauacaaccugucaaacgccgaaaggcgcuaucaacacuucucuccccuuccagaauauucacccuaucacaaucgguaagugcccaaaguauguaaaauccaccaagcugcgccuugccacugggcugagaaacgugcccucaauucagaguaggggauuguuuggcgcgauagccggcuucaucgaagggggauggacagguauggucgacggcugguacggguaucaucaccagaaugaacaaggaagcggcuacgcagcugaucucaaauccacccagaacgccauugacgagaucacgaauaaggugaacucuguuauagagaaaaugaauacccaguuuacagcuguggguaaggaguucaaccaccuggagaagcggauugaaaauuuaaacaaaaaggucgaugacggguuccuggauaucuggacuuacaaugccgagcuccuugugcuguuggaaaacgagcgcacccuagacuaucaugauagcaauguuaaaaaccuguacaagaaaguacgaucacagcucaagaacaaugcaaaggagaucggcaacggauguuuugaguucuaucacaaaugcgacaauacauguauggagagugugaagaacggcacuuacgauuauccuaaauacuccgaagaggccaagcugaauagagaagagauugacggggucaaacuugagagcaccaggaucuaucaaauucuggcuauauacucuacaguggcgucaaguuugguccucgugguuagccugggagcaaucuccuuuuggaugugcucuaacgguucguuacagugccggauuuguaucuga

SEQ ID NO: 133048 - RNA, 1701 nt, Artificial Sequence; identical to SEQ ID NO: 131881
  derived and/or modified CDS sequence (opt3) from hemagglutinin__InfluenzaA__ADH01948

SEQ ID NO: 133049 - RNA, 1701 nt, Artificial Sequence
  derived and/or modified CDS sequence (opt3) from hemagglutinin__InfluenzaA__ADH01958
augaaggccauccuggugguccuccuuuacaccuucgcuacagcaaacgccgacacucugugcauuggcuaucacgcgaauaacagcacggauaccguugacacaguguuggagaagaauguaacugugacccauuccgucaacuuacuggaagauaagcacaaugggaaacuauguaagcucagaggaguggcuccccugcaucuugguaaaugcaacauagccggcuggauccuggggaauccugagugugaaucuuugucaacagcaaguagcugguccuacauuguugagaccucuucgucagacaacggaacuugcuauccaggcgauuuuaucgacuacgaggagcucagggagcagcugagcaguguguccucuuucgaacgguuugagauuuucccgaagacaagcuccuggcccaaucacgauucaaacaagggugucaccgccgcuuguccucaugcaggggccaaaaguuuuuauaagaaucugaucuggcucgugaaaaagggaaacagcuacccaaaauuaucuaaguccuauauaaaugacaagggcaaagaaguacugguucuuuggggcauccaccaccccucaacgagcgcugaucaacagaguuuguaccagaacgccgacgcguacguguucgucgggacuucucgcuauuccaagaaauuuaagccugagauugcaauccgaccaaaagugcgugaucaggagggaagaaugaauuacuauuggacccugguggaacccggugacaagauuacauucgaggccacuggcaaccuagucguuccuagguacgcuuuugccauggaacggaacgcagggagcggaaucauaauuucggauaccccagugcaugacugcaauacaaccugucaaacgccgaaaggcgcuaucaacacuucucuccccuuccagaauauucacccuaucacaaucgguaacugcccaaaguauguaaaguccaccaaacugcgccuugccacugggcugagaaaugugcccucaauucagaguaggggauuguuuggcgcgauagccggcuucaucgaagggggauggacagguauggucgacggcugguacggguaucaucaccagaacgaacaaggaagcggcuacgcagcugaucucaaguccacccagaaugccauugacaaaaucacgaacaagguaaauucuguuauagagaaaaugaacacccaguuuacagcuguggguaaggaguucaaucaccuggaaaagcggauugagaacuuaaauaaaaaggucgaugacggguuccuggauaucuggacuuacaacgccgaacuccuugugcuguuggagaaugaacgcacccuagacuaucaugauagcaacgugaaaaaccuguacgagaagguucgaucacagcucaaaaauaacgcaaaggagaucggcaauggauguuuugaguucuaucacaagugcgacaacacauguauggaaagugugaaaaauggcacuuacgauuauccuaaguacuccgaagaggccaaacugaacagagaagagauugacggggucaaacuugagagcaccaggaucuaucaaauucuggcuauauacucuacaguggcgucaaguuugguccucaucgugagccugggagcaauuuccuuuuggaugugcucuaaugguucguuacagugccggaucuguaucuga

SEQ ID NO: 133050 - RNA, 1701 nt, Artificial Sequence
  derived and/or modified CDS sequence (opt3) from hemagglutinin__InfluenzaA__ADH01968
augaaggccauccuggugguccuccuuuacaccuucgcuacagcaaacgccgacacucugugcauuggcuaucacgcgaauaacagcacggauaccguugacacaguguuggagaaaaauguaacugugacccauuccgucaacuuacuggaagauaagcacaaugggaaacuauguaagcucagaggaguggcuccccugcaucuugguaaaugcaacauagccggcuggauccuggggaauccugagugugaaucuuugucaacagcaaguagcugguccuacauuguugagaccucuucgucagacaacggaacuugcuauccaggcgauuuuaucgacuacgaagaacucagggagcagcugagcaguguguccucuuucgaacgguuugagauuuucccgaagacaagcuccuggcccaaucacgauucaaacaagggugucaccgccgcuuguccucaugcaggggccaaaaguuuuuauaagaaucugaucuggcucgugaaaaagggaaacagcuacccaaaauuaucuaaguccuauauaaaugacaagggcaaagaaguacugguucuuuggggcauccaccaccccucaacgagcgcugaucaacagaguuuguaccagaacgccgacgcguacguguucgucgggacuucucgcuauuccaagaaauuuaagccugagauugcaauccgaccaaaagugcgugagcaggaaggaagaaugaauuacuauuggacccugguggagcccggugauaagauuacauucgaagccacuggcaaccuagucguuccuagguacgcuuuugccauggagcggaacgcagggagcggaaucauaauuucggacaccccagugcaugauugcaauacaaccugucaaacgccgaaaggcgcuaucaacacuucucuccccuuccagaauauucacccuaucacaaucgguaagugcccaaaguauguaaaauccaccaagcugcgccuugccacugggcugagaaacgugcccucaauucagaguaggggauuguuuggcgcgauagccggcuucaucgaagggggauggacagguauggucgacggcugguacggguaucaucaccagaaugagcaaggaagcggcuacgcagcugaccucaaauccacccagaacgccauugauaagaucacgaauaaagugaacucuguuauagagaagaugaauacccaguuuacagcuguggguaaggaguucaaccaccuggagaaacggauugaaaauuuaaacaagaaagucgacgauggguuccuggacaucuggacuuacaaugccgagcuccuugugcuguuggaaaacgagcgcacccuagauuaucaugacagcaauguaaagaaccuguacgagaaaguucgaaaccagcucaagaauaacgcaaaggaaaucggcaauggauguuuugaguucuaucacaaaugcgauaacacauguauggaaucagugaagaauggcacuuacgacuauccuaaauacagugaggaagccaagcugaacagagaggagauugauggggucaaacuugaauccaccaggaucuaucaaauucuggcuauauacagcacaguggcgucuucauugguccucgugguuagucugggagcaaucagcuuuuggaugugcuccaaugguucuuuacagugccggauuuguaucuga

SEQ ID NO: 133051 - RNA, 1701 nt, Artificial Sequence; identical to SEQ ID NO: 131881
  derived and/or modified CDS sequence (opt3) from hemagglutinin__InfluenzaA__ADH01978

SEQ ID NO: 133052 - RNA, 1701 nt, Artificial Sequence; identical to SEQ ID NO: 131881
  derived and/or modified CDS sequence (opt3) from hemagglutinin__InfluenzaA__ADH01988

SEQ ID NO: 133053 - RNA, 1701 nt, Artificial Sequence; identical to SEQ ID NO: 132884
  derived and/or modified CDS sequence (opt3) from hemagglutinin__InfluenzaA__ADH01998

SEQ ID NO: 133054 - RNA, 1701 nt, Artificial Sequence
  derived and/or modified CDS sequence (opt3) from hemagglutinin__InfluenzaA__ADH02008
augaaggccauccuggugguccuccuuuacaccuucgcuacagcaaacgccgacacucugugcauuggcuaucacgcgaauaacagcacggauaccguugacacaguguuggagaaaaauguaacugugacccauuccgucaacuuacuggaagggaagcacaauggaaaacuauguaagcucagagguguggcuccccugcaucuuggcaaaugcaacauagccggguggauccugggaaauccugagugugaaucuuugucaacagcaaguagcugguccuacauuguugagaccucuucgucagauaacggcacuugcuauccaggugacuuuaucgauuacgaagaacucagggagcagcugagcaguguguccucuuucgaacgguuugagauuuucccgaagacaagcuccuggcccaaucacgacucaaacaagggggucaccgccgcuuguccucaugcaggagccaaaaguuuuuauaagaaucugaucuggcucauaaagaagggcaacagcuacccaaaauuaucuaaguccuauaucaaugauaaggaaaaagaggugcugguacuuuggggcauucaccaccccucaacgagcgcugaccaacagaguuuguaccagaacgccgaugcguacguuuucguggggacuucucgcuauuccaagaaauuuaagccugagaucgcaauucgaccaaaaguccgugaccaggaaggaagaaugaauuacuauuggacccugguggagcccggugauaagaucacauucgaagccacuggcaaccuaguggucccuagguacgcuuuugccauggagcggaacgcagggagcggaauaauuaucucggacaccccaguucaugauugcaauacaaccugucaaacgccgaaaggcgcuauuaacacuucucuccccuuccagaauauccacccuaucacaauugguaagugcccaaaguaugugaaauccaccaagcugcgccuugccacugggcugagaaacauacccucaauccagaguaggggauuguuuggcgcgauugccggcuucaucgaagggggauggacagguaugguagacggcugguacggguaucaucaccagaaugagcaaggaagcggcuacgcagcugaccucaaauccacccagaacgccauagaugagauuacgaauaaggugaacucugucaucgagaaaaugaauacccaguuuacagcuguggguaaggaguucaaccaccuggaaaagcggaucgagaauuuaaacaaaaagguugacgauggguuccuggacauuuggacuuacaaugccgaacuccuugugcuguuggagaacgagcgcacccuagauuaucaugacagcaaugucaaaaaccuguacgaaaaggugcgaucacagcucaaaaacaaugcaaaggagaucggcaacggauguuuugaguucuaucacaagugcgauaauacauguauggaaaguguuaaaaacggcacuuacgacuauccuaaguacuccgaagaggccaaacugaauagagaggaaauugaugggguaaaacuugagagcaccaggauauaucaaauccuggcuauuuacucuacaguggcgucaaguuugguccucguggucagccugggagcaaucuccuuuuggaugugcucuaacgguucguuacagugccggaucuguauuuga

SEQ ID NO: 133055 - RNA, 1701 nt, Artificial Sequence; identical to SEQ ID NO: 131881
  derived and/or modified CDS sequence (opt3) from hemagglutinin__InfluenzaA__ADI24508

SEQ ID NO: 133056 - RNA, 1701 nt, Artificial Sequence
  derived and/or modified CDS sequence (opt3) from hemagglutinin__InfluenzaA__ADI24515
augaaggccauccuggugguccuccuuuacaccuucgcuacagcaaacgccgacacucugugcguuggcuaucacgcgaauaacagcacggauaccguggacacaguauuggagaaaaaugugacugucacccauuccgugaacuuacuggaagauaagcacaaugggaaacuauguaagcucagaggaguugcuccccugcaucuugguaaaugcaacauugccggcuggauacuggggaauccugagugugaaucuuugccaacagcaucaaguuggagcuacaucguggagaccuccucuucggacaacggaacuugcuauccgggcgauuuuauugacuacgaggagcucagggagcagcugucaagcgucaguuccuucgaacgguuugagaucuuccccaagacaucuagcuggccuaaucacgauuccaacaagggugugaccgccgcuuguccacaugcaggggccaaaucauuuuauaagaaucugauuuggcucguuaaaaagggaaacaguuaccccaaauuaagcaagucuuauaucaaugacaagggcaaagaaguacuggugcuuuggggcauacaccacccuuccacgucagcugaucaacagagcuuguaccagaacgccgacgcguacgucuucguggggaccagucgcuauucuaagaaauuuaagccagagaucgcaauucgacccaaagugcgugaucaggagggaagaaugaauuacuauuggacucuggucgaaccuggugacaagaucacauucgaggccacuggcaaccuaguugugccaagguacgcuuuugccauggaacggaacgcaggguccggaauuaucauaagcgauaccccgguacaugacugcaauacaaccugucaaacgcccaaaggcgcuauuaacacuucgcucccuuuccagaauauccacccaauuacaaucgguaagugccccaaguaugugaaaucuaccaagcugcgccuugccacugggcugagaaacgucccuuccauccagucaaggggauuguuuggcgcgauugccggcuucauagaagggggauggacagguaugguggacggcugguacggguaucaucaccagaaugaacaaggaaguggcuacgcagcugaucucaaaagcacccagaacgccaucgacaaguccacgaauaaaguuaacucugugauugagaagaugaauacccaguuuacagcugucgguaaggaguucaaccaccuggaaaaacggaucgagaauuuaaacaagaaaguggaugacggguuccuggauauauggacuuacaaugccgaacuccuuguacuguuggagaacgaacgcacccuagacuaucaugauagcaauguuaagaaccuguacgagaaagugcgaucacagcucaagaacaaugcaaaggagauuggcaacggauguuuugaguucuaucacaaaugcgacaauacauguauggaaagugucaagaacggcacuuacgauuauccaaaauacuccgaagaggccaagcugaauagagaagagaucgacggggugaaacuugagagcaccaggaucuaucaaauucuggcuaucuacucuacagucgcgucaaguuuggugcucguugugagccugggagcaauuuccuuuuggaugugcucuaacgguucguuacagugccggauauguaucuga

SEQ ID NO: 133057 - RNA, 1701 nt, Artificial Sequence; identical to SEQ ID NO: 131881
  derived and/or modified CDS sequence (opt3) from hemagglutinin__InfluenzaA__ADI24517

SEQ ID NO: 133058 - RNA, 1701 nt, Artificial Sequence; identical to SEQ ID NO: 131881
  derived and/or modified CDS sequence (opt3) from hemagglutinin__InfluenzaA__ADI24519

SEQ ID NO: 133059 - RNA, 1701 nt, Artificial Sequence; identical to SEQ ID NO: 131881
  derived and/or modified CDS sequence (opt3) from hemagglutinin__InfluenzaA__ADI24521

SEQ ID NO: 133060 - RNA, 1701 nt, Artificial Sequence; identical to SEQ ID NO: 132269
  derived and/or modified CDS sequence (opt3) from hemagglutinin__InfluenzaA__ADI24523

SEQ ID NO: 133061 - RNA, 1701 nt, Artificial Sequence
  derived and/or modified CDS sequence (opt3) from hemagglutinin__InfluenzaA__ADI24525
augaaggccauccuggugguccuccuuuacaccuucgcuacagcaaacgccgacacucugugcauuggcuaucacgcgaauaacagcacggauaccguugacacaguguuggagaaaaauguaacugugacccauuccgucaacuuacuggaagauaagcacaaugggaaacuaugugagcucagaggaguggcuccccugcaucuugguaagugcaacauagccggcuggauccuggggaauccugaaugugagucuuugucaacagcaaggaguuggagcuacauuguugaaaccuccucuucggacaacggaacuugcuauccaggcgauuuuaucgacuacgaggagcuccgggaacagcugucaagcgugaguuccuucgagcgcuuugaaauuuucccgaaaacaucuagcuggcccaaucacgauuccaacaagggugucaccgccgcuuguccucaugcaggggccaagucauuuuauaaaaaucugaucuggcucgugaagaaaggaaacaguuacccaaaguuaagcaaaucuuauauaaaugacaagggcaaggagguacugguucuuuggggcauccaccaccccuccacgucagcugaucaacagagcuuguaccagaacgccgacgcguacguguucgucgggaccagucgauauucuaaaaaguuuaaaccugagauugcaauccguccaaaggugagagaucaggaaggaaggaugaauuacuauuggacucugguggagcccggugacaaaauuacauucgaagccacuggcaaccuagucguuccucgguacgcuuuugccauggagcgcaacgcaggguccggaaucauaauuagcgauaccccagugcaugacugcaauacaaccugucaaacgccgaagggcgcuaucaacacuucgcuccccuuccagaauauucacccuaucacaaucgguaaaugcccaaaguauguaaagucuaccaaacugagacuugccacugggcugaggaacgugcccuccauucagucacggggauuguuuggcgcgauagccggcuucaucgaagggggauggacagguauggucgacggcugguacggguaucaucaccagaaugagcaaggaaguggcuacgcagcugaucucaagagcacccagaacgccauugacaaaaucacgaauaaggugaacuccguuauagagaaaaugaauacccaguuuacagcuguggguaaggaguucaaccaccuggaaaagcgcauugaaaauuuaaacaaaaaggucgaugacggguuccuggauaucuggacuuacaaugccgagcuccuugugcuguuggaaaacgagcgaacccuagacuaucaugauucuaauguuaaaaaccuguacgagaagguaaaaagccagcucaagaacaaugcaaaggaaaucggcaacggauguuuugaguucuaucacaaaugcgacaauacauguauggaaucagugaagaacggcacuuacgauuauccuaaauacagugaggaagccaagcugaauagagaggagauugacggggucaaacuugaauccaccaggaucuaucaaauucuggcuauauacagcacaguggcgucuucauugguccucgugguuagucugggagcaaucagcuuuuggaugugcuccaacgguucuuuacagugccggauuuguaucuga

SEQ ID NO: 133062 - RNA, 1701 nt, Artificial Sequence; identical to SEQ ID NO: 131881
  derived and/or modified CDS sequence (opt3) from hemagglutinin__InfluenzaA__ADI24527

SEQ ID NO: 133063 - RNA, 1701 nt, Artificial Sequence; identical to SEQ ID NO: 132269
  derived and/or modified CDS sequence (opt3) from hemagglutinin__InfluenzaA__ADI24529

SEQ ID NO: 133064 - RNA, 1701 nt, Artificial Sequence
  derived and/or modified CDS sequence (opt3) from hemagglutinin__InfluenzaA__ADI24531
augaaggccauccuggugguccuccuuuacaccuucgcuacagcaaacgccgacacucugugcauuggcuaucacgcgaauaacagcacggauaccguugacacaguguuggagaaaaauguaacugugacccauuccgucaacuuacuggaagauaagcacaaugggaaacuauguaagcucagaggaguggcuccccugcaucuugguaaaugcaacauagccggcuggauccuggggaauccugagugugaaucuuugucaacagcaaguagcugguccuacauuguugagaccucuucgucagacaacggaacuugcuauccaggcgauuuuaucaauuacgaggagcucagggagcagcugagcaguguguccucuuucgaacgguuugagauuuucccgaagacaagcuccuggcccaaccacgacucaaauaagggugucaccgccgcuuguccucaugcaggggccaaaaguuuuuauaagaaccugaucuggcucgugaaaaagggaaauagcuacccaaaauuaucuaaguccuauauaaacgauaagggcaaagaaguacugguucuuuggggcauccaccaccccucaacgagcgcugaccaacagaguuuguaccagaaugccgaugcguacguguucgucgggacuucucgcuauuccaagaaauuuaagccugagauugcaauccgaccaaaagugcgugaccaggagggaagaaugaacuacuauuggacccugguggaacccggugauaagauuacauucgaggccacuggcaaccuagucguuccuagguacgcuuuugccauggaacggaaugcagggagcggaaucauaauuucggacaccccagugcaugauugcaacacaaccugucaaacgccgaaaggcgcuaucaauacuucucuccccuuccagaacauucacccuaucacaaucgguaagugcccaaaguauguaaaauccaccaagcugcgccuugccacugggcugagaaaugugcccucaauucagaguaggggauugcucggcgcgauagccggcuuuaucgaagggggauggacagguauggucgacggcugguacggguaucaucaccagaacgaacaaggaagcggcuacgcagcugaccugaaauccacccagaaugccauugauaagaucacgaacaaaguuaauucugugauagagaagaugaacacccaguucacagcuguggguaaggaguuuaaucacuuagaaaaacggauugagaaccugaauaagaaagucgacgauggguuccucgacaucuggacuuacaacgccgaacuucugguguugcuagagaaugaacgcacccuggauuaucaugacagcaacguaaagaaccucuacgagaaaguucgaucacagcugaagaauaacgcaaaggagaucggcaauggauguuucgaauuuuaucacaaaugcgauaacacauguauggagagugugaagaauggcacuuacgacuauccuaaauacuccgaagaggccaaacuuaacagagaagagauugauggggucaagcuggagagcaccaggaucuaucaaauuuuggcuauauacucuacaguggcgucaagucucguccuggugguuagcuuaggagcaaucuccuucuggaugugcucuaaugguucgcugcagugcaagauuuguaucuga

SEQ ID NO: 133065 - RNA, 1701 nt, Artificial Sequence
  derived and/or modified CDS sequence (opt3) from hemagglutinin__InfluenzaA__ADI24536
augaaggccauccuggugguccuccuuuacaccuucgcuacagcaaacgccgacacucugugcauuggcuaucacgcgaauaacagcacggauaccguugacacaguguuggagaaaaauguaacugugacccauuccgucaacuuacuggaagauaagcacaaugggaaacuauguaagcucagaggaguggcuccccugcaucuugguaaaugcaacauagccggcuggauccuggggaauccugagugugaaucuuugucaacagcaaguagcugguccuacauuguugagaccucuucgucagacaacggaacuugcuauccaggcgauuuuaucgacuacgaggagcucagggagcagcugagcaguguguccucuuucgaacgguuugagauuuucccgaagacaagcuccuggcccaaucacgauucaaacaagggugucaccgccgcuuguccucaugcaggggccaaaaguuuuuauaagaaucugaucuggcucgugaaaaagggaaacagcuacccaaaauuaucuaaguccuauauaaaugacaagggcaaagaaguacugguucuuuggggcauccaccaccccucaacgagcgcugaucaacagaguuuguaccagaacgccgacgcguacguguucgucgggacuucucgcuauuccaagaaauuuaagccugagauugcaauccgaccaaaagugcgugaucaggagggaagaaugaauuacuauuggacccugguggaacccggugacaagauuacauucgaggccacuggcaaccuagucguuccuagguacgcuuuugccauggaacgggaugcagggagcggaaucauaauuucggacaccccagugcaugacugcaacacaaccugucaaacgccgaaaggcgcuaucaauacuucucuccccuuccagaacauucacccuaucacaaucgguaagugcccaaaguauguaaaauccaccaagcugcgccuugccacugggcugagaaaugugcccucaauucagaguaggggauuguuuggcgcgauagccggcuucaucgaagggggauggacagguauggucgauggcugguacggguaucaucaccagaacgaacaaggaagcggcuacgcagcugaccucaaauccacccagaaugccauugauaagaucacgaacaaaguuaauucugugauagagaagaugaacacccaguuuacagcuguggguaaggaguucaaucaccuggaaaaacggauugagaacuuaaauaagaaaaucgacgauggguuccuggacaucuggacuuacaacgccgaacuccuuguccuguuggagaaugaacgcacccuagauuaucaugacagcaacgugaagaaucuguacgagaaaguacgaucacagcucaagaacaacgcaaaggagauuggcaauggauguuuugaguucuaucacaaaugcgauaacacauguauggaaaguguuaagaauggcacuuacgacuauccuaaauacuccgaagaggccaagcugaacagagaagagaucgauggggugaaacuugagagcaccaggauuuaucaaauacuggcuaucuacucuacagucgcgucaaguuuggugcucgucgugagccugggagcaauuuccuuuuggaugugcucuaaugguucguuacagugccggaucuguaucuga

SEQ ID NO: 133066 - RNA, 1701 nt, Artificial Sequence; identical to SEQ ID NO: 131881
  derived and/or modified CDS sequence (opt3) from hemagglutinin__InfluenzaA__ADI24546

SEQ ID NO: 133067 - RNA, 1701 nt, Artificial Sequence; identical to SEQ ID NO: 131881
  derived and/or modified CDS sequence (opt3) from hemagglutinin__InfluenzaA__ADI24553

SEQ ID NO: 133068 - RNA, 1701 nt, Artificial Sequence; identical to SEQ ID NO: 131881
  derived and/or modified CDS sequence (opt3) from hemagglutinin__InfluenzaA__ADI24555

SEQ ID NO: 133069 - RNA, 1701 nt, Artificial Sequence
  derived and/or modified CDS sequence (opt3) from hemagglutinin__InfluenzaA__ADI24557
augaaggccauccuggugguccuccuuuacaccuucgcuacagcaaacgccgacacucugugcauuggcuaucacgcgaauaacagcacggauaccguugacacaguguuggagaaaaauguaacugugacccauuccgucaacuuacuggaagauaagcacaaugggaaacuauguaagcucagaggaguggcuccccugcaucuugguaaaugcaacauagccggcuggauccuggggaauccugagugugaaucuuugucaacagcaaguagcugguccuacauuguugagaccucuucgucagacaacggaacuugcuauccaggcgauuuuaucgacuacgaggagcucagggagcagcugagcaguguguccucuuucgaacgguuugagauuuucccgaagacaagcuccuggcccaaucacgauucaaacaagggugucaccgccgcuuguccucaugcaggggccaaaaguuuuuauaagaaucugaucuggcucgugaaaaagggaaacagcuacccaaaauuaucuaaguccuauauaaaugacaagggcaaagaaauccugguacuuuggggcauucaccaccccucaacgagcgcugaucaacagaguuuguaccagaacgccgacgcguacguuuucguggggacuucucgcuauuccaagaaauuuaagccugagaucgcaauucgaccaaaaguccgugaucaggagggaagaaugaauuacuauuggacccugguggaacccggugacaagaucacauucgaggccacuggcaaccuaguggucccuagguacgcuuuugccauggaacggaacgcagggagcggaauaauuaucucggauaccccaguucaugacugcaauacaaccugucaaacgccgaaaggcgcuauuaacacuucucuccccuuccagaauauccacccuaucacaauugguaagugcccaaaguaugugaaauccaccaagcugcgccuugccacugggcugagaaacguacccucaauacagaguaggggauuguuuggcgcgaucgccggcuucauugaagggggauggacagguaugguggacggcugguacggguaucaucaccagaaugaacaaggaagcggcuacgcagcugaucucaaauccacccagaacgccaucgacaagauaacgaauaaagucaacucugugauugagaagaugaauacccaguuuacagcuguugguaaggaguucaaccaccuggaaaaacggaucgagaauuuaaacaagaaaguggaugacggguuccuggauaucuggacuuacaaugccgaacuccuuguccuguuggagaacgaacgcacccuagacuaucaugauagcaaugugaagaaccuguacgagaaaguacgaucacagcucaagaacaaugcaaaggagauuggcaacggauguuuugaguucuaucacaaaugcgacaauacauguauggaaaguguuaagaacggcacuuacgauuauccuaaauacuccgaagaggccaagcugaauagagaagagaucgacggggugaaacuugagagcaccaggauuuaucaaauacuggcuaucuacucuacagucgcgucaaguuuggugcucgucgugagccugggagcaauuuccuuuuggaugugcucuaacgguucguuacagugccggaucuguaucuga

SEQ ID NO: 133070 - RNA, 1701 nt, Artificial Sequence; identical to SEQ ID NO: 131881
  derived and/or modified CDS sequence (opt3) from hemagglutinin__InfluenzaA__ADI24559

SEQ ID NO: 133071 - RNA, 1701 nt, Artificial Sequence
  derived and/or modified CDS sequence (opt3) from hemagglutinin__InfluenzaA__ADI24561
augaaggccauccuggugauucuccuuuacaccuucgcuacagcaaacgccgacacucugugcauaggcuaucacgcgaauaacagcacggauaccgucgacacaguuuuggagaaaaaugugacuguaacccauuccgugaacuuacuggaagauaagcacgacgggaaacuauguaagcucagaggagucgcuccccugcaucuugguaaaugcaauaucgccggcuggauucuggggaacccugagugugaaucuuugucaacagcaaguagcugguccuacaucguggagaccucuucgucagauaauggaacuugcuauccaggcgacuuuauugauuacgaggagcucagggagcagcugagcaguguuuccucuuucgaacgguuugagaucuucccgaagacaagcuccuggcccaaccacgacucaaauaagggugugaccgccgcuuguccucaugcaggggccaaaaguuuuuauaagaaccugauauggcucgucaaaaagggaaauagcuacccaaaauuaucuaaguccuauaucaacgauaagggcaaagaagugcugguacuuuggggcauucaccaccccucaacgagcgcugaccaacagaguuuguaccagaaugccgaugcguacguuuucguggggacuucucgcuauuccaagaaauuuaagccugagaucgcaauucgaccaaaaguccgugaccaggagggaagaaugaacuacuauuggacccugguggaacccggugauaagaucacauucgaggccacuggcaaucuaguggucccuagguacgcuuuugccauggaacggaacgcagggagcggaauaauuaucucggacaccccaguucaugacugcaacacaaccugucaaacgccgaaaggcgcuauuaauacuucucuccccuuccagaacauccacccuaucacaauugguaagugcccaaaguaugugaaauccaccaagcugcgccuugccacugggcugagaaauguacccucaauacagaguaggggauuguuuggcgcgaucgccggcuucauugaagggggauggacagguaugguggauggcugguacggguaucaucaccagaacgaacaaggaagcggcuacgcagcugaccucaaauccacccagaaugccaucgauaagauaacgaacaaagucaauucugugauugagaagaugaacacccaguuuacagcuguugguaaggaguucaaucaccuggaaaaacggaucgagaacuuaaauaagaaaguggacgauggguuccuggacaucuggacuuacaacgccgaacuccuuguccuguuggagaaugaacgcacccuagauuaucaugacagcaacgugaagaaucuguacgagaaaguacgaucacagcucaagaacaacgcaaaggagauuggcaauggauguuuugaguucuaucacaaaugcgauaacacauguauggaaaguguuaagaauggcacuuacgacuauccuaaauacuccgaagaggccaagcugaacagagaagagaucgauggggugaaacuugagagcaccaggauuuaucaaauacuggcuaucuacucuacagucgcgucaaguuuggugcucgucgugagccugggagcaauuuccuuuuggaugugcucuaaugguucguuacagugccggaucuguaucuga

SEQ ID NO: 133072 - RNA, 1701 nt, Artificial Sequence; identical to SEQ ID NO: 131881
  derived and/or modified CDS sequence (opt3) from hemagglutinin__InfluenzaA__ADI24563

SEQ ID NO: 133073 - RNA, 1701 nt, Artificial Sequence
  derived and/or modified CDS sequence (opt3) from hemagglutinin__InfluenzaA__ADI24565
augaaggccauccuggugguccuccuuuacaccuucgcuacagcaaacgccgacacucugugcauuggcuaucacgcgaauaacagcacggauaccguugacacaguguuggagaagaauguaacugugacccauuccgucaacuuacuggaagauaagcacgacgggaaacuauguaagcucagaggaguggcuccccugcaucuugguaaaugcaauauagccggcuggauccuggggaacccugagugugaaucuuugucaacagcaaguagcugguccuacauuguugagaccucuucgucagauaauggaacuugcuauccaggcgacuuuaucgauuacgaggaacucagggagcagcugagcaguguguccucuuucgaacgguuugagauuuucccgaagacaagcuccuggcccaaccacgacucaaauaagggugucaccgccgcuuguccucaugcaggggccaaaaguuuuuauaagaaccugaucuggcucgugaaaaagggaaauagcuacccaaaauuaucuaaguccuauauaaacgauaagggcaaaaagguacugguucuuuggggcauccaccaccccucaacgagcgcugaccaacagaguuuguaccagaaugccgaugcguacguguucgucgggacuucucgcuauuccaaaaaguuuaaaccugaaauugcaauccgaccaaaggugcgugaccaggagggaagaaugaacuacuauuggacccugguggagcccggugauaaaauuacauucgaagccacuggcaaucuagucguuccuagguacgcuuuugccauggagcggaacgcagggagcggaaucauaauuucggacaccccagugcaugacugcaacacaaccugucaaacgccgaagggcgcuaucaauacuucucuccccuuccagaacauucacccuaucacaaucgguaagugcccaaaauauguaaaguccaccaaacugcgccuugccacugggcugagaaaugugcccucaauucagaguaggggauuguuuggcgcgauagccggcuucaucgaagggggauggacagguauggucgauggcugguacggguaucaucaccagaacgagcaaggaagcggcuacgcagcugaccucaaguccacccagaaugccauugauaaaaucacgaacaagguaaauucuguuauagaaaagaugaacacccaguuuacagcuguggguaaagaguucaaucaccuggagaagcggauugaaaacuuaaauaaaaaggucgacgauggguuccuggacaucuggacuuacaacgccgagcuccuugugcuguuggaaaaugagcgcacccuagauuaucaugacagcaacgugaaaaaucuguacgaaaagguucgaucacagcucaagaacaacgcaaaagagaucggcaauggauguuuugaguucuaucacaagugcgauaacacauguauggaaagugugaaaaauggcacuuacgacuauccuaaguacuccgaggaagccaaacugaacagagaggaaauugauggggucaaacuugagagcaccaggaucuaucaaauucuggcuauauacucuacaguggcgucaaguuugguccucgugguuagccugggagcaaucuccuuuuggaugugcucuaaugguucguuacagugccggauuuguaucuga

SEQ ID NO: 133074 - RNA, 1701 nt, Artificial Sequence; identical to SEQ ID NO: 131881
  derived and/or modified CDS sequence (opt3) from hemagglutinin__InfluenzaA__ADI24567

SEQ ID NO: 133075 - RNA, 1701 nt, Artificial Sequence
  derived and/or modified CDS sequence (opt3) from hemagglutinin__InfluenzaA__ADI24569
augaaggccauccuggugguccuccuuuacaccuucgcuacagcaaacgccgacacucugugcauuggcuaucacgcgaauaacagcacggauaccguugacacaguguuggagaaaaauguaacugugacccauuccgucaacuuacuggaagauaagcacaaugggaaacuauguaagcucagaggaguggcuccccugcaucuugguaaaugcaacauagccggcuggauccuggggaauccugagugugaaucuuugucaacagcaaguagcugguccuacauuguugagaccucuucgucagacaacggaacuugcuauccaggcgauuuuaucgacuacgaggagcucagggagcagcugagcaguguguccucuuucgaacgguuugagauuuucccgaagacaagcuccuggcccaaucacgauucaaacaagggugucaccgccgcuuguccucaugcaggggccaaaaguuuuuauaagaaucugaucuggcucgugaaaaagggaaacagcuacccaaaauuaucuaaguccuauauaaaugacaagggcaaagaaguacugguucuuuggggcauccaccaccccucaacgagcgcugaucaacagaguuuguaccagaacgccgacgcguacguguucgucgggacuucucgcuauuccaagaaauuuaagccugagauugcaauccgaccaaaagugcgugaucaggagggaagaaugaauuacuauuggacccugguggaacccggugacaagauuacauucgaggccacuggcaaccuagucguuccuagguacgcuuuugccaucgaacggaacgcagggagcggaauaauuaucucggauaccccagugcaugacugcaauacaaccugucaaacgccgaaaggcgcuauuaacacuucucuccccuuccagaauauccacccuaucacaauugguaagugcccaaaguauguaaaauccaccaagcugcgccuugccacugggcugagaaacgugcccucaauacagaguaggggauuguuuggcgcgaucgccggcuucauugaagggggauggacagguauggucgacggcugguacggguaucaucaccagaaugaacaaggaagcggcuacgcagcugaucucaaauccacccagaacgccaucgacaagauaacgaauaaagugaacucuguuauugagaagaugaauacccaguuuacagcuguggguaaggaguucaaccaccuggaaaaacggaucgagaauuuaaacaagaaagucgaugacggguuccuggauaucuggacuuacaaugccgaacuccuugugcuguuggagaacgaacgcacccuagacuaucaugauagcaauguaaagaaccuguacgagaaaguucgaucacagcucaagaacaaugcaaaggagauuggcaacggauguuuugaguucuaucacaaaugcgacaauacauguauggaaagugugaagaacggcacuuacgauuauccuaaauacuccgaagaggccaagcugaauagagaagagaucgacggggucaaacuugagagcaccaggauuuaucaaauacuggcuaucuacucuacaguggcgucaaguuugguccucgugguuagccugggagcaauuuccuuuuggaugugcucuaacgguucguuacagugccggaucuguaucuga

SEQ ID NO: 133076 - RNA, 1701 nt, Artificial Sequence; identical to SEQ ID NO: 131881
  derived and/or modified CDS sequence (opt3) from hemagglutinin__InfluenzaA__ADI24571

SEQ ID NO: 133077 - RNA, 1701 nt, Artificial Sequence; identical to SEQ ID NO: 132269
  derived and/or modified CDS sequence (opt3) from hemagglutinin__InfluenzaA__ADI24573

SEQ ID NO: 133078 - RNA, 1701 nt, Artificial Sequence
  derived and/or modified CDS sequence (opt3) from hemagglutinin__InfluenzaA__ADI24575
augaaggccauccuggugguccuccuuuacaccuucgcuacagcaaacgccgacacucugugcauuggcuaucacgcgaauaacagcacggauaccguugacacaguguuggagaagaauguaacugugacccauuccgucaacuuacuggaagauaagcacaaugggaaacuauguaagcucagaggaguggcuccccugcaucuugguaaaugcaacauagccggcuggauccuggggaauccugagugugaaucuuugucaacagcaaguagcugguccuacauuguugagaccucuucgucagacaacggaacuugcuauccaggcgauuuuaucaauuacgaggagcucagggagcagcugagcaguguguccucuuucgaacgguuugagauuuucccgaagacaagcuccuggcccaaccacgacucaaauaagggugucaccgccgcuuguccucaugcaggggccaaaaguuuuuauaagaaccugaucuggcucgugaaaaagggaaauagcuacccaaaauuaucuaaguccuauauaaacgauaagggcaaagaaguacugguucuuuggggcauccaccaccccucaacgagcgcugaccaacagaguuuguaccagaaugccgaugcguacguguucgucgggacuucucgcuauuccaagaaauuuaagccugagauugcaauccgaccaaaagugcgugaccaggagggaagaaugaacuacuauuggacccugguggaacccggugauaagauuacauucgaggccacuggcaaccuagucguuccuagguacgcuuuugccauggaacggaaugcagggagcggaaucauaauuucggacaccccagugcaugauugcaacacaaccugucaaacgccgaaaggcgcuaucaauacuucucuccccuuccagaacauucacccuaucacaaucgguaagugcccaaaguauguaaaauccaccaagcugcgccuugccacugggcugagaaaugugcccucaauucagaguaggggauuguuuggcgcgauagccggcuucaucgaagggggauggacagguauggucgacggcugguacggguaucaucaccagaacgaacaaggaagcggcuacgcagcugaccucaaauccacccagaaugccauugauaagaucacgaacaaaguuaauucugugauagagaagaugaacacccaguuuacagcuguggguaaggaguucaaucaccuggaaaaacggauugagaacuuaaauaagaaagucgacgauggguuccuggacaucuggacuuacaacgccgaacuccuugugcuguuggagaaugaacgcacccuagauuaucaugacagcaacguagagaaccuguacgagaagguucgaucacagcucaaaaauaacgcaaaggaaaucggcaauggauguuuugaguucuaucacaagugcgauaacacauguauggaaagugugaaaaauggcacuuacgacuauccuaaguacuccgaggaagccaaacugaacagagaggagauugauggggucaaacuugaaagcaccaggaucuaucaaauucuggcuauauacucuacaguggcgucaaguuugguccucgugguuagccugggagcaaucuccuuuuggaugugcucuaaugguucguuacagugccggauuuguaucuga

SEQ ID NO: 133079 - RNA, 1701 nt, Artificial Sequence; identical to SEQ ID NO: 131881
  derived and/or modified CDS sequence (opt3) from hemagglutinin__InfluenzaA__ADI24577

SEQ ID NO: 133080 - RNA, 1701 nt, Artificial Sequence
  derived and/or modified CDS sequence (opt3) from hemagglutinin__InfluenzaA__ADI24581
augaaggccauccuggugguccuccuuuacaccuucgcuacagcaaacgccgacacucugugcauuggcuaucacgcgaauaacagcacggauaccguugacacaguguuggagaaaaauguaacugugacccauuccgucaacuuacuggaagauaagcacaaugggaaacuauguaagcucagaggaguggcuccccugcaucuugguaaaugcaacauagccggcuggguucuggggaauccugagugugaaucuuugucaacagcaaguagcugguccuacaucguggagaccucuucgucagacaacggaacuugcuauccaggcgauuuuauugacuacgaggagcucagggagcagcugagcagugucuccucuuucgaacgguuugagaucuucccgaagacaagcuccuggcccaaucacgauucaaacaagggugugaccgccgcuuguccucaugcaggggccaaaaguuuuuauaagaaucugauuuggcucguuaaaaagggaaacagcuacccaaaauuaucuaaguccuauaucaaugacaagggcaaagaaguacuggugcuuuggggcauacaccaccccucaacgagcgcugaucaacagaguuuguaccagaacgccgacgcguacgucuucguggggacuucucgcuauuccaagaaauuuaagccugagaucgcaauucgaccaaaagugcgugaucaggagggaagaaugaauuacuauuggacccuggucgaacccggugacaagaucacauucgaggccacuggcaaccuaguugugccuagguacgcuuuugccauggaacggaacgcagggagcggaauuaucauaucggauaccccaguacaugacugcaauacaaccugucaaacgccgaaaggcgcuauuaacacuucucuccccuuccagaauauccacccuauuacaaucgguaagugcccaaaguaugugaaauccaccaagcugcgccuugccacugggcugagaaacguccccucaauccagaguaggggauuguuuggcgcgauugccggcuucauagaagggggauggacagguaugguggacggcugguacggguaucaucaccagaaugaacaaggaagcggcuacgcagcugaucucaaauccacccagaacgccaucgacaagauuacgaauaaaguuaacucugugaucgagaagaugaauacccaguuuacagcugucgguaaggaguucaaccaccuggaaaaacggauagagaauuuaaacaagaaaguggaugacggguuccuggauauuuggacuuacaaugccgaacuccuuguacuguuggagaacgaacgcacccuagacuaucaugauagcaauguuaagaaccuguacgagaaagugcgaucacagcucaagaacaaugcaaaggagaucggcaacggauguuuugaguucuaucacaaaugcgacaauacauguauggaaagugucaagaacggcacuuacgauuauccuaaauacuccgaagaggccaagcugaauagagaagagaucgacggggugaaacuugagagcaccaggauuuaucaaauccuggcuauuuacucuacagucgcgucaaguuuggugcucguugugagccugggagcaauauccuuuuggaugugcucuaacgguucguuacagugccggaucuguauuuga

SEQ ID NO: 133081 - RNA, 1701 nt, Artificial Sequence
  derived and/or modified CDS sequence (opt3) from hemagglutinin__InfluenzaA__ADI24583
augaaggccauccuggugguccuccuuuacaccuucgcuacagcaaacgccgacacucugugcauuggcuaucacgcgaauaacagcacggauaccguugacacaauauuggagaaaaaugugacuguaacccauuccgugaacuuacuggaagauaagcacaaugggaaacuauguaagcucagaggagucgcuccccugcaucuugguaaaugcaacaucgccggcuggauucuggggaauccugagugugaaucuuugucaacagcaaguagcugguccuacaucguggagaccucuucgucagacaacggaacuugcuauccaggcgauuuuauugacuacgaggagcucagggagcagcugagcaguguuuccucuuucgaacgguuugagaucuucccgaagacaagcuccuggcccaaucacgauucaaacaagggugugaccgccgcuuguccucaugcaggggccaaaaguuuuuauaagaaucugauauggcucgucaaaaagggaaacagcuacccaaaauuaucuaaguccuauaucaaugacaagggcaaagaagugcugguacuuuggggcauucaccaccccucaacgagcgcugaucaacagaguuuguaccagaacgccgacgcguacguuuucguggggacuucucgcuauuccaagaaauuuaagccugagaucgcaauucgaccaaaaguccgugaucaggagggaagaaugaauuacuauuggacccugguggaacccggugacaagaucacauucgaggccacuggcaaccuaguggucccuagguacgcuuuugccauggaacggaacgcagggagcggaauaauuaucucggauaccccaguucaugacugcaauacaaccugucaaacgccgaaaggcgcuauuaacacuucucuccccuuccagaauauccacccuaucacaauugguaagugcccaaaguaugugaaauccaccaagcugcgccuugccacugggcugagaaacguacccucaauacagaguaggggauuguuuggcgcgaucgccggcuucauugaagggggauggacagguaugguggacggcugguacggguaucaucaccagaaugaacaaggaagcggcuacgcagcugaucucaaauccacccagaacgccaucgacaagauaacgaauaaagucaacucugugauugagaagaugaauacccaguuuacagcuguugguaaggaguucaaccaccuggaaaaacggaucgagaauuuaaacaagaaaguggaugacggguuccuggauaucuggacuuacaaugccgaacuccuuguccuguuggagaacgaacgcacccuagacuaucaugauagcaaugugaagaaccuguacgagaaaguacgaucacagcucaagaacaaugcaaaggagauuggcaacggauguuuugaguucuaucacaaaugcgacaauacauguauggaaaguguuaagaacggcacuuacgauuauccuaaauacuccgaagaggccaagcugaauagagaagagaucgacggggugaaacuugagagcaccaggauuuaucaaauacuggcuaucuacucuacagucgcgucaaguuuggugcucgucgugagccugggagcaauuuccuuuuggaugugcucuaacgguucguuacagugccggaucuguaucuga

SEQ ID NO: 133082 - RNA, 1701 nt, Artificial Sequence
  derived and/or modified CDS sequence (opt3) from hemagglutinin__InfluenzaA__ADI24590
augaaggccauccuggugguccuccuuuacaccuucgcuacagcaaacgccgacacucugugcauuggcuaucacgcgaauaacagcacggauaccguugacacaguguuggagaaaaauguaacugugacccauuccgcuaacuuacuggaagauaagcacaaugggaaacuauguaagcucagaggagucgcaccccugcaucuugguaaaugcaacauagccggcuggauccuggggaauccugagugugaaucuuugucaacagccaguagcugguccuacauuguggagaccucuucgucagacaacggaacuugcuauccaggcgauuuuaucgacuacgaggagcucagggagcagcugagcaguguuuccucuuucgaacgguuugagauuuucccgaagacaagcuccuggcccaaucacgauucaaacaagggugugaccgcugcauguccucaugccggggcuaaaaguuuuuauaagaaucugaucuggcucgucaaaaagggaaacagcuacccaaaauuaucuaaguccuauauaaaugacaagggcaaagaagugcugguacuuuggggcauccaccaccccucaacgagcgccgaucaacagaguuuguaccagaacgcggacgcauacguuuucguggggacuucucgcuauuccaagaaauuuaagccugagauugccauccgaccaaaaguccgugaucaggagggaagaaugaauuacuauuggacccugguggaacccggugacaagauuacauucgaggcuacuggcaaccuaguggucccuagguacgccuuugcaauggaacggaacgcugggagcggaaucauaauuucggauaccccaguucaugacugcaauacaaccugucaaacgccgaaaggcgccaucaacacuucucuccccuuccagaauauucacccuaucacaaucgguaagugcccaaaguaugugaaauccaccaagcugcgccuugcgacugggcugagaaacguacccucaauucagaguaggggauuguuuggcgccauagcaggcuucaucgaagggggauggacagguaugguggacggcugguacggguaucaucaccagaaugaacaaggaagcggcuacgcugccgaucucaaauccacccagaacgcuauugacaagaucacgaauaaagucaacucugugauagagaagaugaauacccaguuuacagccguugguaaggaguucaaccaccuggaaaaacggauugagaauuuaaacaagaaaguggaugacggguuccuggauaucuggacuuacaaugcagaacuccuuguccuguuggagaacgaacgcacccuagacuaucaugauagcaaugugaagaaccuguacgagaaaguacgaucacagcucaagaacaaugccaaggagaucggcaacggauguuuugaguucuaucacaaaugcgacaauacauguauggaaaguguuaagaacggcacuuacgauuauccuaaauacuccgaagaggcuaagcugaauagagaagagauugacggggugaaacuugagagcaccaggaucuaucaaauucuggcgauauacucuacagucgcaucaaguuuggugcucgucgugagccugggagccaucuccuuuuggaugugcucuaacgguucguuacagugccggauuuguaucuga

SEQ ID NO: 133083 - RNA, 1701 nt, Artificial Sequence
  derived and/or modified CDS sequence (opt3) from hemagglutinin__InfluenzaA__ADI24597
augaaggccauccuggugguccuccuuuacaccuucgcuacagcaaacgccgacacucugugcauuggcuaucacgcgaauaacagcacggauaccguugacacaguguuggagaagaauguaacugugacccauuccgcuaacuuacuggaagauaagcacaaugggaaacuauguaagcucagaggagucgcaccccugcaucuugguaacugcaauauagccggcuggauccuggggaacccugagugugaaucuuugucaacagccaguagcugguccuacauuguggagaccucuucgucagacaauggaacuugcuauccaggcgauuuuaucgacuacgaggagcucagggagcagcugagcaguguuuccucuuucgaacgguuugagauuuucccgaaaacaagcuccuggcccaaccacgauucaaauaagggugugaccgcugcauguccucaugccggggcuaagaguuuuuauaaaaaccugaucuggcucgucaagaaaggaaauagcuacccaaaguuaucuaaauccuauauaaacgacaagggcaaggaagugcugguacuuuggggcauccaccaccccucaacgagcgccgaucaacagaguuuguaccagaaugcggacgcauacguuuucguggggacuucucgcuauuccaaaaaguuuaaaccugagauugccauccgaccaaagguccgugaucaggagggaagaaugaacuacuauuggacccugguggaacccggugacaaaauuacauucgaggcuacuggcaaccuaguggucccuagguacgccuuugcaauggaacggaaugcugggagcggaaucauaauuucggauaccccaguucaugacugcaacacaaccugucaaacgccgaagggcgccaucaauacuucucuccccuuccagaacauucacccuaucacaaucgguaaaugcccaaaguaugugaaguccaccaaacugcgccuugcgacugggcugagaaauguacccucaauucagaguaggggauuguuuggcgccauagcaggcuucaucgaagggggauggacagguaugguggacggcugguacggguaucaucaccagaacgaacaaggaagcggcuacgcugccgaucucaaguccacccagaaugcuauugacaaaaucacgaacaaggucaauucugugauagagaaaaugaacacccaguuuacagccguugguaaggaguucaaucaccuggaaaagcggauugagaacuuaaauaaaaagguggaugacggguuccuggauaucuggacuuacaacgcagaacuccuuguccuguuggagaaugaacgcacccuagacuaucaugauagcaacgugaaaaaccuguacgagaagguacgaucacagcucaaaaauaacgccaaggagaucggcaauggauguuuugaguucuaucacaagugcgacaacacauguauggaaaguguuaaaaauggcacuuacgauuauccuaaguacuccgaagaggcuaaacugaacagagaagagauugacggggugaaacuugagagcaccaggaucuaucaaauucuggcgauauacucuacagucgcaucaaguuuggugcucgucgugagccugggagccaucuccuuuuggaugugcucuaaugguucguuacagugccggauuuguaucuga

SEQ ID NO: 133084 - RNA, 1701 nt, Artificial Sequence; identical to SEQ ID NO: 133082
  derived and/or modified CDS sequence (opt3) from hemagglutinin__InfluenzaA__ADI24612

SEQ ID NO: 133085 - RNA, 1701 nt, Artificial Sequence
  derived and/or modified CDS sequence (opt3) from hemagglutinin__InfluenzaA__ADI24619
augaaggccauccuggugguccuccuuuacaccuucgcuacagcaaacgccgacacucugugcauuggcuaucacgcgaauaacagcacggauaccguugacacaguguuggagaaaaauguaacugugacccauuccgcuaacuuacuggaagauaagcacaaugggaaacuauguaagcucagaggagucgcaccccugcaucuugguaaaugcaacauagccggcuggauccuggggaauccugagugugaaucuuugucaacagccaguagcugguccuacauuguggagaccucuucgucagacaacggaacuugcuauccaggcgauuuuaucgacuacgaggagcucagggagcagcugagcaguguuuccucuuucgaacgguuugagauuuucccgaagacaagcuccuggcccaaucacgauucaaacaagggugugaccgcugcauguccucaugccggggcuaaaaguuuuuauaagaaucugaucuggcucgucaaaaagggaaacagcuacccaaaauuaucuaaguccuauauaaaugacaagggcaaagaagugcugguacuuuggggcauccaccaccccucaacgagcguugaucaacagaguuuguaccagaacgccgacgcguacguguucgucgggacuucucgcuauuccaagaaauuuaagccugagauugcaauccgaccaaaagugcgugaucaggagggaagaaugaauuacuauuggacccugguggaacccggugacaagauuacauucgaggccacuggcaaccuagucguuccuagguacgcuuuugccauggaacggaacgcagggagcggaaucauaauuucggauaccccagugcaugacugcaauacaaccugucaaacgccgaaaggcgcuaucaacacuucucuccccuuccagaauauucacccuaucacaaucgguaagugcccaaaguauguaaaauccaccaagcugcgccuugccacugggcugagaaacgugcccucaauucagaguaggggauuguuuggcgcgauagccggcuucaucgaagggggauggacagguauggucgacggcugguacggguaucaucaccagaaugaacaaggaagcggcuacgcagcugaucucaaauccacccagaacgccauugacaagaucacgaauaaagugaacucuguuauagagaagaugaauacccaguuuacagcuguggguaaggaguucaaccaccuggaaaaacggauugagaauuuaaacaagaaagucgaugacggguuccuggauaucuggacuuacaaugccgaacuccuugugcuguuggagaacgaacgcacccuagacuaucaugauagcaauguaaagaaccuguacgagaaaguucgaucacagcucaagaacaaugcaaaggagaucggcaacggauguuuugaguucuaucacaaaugcgacaauacauguauggaaagugugaagaacggcacuuacgauuauccuaaauacuccgaagaggccaagcugaauagagaagagauugacggggucaaacuugagagcaccaggaucuaucaaauucuggcuauauacucuacaguggcgucaaguuugguccucgugguuagccugggagcaaucuccuuuuggaugugcucuaacgguucguuacagugccggauuuguaucuga

SEQ ID NO: 133086 - RNA, 1701 nt, Artificial Sequence
  derived and/or modified CDS sequence (opt3) from hemagglutinin__InfluenzaA__ADI24621
augaaggccauccuggugguccuccuuuacaccuucgcuacagcaaacgccgacacucugugcauuggcuaucacgcgaauaacagcacggauaccguugacacaguguuggagaaaaauguaacugugacccauuccgucaacuuacuggaagauaagcacaaugggaaacuauguaagcucagaggaguggcuccccugcaucuugguaaaugcaacauagccggcuggauccuggggaauccugagugugaaucuuugucaacagcaaguagcugguccuacauuguugagaccucuucgucagacaacggaacuugcuauccaggcgauuuuaucgacuacgaggagcucagggagcagcugagcaguguguccucuuucgaacgguuugagauuuucccgaagacaagcuccuggcccaaucacgauucaaacaagggugucaccgccgcuuguccucaugcaggggccaaaaguuuuuauaagaaucugaucuggcucgugaaaaagggaaacagcuacccaaaauuaucuaaguccuauauaaaugacaagggcaaagaaguacugguucuuuggggcauccaccaccccucaacgagcgcugaucaacagaguuuguaccagaacgccgacgcguacguguucgucgggacuucucgcuauuccaagaaauuuaagccugagauugcaauccgaccaaaagugcgugaucaggagggaagaaugaauuacuauuggacccugguggaacccggugacaagauuacauucgaggccacuggcaaccuagucguuccuagguacgcuuuugccauggaacggaacgcagggagcggaaucauaauuucggauaccccagugcaugacugcaauacaaccugucaaacgccgaaaggcacuaucaacacaucucuccccuuccagaauauucacccuaucaccaucgguaagugcccaaaguauguaaaauccacuaagcugcgccuugcuacagggcugagaaacgugcccucaauucagaguaggggauuguuuggcgccauagcgggcuucaucgaagggggauggaccgguauggucgacggcugguacggguaucaucaccagaaugaacaaggaagcggcuacgccgcagaucucaaauccacgcagaacgcuauugacaagaucaccaauaaagugaacucuguuauagagaagaugaauacacaguuuacugccguggguaaggaguucaaccaccuggaaaaacggauugagaauuuaaacaagaaagucgaugacggguuccuggauaucuggaccuacaaugcugaacuccuugugcuguuggagaacgaacgcacacuagacuaucaugauagcaauguaaagaaccuguacgagaaaguucgaucacagcucaagaacaaugccaaggagaucggcaacggauguuuugaguucuaucacaaaugcgacaauacuuguauggaaagugugaagaacggcaccuacgauuauccuaaauacuccgaagaggcaaagcugaauagagaagagauugacggggucaaacuugagagcacaaggaucuaucaaauucuggccauauacucuaccguggcuucaaguuugguccucaucgugagccugggagcgauuuccuuuuggaugugcucuaacgguucguuacagugccggaucuguaucuga

SEQ ID NO: 133087 - RNA, 1701 nt, Artificial Sequence
  derived and/or modified CDS sequence (opt3) from hemagglutinin__InfluenzaA__ADI48184
augaaggccauccuggugguccuccuuuacaccuucgcuacagcaaacgccgacacucugugcauuggcuaucacgcgaauaacagcacggauaccguugacacaguguuggagaagaauguaacugugacccauuccgucaacuuacuggaagauaagcacaaugggaaacuauguaagcucagaggaguggcuccccugcaucuugguaaaugcaacauagccggcuggauccuggggaauccugagugugaaucuuugucaacagcaaguagcugguccuacauuguugagaccucuucgucagacaacggaacuugcuauccaggcgauuuuaucgacuacgaggaacucagggagcagcugagcaguguguccucuuucgaacgguuugagauuuucccgaagacaagcuccuggcccaaucacgauucaaacaagggugucaccgccgcuuguccucaugcaggggccaaaaguuuuuauaagaaucugaucuggcucgugaaaaagggaaacagcuacccaaaauuaucuaaguccuauauaaaugacaagggcaaagaaguacugguucuuuggggcauccaccaccccucaacgagcgcugaucaacagaguuuguaccagaacgccgacgcguacguguucgucgggacuucucgcuauuccaagaaauuuaagccugagauugcaauccgaccaaaagugcgugaucaggagggaagaaugaauuacuauuggacccugguggaacccggugacaagauuacauucgaggccacuggcaaccuagucguuccuagguacgcuuuugccauggggcggaacgcaggaagcggcaucauaauuucggauaccccagugcaugacugcaauacaaccugucaaacgccgaaaggugcuaucaacacuucucuccccuuccagaauauucacccuaucacaaucgggaagugcccaaaguauguaaaauccaccaagcugcgccuugccacuggacugagaaacgugcccucaauucagaguaggggcuuguuuggcgcgauagccggguucaucgaaggagguuggacaggcauggucgacgggugguacggauaucaucaccagaaugagcaaggcagcgguuacgcagcugaucucaaauccacccagaacgccauugacaagaucacgaauaaagugaacucuguuauagaaaagaugaauacccaguuuacagcuguggggaaggaguucaaccaccuggagaaacggauugaaaauuuaaacaagaaagucgaugacggcuuccuggauaucuggacuuacaaugccgagcuccuugugcuguuggaaaacgagcgcacccuagacuaucaugauagcaauguaaagaaccuguacgaacgaguuagaucacagcucaaaaacaaugcaaaggagaucggaaacggcuguuuugaguucuaucacaagugcgacaauacauguauggaaagugugaaaaacgggacuuacgauuauccuaaguacuccgaggaagccaaacugaauagggaggaaauugacggagucaaacuugagagcacccggaucuaucaaauucuggcuauauacucuacaguggcgucaaguuugguccucgugguuagccugggugcaaucuccuuuuggaugugcucuaacggcucguuacagugccguauuuguaucuga

SEQ ID NO: 133088 - RNA, 1701 nt, Artificial Sequence; identical to SEQ ID NO: 131881
  derived and/or modified CDS sequence (opt3) from hemagglutinin__InfluenzaA__ADI48186

SEQ ID NO: 133089 - RNA, 1701 nt, Artificial Sequence
  derived and/or modified CDS sequence (opt3) from hemagglutinin__InfluenzaA__ADI48188
augaaggccauccuggugguccuccuuuacaccuucgcuacagcaaacgccgacacucugugcauuggcuaucacgcgaauaacagcacggauaccguugacacaguguuggagaaaaauguaacugugacccauuccgucaacuuacuggaagauaagcacaaugggaaacuauguaagcucagaggaguggcuccccugcaucuugguaaaugcaacauagccggcuggauccuggggaauccugagugugaaucuuugucaacagcaaguagcugguccuacauuguugagaccucuucgucagacaacggaacuugcuauccaggcgauuuuaucgacuacgaagaacucagggagcagcugagcaguguguccucuuucgaacgguuugagauuuucccgaagacaagcuccuggcccaaucacgauucaaacaagggugucaccgccgcuuguccucaugcaggggccaaaaguuuuuauaagaaucugaucuggcucgugaaaaagggaaacagcuacccaaaauuaucuaaguccuauauaaaugacaagggcaaagaaguacugguucuuuggggcauccaccaccccucaacgagcgcugaucaacagaguuuguaccagaacgccgacgcguacguguucgucgggacuucucgcuauuccaagaaauuuaagccugagauugcaauccgaccaaaagugcgugaucaggagggaagaaugaauuacuauuggacccugguggaacccggugacaagauuacauucgaggccacuggcaaccuagucguuccuagguacgcuuuugccauggaacggaacgcagggagcgauaucauaauuucggacaccccagugcaugacugcaauacaaccugucaaacgccgaaaggagcuaucaacacuucucuccccuuccagaauauucacccuaucacaaucggcaagugcccaaaguauguaaaauccaccaagcugcgccuugccacuggucugagaaacgugcccucaauucagaguaggggguuguuuggagcgauagccggcuucaucgagggcggguggacaggaauggucgaugguugguacggcuaucaucaccagaaugaacaagggagcggauacgcagcugaccucaaauccacccagaacgccauugauaagaucacgaauaaagugaacucuguuauagagaagaugaauacccaguuuacagcugugggcaaggaguucaaccaccuggaaaaacggauugagaauuuaaacaagaaagucgacgaugguuuccuggacaucuggacuuacaaugccgaacuccuugugcuguuggagaacgaacgcacccuagauuaucaugacagcaauguaaagaaccuguacgagaaaguucgaucacagcucaagaacaaugcaaaggagaucgggaacggcuguuuugaguucuaucacaaaugcgauaauacauguauggagagugugaagaacggaacuuacgacuauccuaaauacuccgaagaggccaagcugaauagagaagagauugauggcgucaaacuugagagcaccaggaucuaucaaauucuggcuauauacucuacaguggcgucaaguuugguccucgugguuagccugggggcaaucuccuuuuggaugugcucuaacggaucguuacagugccggauuuguaucuga

SEQ ID NO: 133090 - RNA, 1701 nt, Artificial Sequence
  derived and/or modified CDS sequence (opt3) from hemagglutinin__InfluenzaA__ADI48190
augaaggccauccuggugguccuccuuuacaccuucgcuacagcaaacgccgacacucugugcauuggcuaucacgcgaauaacagcacggauaccguugacacaguguuggagaaaaauguaacugugacccauuccgucaacuuacuggaagauaagcacaaugggaaacuauguaagcucagaggaguggcuccccugcaucuugguaaaugcaacauagccggcuggauccuggggaauccugagugugaaucuuugucaacagcaaguagcugguccuacauuguugagaccucuucgucagacaacggaacuugcuauccaggcgauuuuaucgacuacgaggagcucagggagcagcugagcaguguguccucuuucgaacgguuugagauuuucccgaagacaagcuccuggcccaaucacgauucaaacaagggugucaccgccgcuuguccucaugcaggggccaaaaguuuuuauaagaaucugaucuggcucgugaaaaagggaaacagcuacccaaaauuaucuaaguccuauauaaaugacaagggcaaagaaguacugguucuuuggggcauccaccaccccucaacgagcgcugaucaacagaguuuguaccagaacgccgacgcguacguguucgucgggacuucucgcuauuccaagaaauuuaagccugagauugcaauccgaccaaaagugcgugaucaggagggaagaaugaauuacuauuggacccugguggaacccggugacaagauuacauucgaggccacuggcaaccuagucguuccuagguacgcuuuugccauggaacggaacgcagggagcggaaucauaauuucggauaccccagugcaugacugcaauacaaccugucaaacgccgaaaggcgcuaucaacacuucucuccccuuccagaauauucacccuaucacaaucgguaagugcccaaaguauguaaaauccaccaagcugcgccuugccacugggcugagaaacgugcccucaauucagaguaggggauuguuuggcgcgauagccggcuucaucgaagggggauggacagguauggucgacggcugguacggguaucaucaccagaaugaacaaggaagcggcuacgcagcugaucucaaauccacccagaacgccauugacaagaucacgaauaaagugaacucuguuauagagaagaugaauacccaguuuacagcuguggguaaggaguucaaccaccuggaaaaacggauugagaauuuaaacaagaaagucgaugacggguuccuggauaucuggacuuacaaugccgaacuccuugugcuguuggagaacgaacgcacccuagacuaucaugauagcaauguaaagaaccuguacgagaaaguucgaucacagcucaagaacaaugcaaaggagaucggcaacggauguuuugaguucuaucacaaaugcgacaauacauguauggaaagugugaagaacggcacuuacgauuauccuaaauacuccgaagaggccaagcugaauagagaagagauugacggggucaaacuugagagcaccaagaucuaucaaauucuggcuauauacucuacaguggcgucaaguuugguccucgugguuagccugggagcaaucuccuuuuggaugugcucuaacgguucguuacagugcaggauuuguaucuga

SEQ ID NO: 133091 - RNA, 1701 nt, Artificial Sequence
  derived and/or modified CDS sequence (opt3) from hemagglutinin__InfluenzaA__ADI48192
augaaggccauccuggugguccuccuuuacaccuucgcuacagcaaacgccgacacucugugcauuggcuaucacgcgaauaacagcacggauaccguugacacaguguuggagaaaaauguaacugugacccauuccgucaacuuacuggaagauaagcacaaugggaaacuauguaagcucagaggaguggcuccccugcaucuugguaaaugcaacauagccggcuggauccuggggaauccugagugugaaucuuugucaacagcaaguagcugguccuacauuguugagaccucuucgucagacaacggaacuugcuauccaggcgauuuuaucgacuacgaggagcucagggagcagcugagcaguguguccucuuucgaacgguuugagauuuucccgaagacaagcuccuggcccaaucacgauucaaacaagggugucaccgccgcuuguccucaugcaggggccaaaaguuuuuauaagaaucugaucuggcucgugaaaaagggaaacagcuacccaaaauuaucuaaguccuauauaaaugacaagggcaaagaaguacugguucuuuggggcauccaccaccccucaacgagcgcugaucaacagaguuuguaccagaacgccgacgcguacguguucgucgggacuucucgcuauuccaagaaauuuaagccugagauugcaauccgaccaaaagugcgugaucaggagggaagaaugaauuacuauuggacccugguggaacccggugacaagauuacauucgaggccacuggcaaccuagucguuccuagguacgcuuuugccauggaacggaacgcagggagcggaaucauaauuucggauaccccagugcaugacugcaauacaaccugucaaacgccgaaaggcgcuaucaacacuucucuccccuuccagaauauucacccuaucacaaucgguaagugcccaaaguauguaaaauccaccaagcugcgccuugccacugggcugagaaacgugcccucaauucagaguaggggauuguuuggcgcgauagccggcuucaucgaagggggauggacagguauggucgacggcugguacggguaucaucaccagaaugaacaaggaagcggcuacgcagcugaucucaaauccacccagaacgccauugacaagaucacgaauaaagugaacucuguuauagagaagaugaauacccaguuuacagcuguggguaaggaguucaaccaccuggaaaaacggauugagaauuuaaacaagaaagucgaugacggguuccuggauaucuggacuuacaaugccgaacuccuugugcuguuggagaacgaacgcacccuagacuaucaugauagcaauguaaagaaccuguacgagaaaguucgaucacagcucaagaacaaugcaaaggagaucggcaacggauguuuugaguucuaucacaaaugcgacaauacauguauggaaagugugaagaacggcacuuacgauuauccuaaauacuccgaagaggccaagcugaauagagaagagauugacggggucaaacuugagagcaccaggaucuaucaaauucugacaauauacucuaccguggcuucaaguuugguccucgugguuagccugggagcgaucuccuuuuggaugugcucuaacgguucguuacagugccggauuuguaucuga

SEQ ID NO: 133092 - RNA, 1701 nt, Artificial Sequence
  derived and/or modified CDS sequence (opt3) from hemagglutinin__InfluenzaA__ADI48194
augaaggccauccuggugguccuccuuuacaccuucgcuacagcaaacgccgacacucugugcauuggcuaucacgcgaauaacagcacggauaccguugacacaguguuggagaaaaauguaacugugacccauuccgucaacuuacuggaagauaagcacaaugggaaacuauguaagcucagaggaguggcuccccugcaucuugguaaaugcaacauagccggcuggauccuggggaauccugagugugaaucuuugucaacagcaaguagcugguccuacauuguugagaccucuucgucagacaacggaacuugcuauccaggcgauuuuaucgacuacgaggagcucagggagcagcugagccuggugaguuccuucgaacgguuugagauuuucccgaagacaaauucuuggcccaaccacgauagcaauaagggugucaccgccgcuuguccucaugcaggggccaaauccuuuuauaagaaccucaucugguuagugaaaaagggaaauucauacccaaaacugaguaagagcuauauaaacgacaagggcaaagaaguacuuguuuuguggggcauccaccaccccucuacguccgcugaucaacagucacuguaccagaaugccgacgcguacguguucgucgggacuagccgcuauaguaagaaauuuaagccugagauugcaauccgaccaaaagugcgugaucaggagggaagaaugaacuacuauuggacccuaguggaacccggugacaagauuacauucgaggccacuggcaaccucgucguuccuagguacgcuuuugccauggaacggaaugcagggucuggaaucauaauuuccgauaccccagugcaugacugcaacacaaccugucaaacgccgaaaggcgcuaucaauacuagccugcccuuccagaacauucacccuaucacaaucgguaagugcccaaaguauguaaaaucgaccaaacuucgccuggccacuggguugagaaaugugcccucuauucaguccaggggacucuuuggcgcgauagccggcuucaucgaagggggauggacagguauggucgacggcugguacggguaucaucaccagaacgaacaaggaucaggcuacgcagcugaucugaagaguacccagaaugccauugacaagaucacgaacaaagugaauagcguuauagagaagaugaacacccaguuuacagcuguggguaaggaguucaaucacuuagaaaaacggauugagaaccugaauaagaaagucgaugacggguuccucgauaucuggacuuacaacgccgaacuucugguguugcuagagaaugaacgcacccuggacuaucaugauuccaacguaaagaaccucuacgagaaaguucgaucucagcugaagaauaacgcaaaggagaucggcaauggauguuuugaguucuaucacaaaugcgacaacacauguauggaaagcgugaagaauggcacuuacgauuauccuaaauacucagaagaggccaaacuuaacagagaagagauugacggggucaagcuggagaguaccaggaucuaucaaauuuuggcuauauacuccacaguggcgagcucucucguccuggugguuucauuaggagcaaucaguuuuuggaugugcagcaaugguucccugcagugccggauuuguaucuga

SEQ ID NO: 133093 - RNA, 1701 nt, Artificial Sequence
  derived and/or modified CDS sequence (opt3) from hemagglutinin__InfluenzaA__ADI48196
augaaggccauccuggugguccuccuuuacaccuucgcuacagcaaacgccgacacucugugcauuggcuaucacgcgaauaacagcacggauaccguugacacaguguuggagaaaaauguaacugugacccauuccgucaacuuacuggaagauaagcacaaugggaaacuauguaagcucagaggaguggcuccccugcaucuugguaaaugcaacauagccggcuggauccuggggaauccugagugugaaucuuugucaacagcaaguagcugguccuacauuguugagaccucuucgucagacaacggaacuugcuauccaggcgauuuuaucgacuacgaggagcucagggagcagcugagcaguguguccucuuucgaacgguuugagauuuucccgaagacaagcuccuggcccaaucacgauucaaacaagggugucaccgccgcuuguccucaugcaggggccaaaaguuuuuauaagaaucugaucuggcucgugaaaaagggaaacagcuacccaaaauuaucuaaguccuauauaaaugacaagggcaaagaaguacugguucuuuggggcauccaccaccccucaacgagcgcugaucaacagaguuuguaccagaacgccgacgcguacguguucgucgggacuucucgcuauuccaagaaauuuaagccugagauugcaauccgaccaaaagugcgugaucaggagggaagaaugaauuacuauuggacccugguggaacccggugacaagauuacauucgaggccacuggcaaccuagucguuccuagguacgcuuuugccauggaacggaacgcagggagcggaaucauaauuucggauaccccagugcaugacugcaauacaaccugucaaacgccgaaaggcgcuaucaacacuucucuccccuuccagaauauucacccuaucacaaucgguaagugcccaaaguauguaaaauccaccaagcugcgccuugccacugggcugagaaacgugcccucaauucagaguaggggauuguuuggcgcgauagccggcuucaucgaagggggauggacagguauggucgacggcugguacggguaucaucaccagaaugaacaaggaagcggcuacgcagcugaucucaaauccacccagaacgccauugacaagaucacgaauaaagugaacucuguuauagagaagaugaauacccaguuuacagcuguggguaaggaguucaaccaccuggaaaaacggauugagaauuuaaacaagaaagucgaugacggguuccuggauaucuggacuuacaaugccgaacuccuugugcuguuggagaacgaacgcacccuagacuaucaugauagcaauguaaagaaccuguacgagaaaguucgaucacagcucaagaacaaugcaaaggagaucggcaacggauguuuugaguucuaucacaaaugcgacaauacauguauggaaagugugaagaacggcacuuacgauuauccuaaauacuccgaagaggccaagcugaauagagaagagauugacggggucaaacuugauagcaccaggaucuaucaaauucuggcuauauacucuacaguggcgucaaguuugguccucgugguuagccugggagcaaucuccuuuuggaugugcucuaacgguucguuacagugccggauuuguaucuga

SEQ ID NO: 133094 - RNA, 1701 nt, Artificial Sequence; identical to SEQ ID NO: 131881
  derived and/or modified CDS sequence (opt3) from hemagglutinin__InfluenzaA__ADI48198

SEQ ID NO: 133095 - RNA, 1701 nt, Artificial Sequence; identical to SEQ ID NO: 131881
  derived and/or modified CDS sequence (opt3) from hemagglutinin__InfluenzaA__ADI48200

SEQ ID NO: 133096 - RNA, 1701 nt, Artificial Sequence
  derived and/or modified CDS sequence (opt3) from hemagglutinin__InfluenzaA__ADI48202
augaaggccauccuggugguccuccuuuacaccuucgcuacagcaaacgccgacacucugugcauuggcuaucacgcgaauaacagcacggauaccguugacacaguguuggagaaaaauguaacugugacccauuccgucaacuuacuggaagauaagcacaaugggaaacuauguaagcucagaggaguggcuccccugcaucuugguaaaugcaacauagccggcuggauccuggggaauccugagugugaaucuuugucaacagcaaguagcugguccuacauuguugagaccucuucgucagacaacggaacuugcuauccaggcgauuuuaucgacuacgaggagcucagggagcagcugagcaguguguccucuuucgaacgguuugagauuuucccgaagaucagcuccuggcccaaucacgauucaaacaagggugucacagccgcuuguccucaugcaggggccaaaaguuuuuauaagaaucugauauggcucgugaaaaagggaaacagcuacccaaaauuaucuaaguccuauaucaaugacaagggcaaagaaguacugguucuuuggggcauucaccaccccucaaccagcgcugaucaacagaguuuguaccagaacgccgacgcguacguguucgucgggacgucucgcuauuccaagaaauuuaagccugagaucgcaauucgaccaaaagugcgugaucaggagggaagaaugaauuacuauuggacucugguggaacccggugacaagaucaccuucgaggccacaggcaaccuagucguuccuagguacgcuuuugccauggaacggaacgcagggagcggaauaauuaucucggauacuccagugcaugacugcaauaccacaugucaaaccccgaaaggcgcuauuaacacgucucuccccuuccagaauauccacccuaucacuauugguaagugcccaaaguauguaaaauccacaaagcugcgccuugccaccgggcugagaaacgugcccucaauacagaguaggggauuguuuggcgcgaucgccggcuucauugaagggggauggacugguauggucgacggcugguacggguaucaucaccagaaugaacaaggaagcggcuacgcagcugaucucaaauccacacagaacgccaucgacaagauaaccaauaaagugaacucuguuauugagaagaugaauacgcaguuuaccgcuguggguaaggaguucaaccaccuggaaaaacggaucgagaauuuaaacaagaaagucgaugacggguuccuggauaucuggacauacaaugccgaacuccuugugcuguuggagaacgaacgcacucuagacuaucaugauagcaauguaaagaaccuguacgagaaaguucgaucacagcucaagaacaaugcaaaggagauuggcaacggauguuuugaguucuaucacaaaugcgacaauaccuguauggaaagugugaagaacggcacauacgauuauccuaaauacuccgaagaggccaagcugaauagagaagagaucgacggggucaaacuugagagcacuaggauuuaucaaauacuggcuaucuacucuaccguggcgucaaguuugguccucgugguuagccugggagcaauuuccuuuuggaugugcucuaacgguucguuacagugccggaucuguaucuga

SEQ ID NO: 133097 - RNA, 1701 nt, Artificial Sequence
  derived and/or modified CDS sequence (opt3) from hemagglutinin__InfluenzaA__ADI48204
augaaggccauccuggugguccuccuuuacaccuucgcuacagcaaacgccgacacucugugcauuggcuaucacgcgaauaacagcacggauaccguugacacaguguuggagaagaauguaacugugacccauuccgucaacuuacuggaagauaagcacaaugggaaacuauguaagcucagaggaguggcuccccugcaucuugguaaaugcaacauagccggcuggauccuggggaauccugagugugaaucuuugucaacagcaaguagcugguccuacauuguugagaccucuucgucagacaacggaacuugcuauccaggcgauuuuaucgacuacgaggagcucagggagcagcugagcaguguguccucuuucgaacgguuugagauuuucccgaagacaagcuccuggcccaaucacgauucaaacaagggugucaccgccgcuuguccucaugcaggggccaaaaguuuuuauaagaaucugaucuggcucgugaaaaagggaaacagcuacccaaaauuaucuaaguccuauauaaaugacaagggcaaagaaguacugguucuuuggggcauccaccaccccucaacgagcgcugaucaacagaguuuguaccagaacguggacgccuacgucuucguggggacuucucgcuauuccaagaaauuuaagccugagauugcgauccgaccaaaagugcgugaucaggagggaagaaugaauuacuauuggacccuggucgaacccggugacaagauuacauucgaggcaacuggcaaccuaguugugccuagguacgccuuugcuauggaacggaacgccgggagcggaaucauaauuucggauaccccaguacaugacugcaauacaaccugucaaacgccgaaaggcgcaaucaacacuucucuccccuuccagaauauucacccuaucacaaucgguaagugcccaaaguaugugaaauccaccaagcugcgccuugcuacugggcugagaaacguccccucaauucagaguaggggauuguuuggcgccauagcgggcuucaucgaagggggauggacagguaugguggacggcugguacggguaucaucaccagaaugaacaaggaagcggcuacgccgcagaucucaaauccacccagaacgcuauugacaagaucacgaaaaagguuaauucugugauagagaagaugaacacccaguuuacagccgucgguaaagaguucaaucaccuggaaaagcggauugagaacuuaaauaaaaagguggaugacggguuccuggauaucuggacuuacaacgcugaacuccuuguacuguuggagaaugaacgcacccuagacuaucaugauagcaacguuaaaaaucuguacgagaaggugcgaucacagcucaagaacaacgccaaagagaucggcaauggauguuuugaguucuaucacaagugcgacaacacauguauggaaagugucaaaaauggcacuuacgauuauccuaaguacuccgaagaggcaaaacugaacagagaagagauugacggggugaaacuugagagcaccaggaucuaucaaauucuggccauauacucuacagucgcuucaaguuuggugcucguugugagccugggagcgaucuccuuuuggaugugcucuaaugguucguuacagugccggauuuguaucuga

SEQ ID NO: 133098 - RNA, 1701 nt, Artificial Sequence; identical to SEQ ID NO: 131881
  derived and/or modified CDS sequence (opt3) from hemagglutinin__InfluenzaA__ADI48208

SEQ ID NO: 133099 - RNA, 1701 nt, Artificial Sequence; identical to SEQ ID NO: 131881
  derived and/or modified CDS sequence (opt3) from hemagglutinin__InfluenzaA__ADI48210

SEQ ID NO: 133100 - RNA, 1701 nt, Artificial Sequence
  derived and/or modified CDS sequence (opt3) from hemagglutinin__InfluenzaA__ADI48212
augaaggccauccuggugguccuccuuuacaccuucgcuacagcaaacgccgacacucugugcauuggcuaucacgcgaauaacagcacggauaccguugacacaguguuggagaaaaauguaacugugacccauuccgucaacuuacuggaagauaagcacaaugggaaacuauguaagcucagaggaguggcuccccugcaucuugguaaaugcaacauagccggcuggauccuggggaauccugagugugaaucuuugucaacagcaaguagcugguccuacauuguugagaccucuucgucagacaacggaacuugcuauccaggcgauuuuaucgacuacgaggagcucagggagcagcugagcaguguguccucuuucgaacgguuugagauuuucccgaagacaagcuccuggcccaaucacgauucaaacaagggugucaccgccgcuuguccucaugcaggggccaaaaguuuuuauaagaaucugaucuggcucgugaaaaagggaaacagcuacccaaaauuaucuaaguccuauauaaaugacaagggcaaagaaguacugguucuuuggggcauccaccaccccucaacgagcgcugaucaacagaguuuguaccagaacgccgacgcguacguguucgucgggacuucucgcuauuccaagaaauuuaagccugagauugcaauccgaccaaaagugcgugaucaggagggaagaaugaauuacuauuggacccugguggaacccggugacaagauuacauucgaggccacuggcaaccuagucguuccuagguacgcuuuugccauggaacggaacgcagggagcggaaucauaauuucggauaccccagugcaugacugcaauacaaccugucaaacgccgaaaggcgcuaucaacacuucucuccccuuccagaauauucacccuaucacaaucgguaagugcccaaaguauguaaaauccaccaagcugcgccuugccacugggcugagaaacgugcccucaauucagaguaggggauuguuuggcgcgauagccggcuucaucgaagggggauggacagguauggucgacggcugguacggguaucaucaccagaaugaacaaggaagcggcuacgcagcugaucucaaauccacccagaacgccauugacaagaucacgaauaaagugaacucuguuauagagaagaugaauacccaguuuacagcuguggguaaggaguucaaccaccuggaaaaacggauugagaauuuaaacaagaaagucgaugacggguuccuggauguguggacuuacaaugccgaacuccuuguacuguuggagaacgaacgcacccuagacuaucaugauagcaauguuaagaaccuguacgagaaagugcgaucacagcucaagaacaaugcaaaggagaucggcaacggauguuuugaguucuaucacaaaugcgacaauacauguauggaaagugucaagaacggcacuuacgauuauccuaaauacuccgaagaggccaagcugaauagagaagagaucgacggggugaaacuugagagcaccaggauuuaucaaauccuggcuauuuacucuacagucgcgucaaguuuggugcucguugugagccugggagcaauauccuuuuggaugugcucuaacgguucguuacagugccggaucuguauuuga

SEQ ID NO: 133101 - RNA, 1701 nt, Artificial Sequence
  derived and/or modified CDS sequence (opt3) from hemagglutinin__InfluenzaA__ADI48214
augaaggccauccuggugguccuccuuuacaccuucgcuauugcaaacgccgacacacugugcauaggcuaucacgcgaauaacagcacugauacgguugacaccguguuggagaaaaauguaacagugacucauuccgucaacuuacuggaagauaagcacaaugggaaacuauguaagcucagaggaguggcuccccugcaucuugguaaaugcaacaucgccggcuggauucuggggaauccugagugugaaucuuugucaaccgcaaguagcugguccuacaucguugagacaucuucgucagacaacggaaccugcuauccaggcgauuuuauugacuacgaggagcucagggagcagcugagcaguguguccucuuucgaacgguuugagaucuucccgaagacuagcuccuggcccaaucacgauucaaacaagggugucacagccgcuuguccucaugcaggggccaaaaguuuuuauaagaaucugauauggcucgugaaaaagggaaacagcuacccaaaauuaucuaaguccuauaucaaugacaagggcaaagaaguacugguucuuuggggcauucaccaccccucaaccagcgcugaucaacagaguuuguaccagaacgccgacgcguacguguucgucgggacgucucgcuauuccaagaaauuuaagccugagaucgcaauucgaccaaaagugcgugaucaggagggaagaaugaauuacuauuggacucugguggaacccggugacaagaucaccuucgaggccacaggcaaccuagucguuccuagguacgcuuuugccauggaacggaacgcagggagcggaauaauuaucucggauacuccagugcaugacugcaauaccacaugucaaaccccgaaaggcgcuauuaacacgucucuccccuuccagaauauccacccuaucacuauugguaagugcccaaaguauguaaaauccacaaagcugcgccuugccaccgggcugagaaacgugcccucaauacagaguaggggauuguuuggcgcgaucgccggcuucauugaagggggauggacugguauggucgacggcugguacggguaucaucaccagaaugaacaaggaagcggcuacgcagcugaucucaaauccacacagaacgccaucgacaagauaaccaauaaagugaacucuguuauugagaagaugaauacgcaguuuaccgcuguggguaaggaguucaaccaccuggaaaaacggaucgagaauuuaaacaagaaagucgaugacggguuccuggauaucuggacauacaaugccgaacuccuugugcuguuggagaacgaacgcacucuagacuaucaugauagcaauguaaagaaccuguacgagaaaguucgaucacagcucaagaacaaugcaaaggagauuggcaacggauguuuugaguucuaucacaaaugcgacaauaccuguauggaaagugugaagaacggcacauacgauuauccuaaauacuccgaagaggccaagcugaauagagaagagaucgacggggucaaacuugagagcacuaggauuuaucaaauacuggcuaucuacucuaccguggcgucaaguuugguccucgcagugagccugggagccauuuccuuuuggaugugcucuaacgguucguuacagugccggaucuguaucuga

SEQ ID NO: 133102 - RNA, 1701 nt, Artificial Sequence; identical to SEQ ID NO: 133100
  derived and/or modified CDS sequence (opt3) from hemagglutinin__InfluenzaA__ADI48216

SEQ ID NO: 133103 - RNA, 1701 nt, Artificial Sequence
  derived and/or modified CDS sequence (opt3) from hemagglutinin__InfluenzaA__ADI48218
augaaggccauccuggugguccuccuuuacaccuucgcuacagcaaacgccgacacucugugcauuggcuaucacgcgaauaacagcacggauaccguugacacaguguuggagaaaaauguaacugugacccauuccgucaacuuacuggaagauaagcacaaugggaaacuauguaagcucagaggaguggcuccccugcaucuugguaaaugcaacauagccggcuggauccuggggaauccugagugugaaucuuugucaacagcaaguagcugguccuacauuguugagaccucuucgucagacaacggaacuugcuauccaggcgauuuuaucgacuacgaggagcucagggagcagcugagcaguguguccucuuucgaacgguuugagauuuucccgaagacaagcuccuggcccaaucacgauucaaacaagggugucaccgccgcuuguccucaugcaggggccaaaaguuuuuauaagaaucugaucuggcucgugaaaaagggaaacagcuacccaaaauuaucuaaguccuauauaaaugacaagggcaaagaaguacugguucuuuggggcauccaccaccccucaacgagcgcugaucaacagaguuuguaccagaacgccgacgcguacguguucgucgggacuucucgcuauuccaagaaauuuaagccugagauugcaauccgaccaaaagugcgugaucaggagggaagaaugaauuacuauuggacccugguggaacccggugacaagauuacauucgaggccacuggcaaccuagucguuccuagguacgcuuuugccauggaacggaacgcagggagcggaaucauaauuucggauaccccagugcaugacugcaauacaaccugucaaacgccgaaaggcgcuaucaacacuucucuccccuuccagaauauucacccuaucacaaucgguaagugcccaaaguauguaaaauccaccaagcugcgccuugccacugggcugagaaacgugcccucaauucagaguaggggauuguuuggcgcgauagccggcuucaucgaagggggauggacagguauggucgacggcugguacggguaucaucaccagaaugaacaaggaagcggcuacgcagcugaucucaaauccacccagaacgccauugacaagaucacgaauaaagugaacucuguuauagagaagaugaauacccaguuuacagcuguggguaaggaguucaaccaccuggaaaaacggauugagaauuuaaacaagaaagucgaugacggguuccuggauaucuggacuuacaaugccgaacuccuugugcuguuggagaacgaacgcacccuagacuaucaggauagcaauguaaagaaccuguacgagaaaguucgaucacaacucaagaacaaugcaaaggagaucggcaacggauguuuugaguucuaucauaaaugcgacaauacauguauggaaagugugaagaacggcacuuacgauuauccuaaauacuccgaagaggccaagcugaauagagaagagauugacggggucaaacuugagagcaccaggaucuaucagauucuggcuauauacucuacaguggcgucaaguuugguccucgugguuagccugggagcaaucuccuuuuggaugugcucuaacgguucguuacagugccggauuuguaucuga

SEQ ID NO: 133104 - RNA, 1701 nt, Artificial Sequence
  derived and/or modified CDS sequence (opt3) from hemagglutinin__InfluenzaA__ADI48220
augaaggccauccuggugguccuccuuuacaccuucgcuacagcaaacgccgacacucugugcauuggcuaucacgcgaauaacagcacggauaccguugacacaguguuggagaaaaauguaacugugacccauuccgucaacuuacuggaagauaagcacaaugggaaacuauguaagcucagaggaguggcuccccugcaucuugguaaaugcaacauagccggcuggauccuggggaauccugagugugaaucuuugucaacagcaaguagcugguccuacauuguugagaccucuucgucagacaacggaacuugcuauccaggcgauuuuaucgacuacgaggagcucagggagcagcugagcaguguguccucuuucgaacgguuugagauuuucccgaagacaagcuccuggcccaaucacgauucaaacaagggugucaccgccgcuuguccucaugcaggggccaaaaguuuuuauaagaaucugaucuggcucgugaaaaagggaaacagcuacccaaaauuaucuaaguccuauauaaaugacaagggcaaagaaguacugguucuuuggggcauccaccaccccucaacgagcgcugaucaacagaguuuguaccagaacgccgacgcguacguguucgucgggacuucucgcuauuccaagaaauuuaagccugagauugcaauccgaccaaaagugcgugaucaggagggaagaaugaauuacuauuggacccugguggaacccggugacaagauuacauucgagacuaccggcaaccuagucguuccuagguacgccuuugcuauggaacggaacgccgggagcggaaucauaauuucggauacaccagugcaugacugcaauaccacgugucaaacuccgaaaggcgcaaucaacacaucucuccccuuccagaauauucacccuaucaccaucgguaagugcccaaaguauguaaaauccacuaagcugcgccuugcuacagggcugagaaacgugcccucaauucagaguaggggauuguuuggcgccauagcgggcuucaucgaagggggauggaccgguauggucgacggcugguacggguaucaucaccagaaugaacaaggaagcggcuacgccgcagaucucaaauccacgcagaacgcuauugacaagaucaccaauaaagugaacucuguuauagagaagaugaauacacaguuuacugccguggguaaggaguucaaccaccuggaaaaacggauugagaauuuaaacaagaaagucgaugacggguuccuggauaucuggaccuacaaugcugaacuccuugugcuguuggagaacgaacgcacacuaggcuaucaugacagcaauguaaagaaccuguacgagaaaguucgaucacagcucaagaacaaugccaaggagaucggaaacggcuguuuugaguucuaucacaaaugcgauaauacuuguauggaaagugugaagaacgggaccuacgacuauccuaaauacuccgaagaggcaaagcugaauagagaagagauugauggagucaaacuugagagcacaaggaucuaucaaauucuggccauauacucuaccguggcuucaaguuugguccucgugguuagccugggugcgaucuccuuuuggaugugcucuaacggcucguuacagugccggauuuguaucuga

SEQ ID NO: 133105 - RNA, 1701 nt, Artificial Sequence
  derived and/or modified CDS sequence (opt3) from hemagglutinin__InfluenzaA__ADI48622
augaaggccauccugguguuccuccuuuacaccuuugcuacagcaaacgccgacacucugugcauuggcuaucacgcgaauaacagcacggauaccgucgacacaguuuuggagaagaaugugacuguaacccauuccgugaacuuacuggaagauaagcacaaugggaaacuauguaagcucagaggagucgcuccccugcaucuugguaaaugcaacauagccggcuggauccuggggaauccugagugugaaucuuugucaacagcaaguagcugguccuacauuguggagaccucuucgucagacaacggaacuugcuauccaggcgauuucaucgacuacgaggagcucagggagcagcugagcaguguuuccucuuuugaacgguucgagauuuuuccgaagacaagcuccuggcccaaucacgauucaaacaagggugugaccgccgcuuguccucaugcaggggccaaaaguuucuauaagaaucugaucuggcucgucaaaaagggaaacagcuacccaaaauuaucuaaguccuauauaaaugacaagggcaaagaagugcugguacuuuggggcauccaccaccccucaacgagcgcugaucaacagaguuuguaccagaacgccgacgcguacguuuuuguggggacuucucgcuauuccaagaaauucaagccugagauugcaauccgaccaaaaguccgugaucaggagggaagaaugaauuacuauuggacccugguggaacccggugacaagauuacauuugaggccacuggcaaccuaguggucccuagguacgcuuucgccauggaacggaacgcagggagcggaaucauaauuucggauaccccaguucaugacugcaauacaaccugucaaacgccgaaaggcgcuaucaacacuucucuccccuuucagaauauucacccuaucacaaucgguaagugcccaaaguaugugaaauccaccaagcugcgccuugccacugggcugagaaacguacccucaauucagaguaggggauuguucggcgcgauagccggcuuuaucgaagggggauggacagguaugguggacggcugguacggguaucaucaccagaaugaacaaggaagcggcuacgcagcugaucucaaauccacccagaacgccauugacgagaucacgaauaaggucaacucugugauagagaaaaugaauacccaguucacagcuguugguaaggaguucaaccaccuggaaaagcggauugaaaauuuaaacaaaaagguggaugacggguuucuggauaucuggacuuacaaugccgagcuccuuguccuguuggaaaacgagcgcacccuagacuaucaugauagcaaugugaaaaaccuguacgagaagguacgaucacagcucaaaaacaaugcaaaggaaaucggcaacggauguuucgaguuuuaucacaagugcgacaauacauguauggaaaguguuaaaaacggcacuuacgauuauccuaaguacuccgaggaagccaaacugaauagagaggagauugacggggugaaacuugaaagcaccaggaucuaucaaauucuggcuauauacucuacagucgcgucaaguuuggugcucgucgugagccugggagcaaucuccuucuggaugugcucuaacgguucguuacagugccggauuuguaucuga

SEQ ID NO: 133106 - RNA, 1701 nt, Artificial Sequence
  derived and/or modified CDS sequence (opt3) from hemagglutinin__InfluenzaA__ADI48632
auggaggccauccuggugguccuccuuuacaccuucgcuacagcaaacgccgacacucugugcauuggcuaucacgcgaauaacagcacggauaccguugacacaguguuggaaaagaauguaacugugacccauuccgucaacuuacuggaggauaaacacaaugggaagcuauguaaacucagaggaguggcuccccugcaucuugguaagugcaacauagccggcuggauccuggggaauccugaaugugagucuuugucaacagcaaguagcugguccuacauuguugaaaccucuucgucagacaacggaacuugcuauccaggcgauuuuaucgacuacgaggagcucagggaacagcugagcaguguguccucuuucgagcgguuugaaauuuucccgaaaacaagcuccuggcccaaucacgauucaaacaagggugucaccgccgcuuguccucaugcaggggccaagaguuuuuauaaaaaucugaucuggcucgugaagaaaggaaacagcuacccaaaguuaucuaaauccuauauaaaugacaagggcaaggagguacugguucuuuggggcgugcaccaccccucaacgagcgcugaucaacagaguuuguaccagaacgccgacgcguacgucuucguggggucuucccgcuauagcaaaaaguuuaaaccugagaucgcaauucgaccaaaggugcgugaucaggaaggaagaaugaauuacuauuggacucuggucgagcccggugacaaaaucaccuucgaagccacaggcaaccuaguugugccuagguacgcuuuugccauggagcggaacgcagggucgggaauuaucauaucugauacuccaguacaugacugcaauaccacaugucaaaccccgaagggcgcuauuaacacgucccuccccuuccacaauauccauccuauuacuaucgguaaaugcccaaaguaugugaagucaacaaaacugcgccuugccaccgggcugagaaacguccccaguauccagagcaggggauuguuuggcgcgauugccggcuucauagaagggggauggacugguaugguggacggcugguacggguaucaccaccagaaugagcagggauccggcuacgcagcugaucucaagucuacacaaaacgccaucgacgagauuaccaauaaaguuaacagcgugaucgaaaagaugaauacgcaguuuaccgcugucgguaaagaguucaaccaucuggaaaagcggauagagaauuuaaacaagaaaguggaugacggguuccuggauauuuggacauacaaugccgaacuccuuguacuguuggagaacgagcgcacucuagacuaucacgauucaaauguuaagaaccuguacgaaaaagugcgaagucagcucaagaacaaugcaaaagagaucggcaacggauguuuugaguucuaucauaagugcgacaauaccuguauggaauccgucaagaacggcacauacgauuauccuaaauacagcgaagaggccaagcugaauagagaggaaaucgacggggugaaacuugagucuacuaggauuuaucagauccuggcuauuuacucaaccgucgcgaguagcuuggugcucguugugucccugggagcaauaucuuuuuggaugugcucgaacgguagcuuacaaugccggaucuguauuuga

SEQ ID NO: 133107 - RNA, 1701 nt, Artificial Sequence; identical to SEQ ID NO: 130959
  derived and/or modified CDS sequence (opt3) from hemagglutinin__InfluenzaA__ADI48642

SEQ ID NO: 133108 - RNA, 1701 nt, Artificial Sequence; identical to SEQ ID NO: 130959
  derived and/or modified CDS sequence (opt3) from hemagglutinin__InfluenzaA__ADI48652

SEQ ID NO: 133109 - RNA, 1701 nt, Artificial Sequence
  derived and/or modified CDS sequence (opt3) from hemagglutinin__InfluenzaA__ADI48672
auggaggccauccuggugguccuccuuuacaccuucgcuacagcaaacgccgacacucugugcauuggcuaucacgcgaauaacagcacggauaccguugacacaguguuggaaaagaauguaacugugacccauuccgucaacuuacuggaggauaaacacaaugggaagcuauguaaacucagaggaguggcuccccugcaucuugguaagugcaacauagccggcuggauccuggggaauccugaaugugagucuuugucaacagcaaguagcugguccuacauuguugaaaccucuucgucagacaacggaacuugcuauccaggcgauuuuaucgacuacgaggagcucagggaacagcugagcaguguguccucuuucgagcgguuugaaauuuucccgaaaacaagcuccuggcccaaucacgauucaaacaagggugucaccgccgcuuguccucaugcaggggccaagaguuuuuauaauaaccugaucuggcucgugaaaaagggaaauagcuacccaaaauuaucuaaguccuauauaaacgacaaaggcaaggagguacugguucuuuggggcauccaccaccccucaacgagcgcugaucaacagaguuuguaccagaaugccgacgcguacguguucgucgggucuucccgcuauagcaagaaauuuaagccugagauugcaauccgaccaaaagugcgugaucaggaaggaagaaugaacuacuauuggacucugguggagcccggugacaagauuaccuucgaagccacaggcaaccuagucguuccuagguacgcuuuugccauggagcggaaugcagggucgggaaucauaauuucugauacuccagugcaugacugcaacaccacaugucaaaccccgaaaggcgcuaucaauacgucccuccccuuccacaacauucauccuaucacuaucgguaagugcccaaaauauguaaagucaacaaagcugcgccuugccaccgggcugagaaaugugcccaguauucagagcaggggauuguuuggcgcgauagccggcuucaucgaagggggauggacugguauggucgacggcugguacggguaucaccaccagaacgagcagggauccggcuacgcagcugaucucaaaucuacacaaaaugccauugacgagaucaccaacaaggugaauagcguuauagaaaagaugaacacgcaguuuaccgcuguggguaaggaguucaaucaucuggaaaaacggauugagaacuuaaauaagaaggucgaugacggguuccuggauaucuggacauacaacgccgaacuccuugugcuguuggagaaugagcgcacucuagacuaucacgauucaaacguuaaaaaccuguacgaaaagguacgaagucagcucaaaaauaacgcaaaggagaucggcaauggauguuuugaguucuaucauaaaugcgacaacaccuguauggaauccgugaagaauggcacauacgauuauccuaaguacagcgaagaggccaaacugaacagagaggaaauugacggggucaaacuugagucuacuaggaucuaucagauucuggcuauauacucaaccguggcgaguagcuugguccucgugguuucccugggagcaaucucuuuuuggaugugcucgaaugguagcuuacaaugccggauuuguaucuga

SEQ ID NO: 133110 - RNA, 1701 nt, Artificial Sequence; identical to SEQ ID NO: 130717
  derived and/or modified CDS sequence (opt3) from hemagglutinin__InfluenzaA__ADI48682

SEQ ID NO: 133111 - RNA, 1701 nt, Artificial Sequence; identical to SEQ ID NO: 130959
  derived and/or modified CDS sequence (opt3) from hemagglutinin__InfluenzaA__ADI48692

SEQ ID NO: 133112 - RNA, 1701 nt, Artificial Sequence; identical to SEQ ID NO: 130897
  derived and/or modified CDS sequence (opt3) from hemagglutinin__InfluenzaA__ADI48702

SEQ ID NO: 133113 - RNA, 1701 nt, Artificial Sequence; identical to SEQ ID NO: 130959
  derived and/or modified CDS sequence (opt3) from hemagglutinin__InfluenzaA__ADI48712

SEQ ID NO: 133114 - RNA, 1701 nt, Artificial Sequence; identical to SEQ ID NO: 130959
  derived and/or modified CDS sequence (opt3) from hemagglutinin__InfluenzaA__ADI48722

SEQ ID NO: 133115 - RNA, 1701 nt, Artificial Sequence; identical to SEQ ID NO: 130717
  derived and/or modified CDS sequence (opt3) from hemagglutinin__InfluenzaA__ADI48732

SEQ ID NO: 133116 - RNA, 1701 nt, Artificial Sequence; identical to SEQ ID NO: 130717
  derived and/or modified CDS sequence (opt3) from hemagglutinin__InfluenzaA__ADI48742

SEQ ID NO: 133117 - RNA, 1701 nt, Artificial Sequence
  derived and/or modified CDS sequence (opt3) from hemagglutinin__InfluenzaA__ADI48752
auggaggccauccugguguuccuccuuuacaccuuugcuacagcaaacgccgacacucugugcauuggcuaucacgcgaauaacagcacggauaccgucgacacaguuuuggaaaagaaugugacuguaacccauuccgugaacuuacuggaggauaaacacaaugggaagcuauguaaacucagaggagucgcuccccugcaucuugguaagugcaacauagccggcuggauccuggggaauccugaaugugagucuuugucaacagcaaguagcugguccuacauuguggaaaccucuucgucagacaacggaacuugcuauccaggcgauuucaucgacuacgaggagcucagggaacagcugagcaguguuuccucuuuugagcgguucgaaauuuuuccgaaaacaagcuccuggcccaaucacgauucaaacaaggguaucaccgccgcuuguccucaugcaggggccaagaguuucuauaaaaaucugauauggcucgugaagaaaggaaacagcuacccaaaguuaucuaaauccuauaucaaugacaagggcaaggagguccuggugcuuuggggcauucaccaccccucaacgagcgcugaucaacagaguuuguaccagaacgccgacgcguacguauuuguugggucuucccgcuauagcaaaaaguucaaaccugagaucgcaauucgaccaaaggugcgugaucaggaaggaagaaugaauuacuauuggacucuggucgagcccggugacaaaaucaccuuugaagccacaggcaaccuaguggugccuagguacgcuuucgccauggagcggaacgcagggucgggaauaauuaucucugauacuccaguccaugacugcaauaccacaugucaaaccccgaagggcgcuauuaacacgucccuccccuuucacaauauccauccuaucacuauugguaaaugcccaaaguauguuaagucaacaaaacugcgccuugccaccgggcugagaaacgugcccaguauacagagcaggggauuguucggcgcgaucgccggcuuuauugaagggggauggacugguaugguagacggcugguacggguaucaccaccagaaugagcagggauccggcuacgcagcugaucucaagucuacacaaaacgccaucgacgagauaaccaauaaagugaacagcgucauugaaaagaugaauacgcaguucaccgcuguggguaaagaguucaaccaucuggaaaagcggaucgagaauuuaaacaagaaaguugaugacggguuucuggauaucuggacauacaaugccgaacuccuugugcuguuggagaacgagcgcacucuagacuaucacgauucaaaugucaagaaccuguacgaaaaagugcgaagucagcucaagaacaaugcaaaagagauuggcaacggauguuucgaauuuuaucauaagugcgacaauaccuguauggaguccguaaagaacggcacauacgauuauccuaaauacagcgaagaggccaagcugaauagagaggaaaucgacgggguuaaacuugagucuacuaggauuuaucagauacuggcuaucuacucaaccguggcgaguagcuugguccucguggucucccugggagcaauuucuuucuggaugugcucgaacgguagcuuacaaugccggaucuguaucuga

SEQ ID NO: 133118 - RNA, 1701 nt, Artificial Sequence; identical to SEQ ID NO: 130959
  derived and/or modified CDS sequence (opt3) from hemagglutinin__InfluenzaA__ADI48762

SEQ ID NO: 133119 - RNA, 1701 nt, Artificial Sequence
  derived and/or modified CDS sequence (opt3) from hemagglutinin__InfluenzaA__ADI48772
auggaggccauccuggugguccuccuuuacaccuucgcuacagcaaacgccgacacucugugcauuggcuaucaggcgaauaacagcacggauaccguugacacaguguuggaaaagaauguaacugugacccacuccgucaacuuacuggaggauaaacauaaugggaagcuauguaaacucagaggaguggcuccccugcaccuugguaagugcaacauagccggcuggauccuggggaauccugaaugugagucuuugucaacagcaaguagcugguccuacauuguugaaaccucuucgucagacaacggaacuugcuauccaggcgauuuuaucgacuacgaggagcucagggaacaacugagcaguguguccucuuucgagcgguuugaaauuuucccgaaaacaagcuccuggcccaaucaugauucaaacaagggugucaccgccgcuuguccucacgcaggggccaagaguuuuuauaaaaaucugaucuggcucgugaagaaaggaaacagcuacccaaaguuaucuaaauccuauauaaaugacaagggcaaggagguacugguucuuuggggcauccaucaccccucaacgagcgcugaucagcagaguuuguaccagaacgccgacgcguacguguucgucgggucuucccgcuauagcaaaaaguuuaaaccugagauugcaauccgaccaaaggugcgugaucaagaaggaagaaugaauuacuauuggacucugguggagcccggugacaaaauuaccuucgaagccacaggcaaccuagucguuccuagguacgcuuuugccauggagcggaacgcagggucgggaaucauaauuucugauacuccagugcacgacugcaauaccacaugucagaccccgaagggcgcuaucaacacgucccuccccuuccauaauauucacccuaucacuaucgguaaaugcccaaaguauguaaagucaacaaaacugcgccuugccaccgggcugagaaacgugcccaguauucagagcaggggauuguuuggcgcgauagccggcuucaucgaagggggauggacugguauggucgacggcugguacggguaucaucaccagaaugagcaaggauccggcuacgcagcugaucucaagucuacacagaacgccauugacgagaucaccaauaaagugaacagcguuauagaaaagaugaauacgcaguuuaccgcuguggguaaagaguucaaccaccuggaaaagcggauugagaauuuaaacaagaaagucgaugacggguuccuggauaucuggacauacaaugccgaacuccuugugcuguuggagaacgagcgcacucuagacuaucaugauucaaauguaaagaaccuguacgaaaaaguucgaagucagcucaagaacaaugcaaaagagaucggcaacggauguuuugaguucuaucacaagugcgacaauaccuguauggaauccgugaagaacggcacauacgauuauccuaaauacagcgaagaggccaagcugaauagagaggaaauugacggggucaaacuugagucuacuaggaucuaucaaauucuggcuauauacucaaccguggcgaguagcuugguccucgugguuucccugggagcaaucucuuuuuggaugugcucgaacgguagcuuacagugccggauuuguaucuga

SEQ ID NO: 133120 - RNA, 1701 nt, Artificial Sequence
  derived and/or modified CDS sequence (opt3) from hemagglutinin__InfluenzaA__ADI48782
augaaggccauccuggugguccuccuuuacaccuucgcuacagcaaacgccgacacucugugcauuggcuaucacgcgaauaacagcacggauaccguugacacaguguuggagaaaaauguaacugugacccauuccgucaacuuacuggaagauaagcacaaugggaaacuauguaagcucagaggaguggcuccccugcaucuugguaaaugcaacauagccggcuggauccuggggaauccugagugugaaucuuugucaacagcaaguagcugguccuacauuguugagaccucuucgucagacaacggaacuugcuauccaggcgauuuuaucgacuacgaggagcucagggagcagcugagcaguguguccucuuucgaacgguuugagauuuucccgaagacaagcuccuggcccaaucacgauucaaacaagggugucaccgccgcuuguccucaugcaggggccaaaaguuuuuauaagaaucugaucuggcucgugaaaaagggaaacagcuacccaaaauuaucuaaguccuauauaaaugacaagggcaaagaaguacugguucuuuggggcauccaccaccccucaacgagcgcugaucaacagaguuuguaccagaacgccgacgcguacguguucgucgggacuucucgcuauuccaagaaauuuaagccugagauugcaauccgaccaaaagugcgugaucaggagggaagaaugaauuacuauuggacccugguggaacccggugacaagauuacauucgaggccacuggcaaccuagucguuccuagguacgcuuuugccauggaacggaacgcagggagcggaaucauaauuucggauaccccagugcaugacugcaauacaaccugucaaacgccgaaaggcgcuaucaacacuucucuccccuuccagaauauucacccuaucacaaucgguaagugcccaaaguauguaaaauccaccaagcugcgccuugccacugggcugagaaacgugcccucaauucagaguaggggauuguuuggcgcgauagccggcuucaucgaagggggauggacagguauggucgacggcugguacggguaucaucaccagaaugaacaaggaagcggcuacgcagcugaucucaaauccacccagaacgccauugacgagaucacgaauaaggugaacucuguuauagagaaaaugaauacccaguuuacagcuguggguaaggaguucaaccaccuggaaaagcggauugaaaauuuaaacaaaaaggucgaugacggguuccuggauaucuggacuuacaaugccgagcuccuugugcuguuggaaaacgagcgcacccuagacuaucaugauagcaauguaaagaaccuguacgagaagguucgaucacagcucaaaaacaaugcaaaggaaaucggcaacggauguuuugaguucuaucacaagugcgacaauacauguauggaaagugugaaaaacggcacuuacgauuauccuaaguacuccgaggaaagcaaacugaauagagaggagauugacggggucaaacuugaaucuaccaggaucuaucaaauucuggccauauacucaacaguggcuaguagcuugguccucgugguuucccugggagcgaucucuuuuuggaugugcucgaacgguagcuuacagugccggauuuguaucuga

SEQ ID NO: 133121 - RNA, 1701 nt, Artificial Sequence
  derived and/or modified CDS sequence (opt3) from hemagglutinin__InfluenzaA__ADI48792
auggaggccauccuggugguccuccuuuacaccuucgcuacagcaaacgccgacacucugugcauuggcuaucacgcgaauaacagcacggauaccguugacacaguguuggaaaagaauguaacugugacccauuccgucaacuuacuggaggauaaacacaaugggaagcuauguaaacucagaggaguggcuccccugcaucuugguaagugcaacauagccggcuggauccuggggaauccugaaugugagucuuugucaacagcaaguagcugguccuacauuguugaaaccucuucgucagacaacggaacuugcuauccaggcgauuuuaucgacuacgaggagcucagggaacagcugagcaguguguccucuuucgagcgguuugaaauuuucccgaaaacaagcuccuggcccaaucacgauucaaacaagggugucaccgccgcuuguccucaugcaggggccaagaguuuuuauaaaaaucugaucuggcucgugaagaaaggaaacagcuacccaaaguuaucuaaauccuauauaaaugacaagggcaaggagguacugguucuuuggggcauccaccaccccucaacgagcgcugaucaacagaguuuguaccagaacgccgacgcguacauuuucguggggucuucccgcuauagcaaaaaguuuaaaccugagaucgcaauucgaccaaagguccgugaucaggaaggaagaaugaauuacuauuggacucugguggagcccggugacaaaaucaccuucgaagccacaggcaaccuaguggucccuagguacgcuuuugccauggagcggaacgcagggucgggaauaauuaucucugauacuccaguucaugacugcaauaccacaugucaaaccccgaagggcgcuauuaacacgucccuccccuuccacaauauccauccuaucacuauugguaaaugcccaaaguaugugaagucaacaaaacugcgccuugccaccgggcugagaaacguacccaguauacagagcaggggauuguuuggcgcgaucgccggcuucauugaagggggauggacugguaugguggacggcugguacggguaucaccaccagaaugagcagggauccggcuacgcagcugaucucaagucuacacaaaacgccaucgacgagauaaccaauaaagucaacagcgugauugaaaagaugaauacgcaguuuaccgcuguugguaaagaguucaaccaucuggaaaagcggaucgagaauuuaaacaagaaaguggaugacggguuccuggauaucuggacauacaaugccgaacuccuuguccuguuggagaacgagcgcacucuagacuaucacgauucaaaugugaagaaccuguacgaaaaaguacgaagucagcucaagaacaaugcaaaagagauuggcaacggauguuuugaguucuaucauaagugcgacaauaccuguauggaauccguuaagaacggcacauacgauuauccuaaauacagcgaagaggccaagcugaauagagaggaaaucgacggggugaaacuugagucuacuaggauuuaucagauacuggcuaucuacucaaccgucgcgaguagcuuggugcucgucgugucccugggagcaauuucuuuuuggaugugcucgaacgguagcuuacaaugccggaucuguaucuga

SEQ ID NO: 133122 - RNA, 1701 nt, Artificial Sequence
  derived and/or modified CDS sequence (opt3) from hemagglutinin__InfluenzaA__ADI49029
auggaggccauccuggugguccuccuuuacaccuucgcuacagcaaacgccgacacucugugcauuggcuaucacgcgaauaacagcacggauaccguugacacaguguuggaaaagaauguaacugugacccauuccgucaacuuacuggaggauaaacacaaugggaagcuauguaaacucagaggaguggcuccccugcaucuugguaagugcaacauagccggcuggauccuggggaauccugaaugugagucuuugucaacagcaaguagcugguccuacauuguugaaaccucuaucucggacaacggaacuugcuauccaggcgauuuuauugacuacgaggagcucagggaacagcugucaagcgugaguuccuucgagcgguuugaaaucuucccgaaaacaucuagcuggcccaaucacgauuccaacaagggugucaccgccgcuuguccucaugcaggggccaagucauuuuauaaaaaucugauauggcucgugaagaaaggaaacaguuacccaaaguuaagcaaaucuuauaucaaugacaagggcaaggagguacugguucuuuggggcauucaccaccccuccacgucagcugaucaacagagcuuguaccagaacgccgacgcguacguguucgucgggaguucucgcuauuccaaaaaguuuaaaccugagaucgcaauucgaccaaaggugcgugaucaggaaggaagaaugaauuacuauuggacucugguggagcccggugacaaaaucaccuucgaagccacaggcaaccuagucguuccuagguacgcuuuugccauggagcggaacgcagggagcggaauaauuaucucggauacuccagugcaugacugcaauaccacaugucaaaccccgaagggcgcuauuaacacgucucuccccuuccacaauauccauccuaucacuauugguaaaugcccaaaguauguaaaguccacaaaacugcgccuugccaccgggcugaagaacgugcccucaauacagaguagaggauuguuuggcgcgaucgccggcuucauugaagggggauggacugguauggucgacggcugguacggguaucaccaccagaaugagcagggaagcggcuacgcagcugaucucaaauccacacaaaacgccaucgacgagauaaccaauaaggugaacucuguuauugaaaagaugaauacgcaguuuaccgcuguggguaaggaguucaaccaucuggaaaagaggaucgagaauuuaaacaaaaaggucgaugacggguuccuggauaucuggacauacaaugccgaacuccuugugcuguuggagaacgagcggacucuagacuaucacgauagcaauguuaaaaaccuguacgaaaagguacgcucacagcucaaaaacaaugcaaaggagauuggcaacggauguuuugaguucuaucauaagugcgacaauaccuguauggaaagugugaaaaacggcacauacgauuauccuaaguacuccgaagaggccaaacugaaucgagaggaaaucgacggggucaaacuugagagcacuagaauuuaucagauacuggcuaucuacucuaccguggcgucaaguuugguccucgugguuagccugggagcaauuuccuuuuggaugugcucuaacgguucguuacaaugcaggaucuguaucuga

SEQ ID NO: 133123 - RNA, 1701 nt, Artificial Sequence; identical to SEQ ID NO: 130959
  derived and/or modified CDS sequence (opt3) from hemagglutinin__InfluenzaA__ADI49240

SEQ ID NO: 133124 - RNA, 1701 nt, Artificial Sequence; identical to SEQ ID NO: 130959
  derived and/or modified CDS sequence (opt3) from hemagglutinin__InfluenzaA__ADI49260

SEQ ID NO: 133125 - RNA, 1701 nt, Artificial Sequence
  derived and/or modified CDS sequence (opt3) from hemagglutinin__InfluenzaA__ADI49270
augaaggccauccuggugguccuccuuuacaccuucgcuacagcaaacgccgacacucugugcauuggcuaucacgcgaauaacagcacggauaccguugacacaguguuggagaaaaauguaacugugacccauuccgucaacuuacuggaagauaagcacaaugggaaacuauguaagcucagaggaguggcuccccugcaucuugguaaaugcaacauagccggcuggauccuggggaauccugagugugaaucuuugucaacagcaaguagcugguccuacauuguugagaccucuucgucagacaacggaacuugcuauccaggcgauuuuaucgacuacgaggagcucagggagcagcugagcaguguguccucuuucgaacgguuugagauuuucccgaagacaagcuccuggcccaaucacgauucaaacaagggugucaccgccgcuuguccucaugcaggggccaaaaguuuuuauaagaaucugaucuggcucgugaaaaagggaaacagcuacccaaaauuaucuaaguccuauauaaaugacaagggcaaagaaguacugguucuuuggggcauccaccaccccucaacgagcgcugaucaacagaguuuguaccagaacgccgacgcguacguguucgucgggacuucucgcuauuccaagaaauuuaagccugagauugcaauccgaccaaaagugcgugaucaggagggaagaaugaauuacuauuggacccugguggaacccggugacaagauuacauucgaggccacuggcaaccuagucguuccuagguacgcuuuugccauggaacggaacgcagggagcggaaucauaauuucggauaccccagugcaugacugcaauacaaccugucaaacgccgaaaggcgcuaucaacacuucucuccccuuccagaauauucacccuaucacaaucgguaagugcccaaaguauguaaaauccaccaagcugcgccuugccacugggcugagaaacgugcccucaauucagaguaggggauuguuuggcgcgauagccggcuucaucgaagggggauggacagguauggucgacggcugguacggguaucaucaccagaaugaacaaggaagcggcuacgcagcugaucucaaauccacccagaacgccauugacgagaucacgaauaaggugaacucuguuauagagaaaaugaauacccaguuuacagcuguggguaaggaguucaaccaccuggaaaagcggauugaaaauuuaaacaaaaaggucgaugacggguuccuggauaucuggacuuacaaugccgagcuccuugugcuguuggaaaacgagcgcacccuagacuaucaugauagcaauguuaaaaaccuguacgagaagguacgaucacagcucaaaaacaaugcaagagaaaucggcaacggauguuuugaguucuaucacaagugcgacaauacauguauggaaagugugaagaacggcacuuacgauuauccuaaauacuccgaggaagccaagcugaauagggaggagauugacggggucaaacuugaaagcacccggaucuaucaaauucuggcuauauacucuacaguggcgucaaguuugguccucgugguuagccugggagcaaucuccuuuuggaugugcucuaacgguucguuacagugccguauuuguaucuga

SEQ ID NO: 133126 - RNA, 1701 nt, Artificial Sequence; identical to SEQ ID NO: 130959
  derived and/or modified CDS sequence (opt3) from hemagglutinin__InfluenzaA__ADI49280

SEQ ID NO: 133127 - RNA, 1701 nt, Artificial Sequence; identical to SEQ ID NO: 130959
  derived and/or modified CDS sequence (opt3) from hemagglutinin__InfluenzaA__ADI49312

SEQ ID NO: 133128 - RNA, 1701 nt, Artificial Sequence; identical to SEQ ID NO: 130959
  derived and/or modified CDS sequence (opt3) from hemagglutinin__InfluenzaA__ADI49322

SEQ ID NO: 133129 - RNA, 1701 nt, Artificial Sequence; identical to SEQ ID NO: 130959
  derived and/or modified CDS sequence (opt3) from hemagglutinin__InfluenzaA__ADI49332

SEQ ID NO: 133130 - RNA, 1701 nt, Artificial Sequence; identical to SEQ ID NO: 131286
  derived and/or modified CDS sequence (opt3) from hemagglutinin__InfluenzaA__ADI49342

SEQ ID NO: 133131 - RNA, 1701 nt, Artificial Sequence; identical to SEQ ID NO: 130959
  derived and/or modified CDS sequence (opt3) from hemagglutinin__InfluenzaA__ADI49352

SEQ ID NO: 133132 - RNA, 1701 nt, Artificial Sequence; identical to SEQ ID NO: 130717
  derived and/or modified CDS sequence (opt3) from hemagglutinin__InfluenzaA__ADI49362

SEQ ID NO: 133133 - RNA, 1701 nt, Artificial Sequence; identical to SEQ ID NO: 132269
  derived and/or modified CDS sequence (opt3) from hemagglutinin__InfluenzaA__ADI49382

SEQ ID NO: 133134 - RNA, 1701 nt, Artificial Sequence; identical to SEQ ID NO: 131070
  derived and/or modified CDS sequence (opt3) from hemagglutinin__InfluenzaA__ADI49392

SEQ ID NO: 133135 - RNA, 1701 nt, Artificial Sequence; identical to SEQ ID NO: 130704
  derived and/or modified CDS sequence (opt3) from hemagglutinin__InfluenzaA__ADI49717

SEQ ID NO: 133136 - RNA, 1701 nt, Artificial Sequence
  derived and/or modified CDS sequence (opt3) from hemagglutinin__InfluenzaA__ADI49727
augaaggccauccuggugguccuccuuuacaccuucgcuacagcaaacgccgacacucugugcauuggcuaucacgcgaauaacagcacggauaccguugacacaguguuggagaagaauguaacugugacccauuccgucaacuuacuggaagauaagcacaaugggaaacuauguaagcucagaggaguggcuccccugcaucuugguaaaugcaacauagccggcuggauccuggggaauccugagugugaaucuuugucaacagcaaguagcugguccuacauuguugagaccucuucgucagacaacggaacuugcuauccaggcgauuuuaucgacuacgaggagcucagggagcagcugagcaguguguccucuuucgaacgguuugagauuuucccgaagacaagcuccuggcccaaucacgauucaaacaagggugucaccgccgcuuguccucaugcaggggccaaaaguuuuuauaagaaucugaucuggcucgugaaaaagggaaacagcuacccaaaauuaucuaaguccuauauaaaugacaagggcaaagaaguacugguucuuuggggcauccaccaccccucaacgagcgcugaucaacagaguuuguaccagaacgccgacgcguacguguucgucgggucuucccgcuauagcaagaaauuuaagccugagauugcaauccgaccaaaagugcgugaucaggagggaagaaugaauuacuauuggacucugguggaacccggugacaagauuaccuucgaggccacaggcaaccuagucguuccuagguacgcuuuugccauggaacggaacgcagggucgggaaucauaauuucugauacuccagugcaugacugcaauaccacaugucaaaccccgaaaggcgcuaucaacacgucccuccccuuccagaauauucacccuaucacuaucgguaagugcccaaaguauguaaaaucaacaaagcugcgccuugccaccgggcugagaaacgugcccaguauucagagcaggggauuguuuggcgcgauagccggcuucaucgaagggggauggacugguauggucgacggcugguacggguaucaucaccagaaugaacaaggauccggcuacgcagcugaucucaaaucuacacagaacgccauugacgagaucaccaauaaggugaacagcauaauugagaaaaugaauacgcaguuuaccgcuguugguaaggaguucaaccaccuggaaaagcggaucgaaaauuuaaacaaaaagguggaugacggguuccuggauaucuggacauacaaugccgagcuccuuguccuguuggaaaacgagcgcacucuagacuaucaugauucaaaugugaaaaaccuguacgagaagguacgaagucagcucaaaaacaaugcaaaggaaauuggcaacggauguuuugaguucuaucacaagugcgacaauaccuguauggaauccguuaaaaacggcacauacgauuauccuaaguacagcgaggaagccaaacugaauagagaggagaucgacggggugaaacuugaaucuacuaggauuuaucaaauacuggcuaucuacucaaccgucgcgaguagcuuggugcucgucgugucccugggagcaauuucuuuuuggaugugcucgaacgguagcuuacagugccggaucuguaucuga

SEQ ID NO: 133137 - RNA, 1701 nt, Artificial Sequence; identical to SEQ ID NO: 130704
  derived and/or modified CDS sequence (opt3) from hemagglutinin__InfluenzaA__ADI49737

SEQ ID NO: 133138 - RNA, 1701 nt, Artificial Sequence; identical to SEQ ID NO: 130704
  derived and/or modified CDS sequence (opt3) from hemagglutinin__InfluenzaA__ADI49747

SEQ ID NO: 133139 - RNA, 1701 nt, Artificial Sequence; identical to SEQ ID NO: 130704
  derived and/or modified CDS sequence (opt3) from hemagglutinin__InfluenzaA__ADI49757

SEQ ID NO: 133140 - RNA, 1701 nt, Artificial Sequence; identical to SEQ ID NO: 130704
  derived and/or modified CDS sequence (opt3) from hemagglutinin__InfluenzaA__ADI49767

SEQ ID NO: 133141 - RNA, 1701 nt, Artificial Sequence
  derived and/or modified CDS sequence (opt3) from hemagglutinin__InfluenzaA__ADI49777
augaaggccauccuggugguccuccuuuacaccuucgcuacagcaaacgccgacacucugugcauuggcuaucacgcgaauaacagcacggauaccguugacacaguguuggagaaaaauguaacugugacccauuccgucaacauauuagaagauaagcacaaugggaaacuguguaagcuaagaggaguggcuccccuccaucuggguaaaugcaacaucgccggcuggauucuugggaauccugagugugaaucucugucaacagcaaguagcugguccuacaucguugagaccucuucgucagacaacggaacuugcuauccaggcgauuuuauugacuacgaagaguugagggagcagcucagcaguguguccucuuucgaacgguuugagaucuucccgaagacaagcuccuggcccaaucacgauucaaacaagggugucaccgccgcuuguccucaugcaggggccaaaaguuuuuauaagaaucugauauggcuggugaaaaagggaaacagcuacccaaaacucucuaaguccuauaucaaugacaagggcaaagaaguauuaguucuguggggcauucaccaccccucaacgagcacugaucaacagagucuuuaccagaacgcugacgccuacguguucgucgggucuucccgcuauagcaagaaauuuaagccugagaucgcgauucgaccaaaagugcgugaucaggagggaagaaugaauuacuauuggaccuugguggaacccggugacaagaucacauucgaggcaacuggcaaccuggucguuccuagguacgccuuugcuauggaacggaacgccgggucgggaauaauuaucucugauaccccagugcaugacugcaauacaaccugucaaacgccgaaaggcgcaauuaacacuucccuacccuuccagaauauccacccuaucacaauugguaagugcccaaaguauguaaaaucaaccaagcuccgccuggcuacugggcuuagaaacgugcccaguauacagagcaggggacuguuuggcgccaucgcgggcuucauugaagggggauggacagguauggucgacggcugguacggguaucaucaccagaaugaacaaggauccggcuacgccgcagauuugaaaucuacccagaacgcuaucgacgagauaacgaauaaggugaacagcguuauugagaaaaugaauacccaguuuacagccguggguaaggaguucaaccaccucgagaagcggaucgaaaaucugaacaaaaaggucgaugacggguucuuagauaucuggacuuacaaugcugagcugcucgugcuucuggaaaacgagcgcaccuuggacuaucaugauucaaauguuaaaaaccuauacgagaagguacgaagucagcugaaaaacaaugccaaggaaauuggcaacggauguuuugaguucuaucacaagugcgacaauacauguauggaauccgugaaaaacggcacuuacgauuauccuaaguacagcgaggaagcaaaacucaauagagaggagaucgacggggucaagcuggaaucuaccaggauuuaucaaauacuugccaucuacucaacaguggcuaguagccuggucuuggugguuucccucggagcgauuucuuuuuggaugugcucgaacgguagccugcagugccggaucuguaucuga

SEQ ID NO: 133142 - RNA, 1701 nt, Artificial Sequence
  derived and/or modified CDS sequence (opt3) from hemagglutinin__InfluenzaA__ADI49787
augaaggccauccuggugguccuccuuuacaccuucgcuacagcaaacgccgacacucugugcauuggcuaucacgcgaauaacagcacggauaccguugacacaguguuggagaaaaauguaacugugacccauuccgucaacuuacuggaagauaagcacaaugggaaacuauguaagcucagaggaguggcuccccugcaucuugguaaaugcaacauagccggcuggauccuggggaauccugagugugaaucuauuucaacagcaaguagcugguccuacaucguugagaccucuucgucagacaacggaacuugcuauccaggcgauuuuauugacuacgaagaguugagggagcagcucagcaguguguccucuuucgaacgguuugagaucuucccgaagacaagcuccuggcccaaucacgauucaaacaagggugucaccgccgcuuguccucaugcaggggccaaaaguuuuuauaagaaucugauauggcuggugaaaaagggaaacagcuacccaaaacucucuaaguccuauaucaaugacaagggcaaagaaguauuaguucuguggggcauucaccaccccucaacgagcgcugaucaacagagucuuuaccagaacgccgacgcguacguguucgucgggucuucccgcuauagcaagaaauuuaagccugagaucgcaauucgaccaaaagugcgugaucaggagggaagaaugaauuacuauuggacuuugguggaacccggugacaagaucaccuucgaggccacaggcaaccuggucguuccuagguacgcuuuugccauggaacggaacgcagggucgggaauaauuaucucugauacuccagugcaugacugcaauaccacaugucaaaccccgaaaggcgcuauuaacacgucccuacccuuccagaauauccacccuaucacuauugguaagugcccaaaguauguaaaaucaacaaagcuccgccuggccaccgggcuuagaaacgugcccaguauacagagcaggggacuguuuggcgcgaucgccggcuucauugaagggggauggacugguauggucgacggcugguacggguaucaucaccagaaugaacaaggauccggcuacgcagcugauuugaaaucuacacagaacgccaucgacgagauaaccaauaaggugaacagcguuauugagaaaaugaauacgcaguuuaccgcuguggguaaggaguucaaccaccucgagaagcggaucgaaaaucugaacaaaaaggucgaugacggguucuuagauaucuggacauacaaugccgagcugcucgugcuucuggaaaacgagcgcacuuuggacuaucaugauucaaauguuaaaaaccuauacgagaagguacgaagucagcugaaaaacaaugcaaaggaaauuggcaacggauguuuugaguucuaucacaagugcgacaauaccuguauggaauccgugaaaaacggcacauacgauuauccuaaguacagcgaggaagccaaacucaauagagaggagaucgacggggucaagcuggaaucuacuaggauuuaucaaauacuugcuaucuacucaaccguggcgaguagccuggucuuggugguuucccucggagcaauuucuuuuuggaugugcucgaacgguagccugcagugccggaucuguaucuga

SEQ ID NO: 133143 - RNA, 1701 nt, Artificial Sequence; identical to SEQ ID NO: 132052
  derived and/or modified CDS sequence (opt3) from hemagglutinin__InfluenzaA__ADI49822

SEQ ID NO: 133144 - RNA, 1701 nt, Artificial Sequence
  derived and/or modified CDS sequence (opt3) from hemagglutinin__InfluenzaA__ADI50027
augaaggccauccuggugguccuccuuuacaccuucgcuacagcaaacgccgacacucugugcauuggcuaucacgcgaauaacagcacggauaccguugacacaguguuggagaaaaauguaacugugacccauuccgucaacuuacuggaagauaagcacaaugggaaacuauguaagcucagaggaguggcuccccugcaucuugguaaaugcaacauagccggcuggauccuggggaauccugagugugaaucuuugucaacagcaaguagcugguccuacauuguugagaccucuucgucagacaacggaacuugcuauccaggcgauuuuaucgacuacgaggagcucagggagcagcugagcaguguguccucuuucgaacgguuugagauuuucccgaagacaagcuccuggcccaaucacgauucaaacaagggugucaccgccgcuuguccucaugcaggggccaaaaguuuuuauaagaaucugaucuggcucgugaaaaagggaaacagcuacccaaaauuaucuaaguccuauauaaaugacaagggcaaagaaguacugguucuuuggggcauccaccaccccucaacgagcgcugaucaacagaguuuguaccagaacgccgacgcguacguguucgucgggucuucccgcuauagcaagaaauuuaagccugagauugcaauccgaccaaaagugcgugaucaggagggaagaaugaaguacuauuggacucugguggaacccggugacaaaauuaccuucgaggccacaggcaaucuagucguuccuagguacgcuuuugccauggaacggaacgcagggucgggaaucauaauuucugauacuccagugcaugacugcaacaccacaugucaaaccccgaagggcgcuaucaauacgucccuccccuuccagaacauucacccuaucacuaucgguaagugcccaaaauauguaaagucaacaaaacugcgccuugccaccgggcugagaaaugugcccaguauucagagcaggggauuguuuggcgcgauagccggcuucaucgaagggggauggacugguauggucgacggcugguacgggcaucaccaccagaacgaacaaggauccggcuaugcagcugaucucaagucuacacagaaugccauugacgagaucaccaacaaagugaauagcguuauagagaagaugaacacgcaguuuaccgcuguggguaaggaguucaaucaucuggaaaaacggauugaaaacuuaaauaagaaagucgaugacggguuccuggauaucuggacauacaacgccgagcuccuugugcuguuggaaaaugagcgcacucuagacuaccacgauucaaacguaaagaaucuguaugagaaaguucgaagucagcucaagaacaacgcaaaggaaaucggcaauggauguuuugaguucuaccauaaaugcgacaacaccuguauggaauccgugaagaauggcacauaugauuacccuaaauauagcgaggaagccaagcugaacagagaggagauugacgggaucaaacuugaaucuacuaggauuuaccaaauacuggcuaucuauucaaccgucgcgaguagcuuggugcucgucgugucccugggagcaauuucuuuuuggaugugcucgaaugguagcuuacagugccggaucuguaucuga

SEQ ID NO: 133145 - RNA, 1701 nt, Artificial Sequence
  derived and/or modified CDS sequence (opt3) from hemagglutinin__InfluenzaA__ADI52834
augaaggccauccuggugguccuccuuuacaccuucgcuacagcaaacgccgacacucugugcauuggcuaucacgcgaauaacagcacggauaccguugacacaguguuggagaaaaauguaacugugacccauuccgucaacauauuagaagauaagcacaaugggaaacuguguaagcuaagaggaguggcuccccuccaucuggguaaaugcaacaucgccggcuggauucuugggaauccugagugugaaucucugucaacagcaaguagcugguccuacaucguugagaccucuucgucagacaacggaacuugcuauccaggcgauuuuauugacuacgaagaguugagggagcagcucagcaguguguccucuuucgaacgguuugagaucuucccgaagacaagcuccuggcccaaucacgauucaaacaagggugucaccgccgcuuguccucaugcaggggccaaaaguuuuuauaagaaucugauauggcuggugaaaaagggaaacagcuacccaaaacucucuaaguccuauaucaaugacaagggcaaagaaguauuaguucuguggggcauucaccaucccccuacgucagcugaucaacagagccuuuaccagaacgccgacgcguacguguucgucgggaguucucgcuauuccaagaaauuuaagccagagaucgcaauucgacccaaagugcgugaucaggagggaagaaugaauuacuauuggacuuugguggaaccuggugacaagaucaccuucgaggccacaggcaaccuggucguuccaagguacgcuuuugccauggaacggaacgcagggagcggaauaauuaucucggauacuccggugcacgacugcaauaccacaugucaaacccccaaaggcgcuauuaacacgucucuaccuuuccagaauauccacccaaucacuauugguaagugccccaaguauguaaaauccacaaagcuccgccuggccaccgggcuuagaaacgugccuucaauacagaguaggggacuguuuggcgcgaucgccggcuucauugaagggggauggacugguauggucgacggcugguacggguaucaucaccagaaugaacaaggaagcggcuacgcagcugauuugaaauccacacagaacgccaucgacgagauaaccaauaaggugaacucuguuauugagaaaaugaauacgcaguuuaccgcuguggguaaggaguucaaccaccucgagaagcggaucgaaaaucugaacaaaaaggucgaugacggguucuuagauaucuggacauacaaugccgagcugcucgugcuucuggaaaacgagcgcacuuuggacuaucaugauagcaauguuaaaaaccuauacgagaagguacgaucacagcugaaaaacaaugcaaaggaagugggcaacggauguuuugaguucuaucacaagugcgacaauaccuguauggaaagugucaaaaacggcacauacgauuauccaaaguacuccgaggaagccaaacucaauagagaggagauugacggggugaagcuggaaagcacuaggaucuaucaaauucuugcuauauacucuaccgcggcaucaagucuggucuuggugguuagccucggagccaucuccuuuuggaugugcucuaacgguucgcugcagugccggauuuguaucuga

SEQ ID NO: 133146 - RNA, 1701 nt, Artificial Sequence
  derived and/or modified CDS sequence (opt3) from hemagglutinin__InfluenzaA__ADI52835
auggaggccauccuggugguccuccuuuacaccuucgcuacagcaaacgccgacacucugugcauuggcuaucacgcgaauaacagcacggauaccguugacacaguguuggaaaagaauguaacugugacccauuccgucaacuuacuggaggauaaacacaaugggaagcuauguaaacucagaggaguggcuccccugcaucuugguaagugcaacauagccggcuggauccuggggaauccugaaugugagucuuugucaacagcaaguagcugguccuacauuguugaaaccucuucgucagacaacggaacuugcuauccaggcgauuuuaucgacuacgaggagcucagggaacagcugagcaguguguccucuuucgagcgguuugaaauuuucccgaaaacaagcuccuggcccaaucacgauucaaacaagggugucaccgccgcuuguccucaugcaggggccaagaguuuuuauaaaaaucugaucuggcucgugaagaaaggaaacagcuacccaaaguuaucuaaauccuauauaaaugacaagggcaaggagguacugguucuuuggggcauccaccaucccccuacgucagcugaucaacagagcuuguaccagaacgccgacgcguacguguucgucgggaguucuaaauauuccaagaaauuuaagccagagauugcaauccgccccaaagugcgagaucaggaaggacguaugaauuacuauuggacucugguggagccuggugacaagauuaccuucgaagccacaggcaaccuagucguuccaagauacgcuuuugccauggagaggaacgcagggagcggaaucauaauuucggauacuccggugcacgacugcaauaccacaugucaaacccccaaaggcgcuaucaacacgucucucccuuuccacaauauucauccaaucacuaucgguaagugccccaaguauguaaaauccacaaagcugcggcuugccaccgggcugcgcaacgugccuucaauucagaguagaggauuguuuggcgcgauagccggcuucaucgaagggggauggacugguauggucgacggcugguacggguaucaccaccagaaugagcagggaagcggcuacgcagcugaucucaaauccacacaaaacgccauugacgagaucaccaauaaggugaacucuguuauagaaaagaugaauacgcaguuuaccgcuguggguaaggaguucaaccaucuggaaaagaggauugagaauuuaaacaaaaaggucgaugacggguuccuggauaucuggacauacaaugccgaacuccuugugcuguuggagaacgagcggacucuagacuaucacgauagcaauguuaaaaaccuguacgaaaagguacgcucacagcucaaaaacaaugcaaaggagaucggcaacggauguuuugaguucuaucauaagugcgacaauaccuguauggaaagugugaaaaacggcacauacgauuauccaaaguacuccgaagaggccaaacugaaucgagaggaaauugacggggucaaacuugagagcacuaaaaucuaucagauucuggcuauauacucuaccguggcgucaaguuugguccucgugguuagccugggagcaaucuccuuuuggaugugcucuaacgguucguuacaaugcagaauuuguaucuga

SEQ ID NO: 133147 - RNA, 1701 nt, Artificial Sequence
  derived and/or modified CDS sequence (opt3) from hemagglutinin__InfluenzaA__ADI52836
auggaggccauccuggugguccuccuuuacaccuucgcuacagcaaacgccgacacucugugcauuggcuaucacgcgaauaacagcacggauaccguugacacaguguuggaaaagaauguaacugugacccauuccgucaacuuacuggaggauaaacacaaugggaagcuauguaaacucagaggaguggcuccccugcaucuugguaagugcaacauagccggcuggauccuggggaauccugaaugugagucuuugucaacagcaaguagcugguccuacauuguugaaaccucuucgucagacaacggaacuugcuauccaggcgauuuuaucgacuacgaggagcucagggaacagcugagcaguguguccucuuucgagcgguuugaaauuuucccgaaaacaagcuccuggcccaaucacgauucaaacaagggugucaccgccgcuuguccucaugcaggggccaagaguuuuuauaaaaaucugaucuggcucgugaagaaagagaacagcuacccaaaguuaucuaaauccuauauaaaugacaagggaaaggagguacugguucuuuggggcauccaccaccccucaacgagcgcugaucaacagcgcuuguaccagaacgccgacgcguacguguucgucggcaguucuaaauauuccaagaaauuuaagccugaaauugcaauccgaccaaaagugcgugaucaggaggggagaaugaauuacuauuggacucugguggaacccggagacaagauuaccuucgaggccacagguaaccuagucguuccuagguacgcuuuugccauggaacggaacgcaggcagcgggaucauaauuucggauacuccagugcaugacugcaauaccacaugucaaaccccgaaaggagcuaucaacacgucucuccccuuccacaauauucauccuaucacuaucggcaagugcccaaaguauguaaaauccacaaagcugcgccuugccaccggucugagaaacgugcccucaauucagaguaggggguuguuuggagcgauagccggcuucaucgagggcggguggacuggaauggucgacgguugguacggcuaucaccaccagaaugagcaggggagcggauacgcagcugaucucaaauccacacaaaacgccauugacgaaaucaccaauaaggugaacucuguuauagagaaaaugaauacgcaguuuaccgcugugggcaaggaguucaaccaucuggaaaagcggauugaaaauuuaaacaaaaaggucgaugacgguuuccuggauaucuggacauacaaugccgagcuccuugugcuguuggagaacgaacgcacucuagacuaucacgauagcaauguaaagaaccuguacgagaagguucgaucacagcucaaaaacaaugcaaaggaaaucgggaacggcuguuuugaguucuaucauaagugcgacaauaccuguauggaaagugugaaaaacggaacauacgauuauccuaaguacuccgaggaggccaaacugaauagagaagagauugacggcgucaaacuugaaagcacuaaaaucuaucagauucuggcuauauacucuaccguggcgucaaguuugguccucgugguuagccugggggcaaucuccuuuuggaugugcucuaacggaucguuacaaugcaggauuuguaucuga

SEQ ID NO: 133148 - RNA, 1701 nt, Artificial Sequence
  derived and/or modified CDS sequence (opt3) from hemagglutinin__InfluenzaA__ADI52837
auggaggccauccuggugguccuccuuuacaccuucgcuacagcaaacgccgacacucugugcauuggcuaucacgcgaauaacagcacggauaccguugacacaguguuggaaaagaauguaacugugacccauuccgucaacuuacuggaggugaaacacaaugggaagcuauguaaacucagaggaguugcuccccugcaucuugguaagugcaacauagccggcuggauccuggggaauccugaaugugagucuuugucaacagcaaguagcugguccuacauuguggaaaccucuucgucagauaacggaacuugcuauccaggcgacuuuaucgauuacgaggagcucagggaacagcugagcagugucuccucuuucgagcgguuugaaauuuucccgaaaacaagcuccuggcccaaucacgacucaaacaagggugugaccgccgcuuguccucaugcaggggccaagaguuuuuauaaaaaucugaucuggcucguaaagaaaggaaacagcuacccaaaguuaucuaaauccuauauaaaugauaagggcaaggagguucuggugcuuuggggcauccaccaccccucaacgagcgcugaccaacagaguuuguaccagaacgccgaugcguacgucuucguggggucuuccaaauauagcaagaaauuuaagccugagauugcaauccgcccaaaagugcgagaccaggaaggacguaugaauuacuauuggacucuggucgagcccggugauaagauuaccuucgaagccaacggcaaccuaguugugccuagauacgcuuuugccauggagaggaaugcagggucgggaaucauaauuucugacacaccaguacaugauugcaacacuaccugucaaacaccgaaaggcgcuaucaauaccucccuccccuuccacaacauucauccuaucacgaucgguaagugcccaaaguaugugaaaucaacuaagcugcggcuugccacagggcugcgcaauguccccaguauucagagcagaggauuguuuggcgcgauagccggcuucaucgaagggggauggaccgguaugguggacggcugguacggguaucaccaccagaacgagcagggauccggcuacgcagcugaccucaaaucuacucaaaaugccauugaugagaucacaaacaagguuaauagcgugauagaaaagaugaacacccaguuuacggcugucgguaaggaguucaaucaucuggaaaagaggauugagaacuuaaauaaaaagguggacgauggguuccuggacaucuggaccuacaacgccgaacuccuuguacuguuggagaaugagcggacacuagauuaucacgacucaaacguuaaaaaccuguacgaaaaggugcgcagucagcucaaaaauaacgcaaaggagaucggcaauggauguuuugaguucuaucauaagugcgauaacacuuguauggaauccgucaaaaauggcaccuacgacuauccuaaguacagcgaagaggccaaacugaaccgagaggaaauugauggggugaaacuugagucuacaaaaaucuaucagauucuggcuauauacucaacugucgcgaguagcuuggugcucguugugucccugggagcaaucucuuuuuggaugugcucgaaugguagcuuacaaugcagaauuuguaucuga

SEQ ID NO: 133149 - RNA, 1701 nt, Artificial Sequence; identical to SEQ ID NO: 131515
  derived and/or modified CDS sequence (opt3) from hemagglutinin__InfluenzaA__ADI72915

SEQ ID NO: 133150 - RNA, 1701 nt, Artificial Sequence; identical to SEQ ID NO: 131515
  derived and/or modified CDS sequence (opt3) from hemagglutinin__InfluenzaA__ADI72916

SEQ ID NO: 133151 - RNA, 1701 nt, Artificial Sequence; identical to SEQ ID NO: 131515
  derived and/or modified CDS sequence (opt3) from hemagglutinin__InfluenzaA__ADI72917

SEQ ID NO: 133152 - RNA, 1701 nt, Artificial Sequence
  derived and/or modified CDS sequence (opt3) from hemagglutinin__InfluenzaA__ADI72918
augaaggccauccuggugguccuccuuuacaccuucgcuacagcaaacgccgacacucugugcauuggcuaucacgcgaauaacagcacggauaccguugacacaguguuggagaagaauguaacugugacccauuccgucaacuuacuggaagauaagcacaaugggaaacuauguaagcucagaggaguggcuccccugcaucuugguaaaugcaacauagccggcuggauccuggggaauccugagugugaaucuuugucaacagcaaguagcugguccuacauuguugagaccucuucgucagacaacggaacuugcuauccaggcgauuuuaucgacuacgaggagcucagggagcagcugagcaguguguccucuuucgaacgguuugagauuuucccgaagacaagcuccuggcccaaucacgauccuaacaagggugucaccgccgcuuguccacaugcaggggccaaaucauuuuauaagaaucugaucuggcucgugaaaaagggaaacaguuaccccaaauuaagcaagucuuauauaaaugaccgcggcaaggaaguacugguucuuuggggcauccaccacccuuccacgucagcugaucaacagagcuuguaccagaacgccgacgcguacguguucgucgggaccagucgauauucuaaaaaguuuaaaccagagauugcaauccgucccaaggugagagaucaggagggaaggaugaauuacuauuggacucugguggaaccuggugacaaaauuacauucgaggccacuggcaaccuagucguuccacgguacgcuuuugccauggaacgcaacgcaggguccggaaucauaauuagcgauaccccggugcaugacugcaauacaaccugucaaacgcccaagggcgcuaucaacacuucgcucccuuuccagaauauucacccaaucacaaucgguaaaugccccaaguauguaaagucuaccaaacugagacuugccacugggcugaggaacgugccuuccauucagucacggggauuguuuggcgcgauagccggcuucaucgaagggggauggacagguauggucgacggcugguacggguaucaucaccagaaugaacaaggaaguggcuacgcagcugaucucaagagcacccagaacgccauugacgagaucacgaauaaagugaacuccguuauagagaagaugaauacccaguuuacagcuguggguaaagaguucaaccaccuggaaaagcgcauugaaaauuuaaacaagaaagucgaugacggguuccuggauaucuggacuuacaaugccgagcuccuugugcuguuggaaaacgagcgaacccuagacuaucaugauucuaauguaaagaaacuguacgagaagguuagaagccagcucaaaaacaacgcaaaggaaaucggcaauggauguuuugaguucuaucacaagugcgacaacacauguauggaaucagugaaaaauggcacuuacgauuauccaaaguacagugaggaagccaaacugaacagggaggagauugacggggucaaacuugaauccacccggaucuaucaaauucuggcuauauacagcacaguggcgucuucauugguccucgugguuagucugggagcaaucagcuuuuggaugugcuccaaugguucuuuacagugccguauuuguaucuga

SEQ ID NO: 133153 - RNA, 1701 nt, Artificial Sequence; identical to SEQ ID NO: 131515
  derived and/or modified CDS sequence (opt3) from hemagglutinin__InfluenzaA__ADI72919

SEQ ID NO: 133154 - RNA, 1701 nt, Artificial Sequence; identical to SEQ ID NO: 131515
  derived and/or modified CDS sequence (opt3) from hemagglutinin__InfluenzaA__ADI72920

SEQ ID NO: 133155 - RNA, 1701 nt, Artificial Sequence
  derived and/or modified CDS sequence (opt3) from hemagglutinin__InfluenzaA__ADI72921
augaaggccauccuggugguccuccuuuacaccuucgcuacagcaaacgccgacacucugugcauuggcuaucacgcgaauaacagcacggauaccguugacacaguguuggagaaaaauguaacugugacccauuccgucaacuuacuggaagauaagcacaaugggaaacuauguaagcucagaggaguggcuccccugcaucuugguaaaugcaacauagccggcuggauccuggggaauccugagugugaaucuuugucaacagcaaguagcugguccuacauuguugagaccucuucgucagacaacggaacuugcuauccaggcgauuuuaucgacuacgaggagcucagggagcagcugagcaguguguccucuuucgaacgguuugagauuuucccgaagacaagcuccuggcccaaucacgauccuaacaagggugucaccgccgcuuguccacaugcaggggccaaaucauuuuauaagaaucugaucuggcucgugaaaaagggaaacaguuaccccaaauuaagcaagucuuauauaaaugacaagggcaaagaaguacugguucuuuggggcauccaccacccuuccacgucagcugaucaacagagcuuguaccagaacgccgacgcguacguguucgucgggacuagccgcuauucuaagaaauuuaagccagagauugcaauccgacccaaagugcgugaucaggagggaagaaugaauuacuauuggacccugguggaaccuggugacaagauuacauucgaggccacuggcaaccuagucguuccaagguacgcuuuugccauggaacggaacgcaggguccggaaucauaauuagcgauaccccggugcaugacugcaauacaaccugucaaacgcccaaaggcgcuaucaacacuucgcucccuuuccagaauauucacccaaucacaaucgguaagugccccaaguauguaaaaucuaccaagcugcgccuugccacugggcugagaaacgugccuuccauucagucaaggggauuguuuggcgcgauagccggcuucaucgaagggggauggacagguauggucgacggcugguacggguaucaucaccagaaugaacaaggaaguggcuacgcagcugaucucaaaagcacccagaacgcccuggacgagauuacgaauaaggugaacuccguuaucgagaaaaugaauacccaguuuacagcuguggguaaggaguucaaccacuuagaaaagcggauagaaaaucugaacaaaaaggucgaugacggguuccucgauauuuggacuuacaaugccgagcuucugguguugcuagaaaacgagcgcacccuggacuaucaugauucuaauguuaaaaaccucuacgagaagguacgaagccagcugaaaaacaaugcaaaggaaaucggcaacggauguuuugaguucuaucacaagugcgacaauacauguauggaaucagugaaaaacggcacuuacgauuauccaaaguacagugaggaagccaaacuuaauagagaggagaucgacggggucaagcuggaauccaccaggauuuaucaaaucuuggcuauuuacagcacaguggcgucuucacucguccuggugguuaguuuaggagcaauaaguuuuuggaugugcuccaacgguucucugcagugccggaucuguauuuga

SEQ ID NO: 133156 - RNA, 1701 nt, Artificial Sequence; identical to SEQ ID NO: 130717
  derived and/or modified CDS sequence (opt3) from hemagglutinin__InfluenzaA__ADI72922

SEQ ID NO: 133157 - RNA, 1701 nt, Artificial Sequence
  derived and/or modified CDS sequence (opt3) from hemagglutinin__InfluenzaA__ADI72923
augaaggccauccuggugguccuccuuuacaccuucgcuacaagcaacgcagacacucugugcauuggcuaucacgccaauaacuccacggauaccguugacacaguguuggagaaaaauguaacugugacccauucugucaacuuacuggaagauaagcacaaugggaaacuauguaagcucagaggaguggcgccccugcaucuugguaaaugcaacauagcuggcuggauccuggggaauccugagugugaaucauugaguacagccagcuccuggucuuacauuguugagaccucgucaagcgacaacggaacuugcuauccaggcgauuuuaucgacuacgaggagcucagggagcagcugaguuccgugucuagcuucgaacgguuugagauuuucccgaagacauccucauggcccaaucacgauccuaacaagggugucaccgcagccuguccacaugcuggggcaaaaaguuuuuauaagaaucugaucuggcucgugaaaaagggaaacagcuaccccaaauuaucuaaguccuauauaaaugacaagggcaaagaaguacugguucuuuggggcauccaccacccuucaacgagcgccgaucaacagaguuuguaccagaacgcugacgccuacguguucgucgggacuucucgcuauuccaagaaauuuaagccagagauugcgauccgacccaaagugcgugaucaggagggaagaaugaauuacuauuggacccugguggaaccuggugacaagauuacauucgaggcaacuggcaaccuagucguuccaagguacgccuuugcuauggaacggaacgccgggccgggaaucauaauuagcgauacccccgugcaugacugcaauacaaccugucaaacgccuaaaggcgcaaucaacacuucgcucccauuccagaauauucaccccaucacaaucgguaagugcccuaaguauguaaaaucuaccaagcugcgccuugcuacugggcugagaaacgugccauccauucagucaaggggauuguuuggcgccauagcgggcuucaucgaagggggauggacagguauggucgacggcugguacggguaucaucaccagaaugaacaaggaaguggcuacgccgcagaucucaaaagcacccagaacgcuauugacgagaucacgaauaaggugaacuccguuauagagaaaaugaauacccaguuuacagccguggguaaggaguucaaccaccuggaaaagcggauugaaaauuuaaacaaaaaggucgaugacggguuccuggauaucuggacuuacaaugcugagcuccuugugcuguuggaaaacgagcgcacccuagacuaucaugauucuaauguaaagaaccuguacgagaagguucgaagccagcucaaaaacaaugccaaggaaaucggcaacggauguuuugaguucuaucacaagugcgacaauacauguauggaaucagugaaaaacggcacuuacgauuaucccaaguacagugaggaagcaaaacugaauagagaggagauugacggggucaaacuugaauccaccaggaucuaucaaauucuggccauauacagcacaguggcuucuucauugguccucgugguuagucugggagcgaucagcuuuuggaugugcuccaacgguucuuuacagugccggauuuguaucuga

SEQ ID NO: 133158 - RNA, 1701 nt, Artificial Sequence; identical to SEQ ID NO: 131515
  derived and/or modified CDS sequence (opt3) from hemagglutinin__InfluenzaA__ADI72924

SEQ ID NO: 133159 - RNA, 1701 nt, Artificial Sequence; identical to SEQ ID NO: 130717
  derived and/or modified CDS sequence (opt3) from hemagglutinin__InfluenzaA__ADI72925

SEQ ID NO: 133160 - RNA, 1701 nt, Artificial Sequence
  derived and/or modified CDS sequence (opt3) from hemagglutinin__InfluenzaA__ADI72926
augaaggccauccuggugguccuccuuuacaccuucgcuacagcaaacgccgacacucugugcauuggcuaucacgcgaauaacagcacggauaccguugacacaguguuggagaaaaauguaacugugacccauuccgucaacuuacuggaagauaagcacaaugggaaacuauguaagcucagaggaguggcuccccugcaucuugguaaaugcaacauagccggcuggauccuggggaauccugagugugaaucuuugucaacagcaaguagcugguccuacauuguugagaccucuucgucagacaacggaacuugcuauccaggcgauuuuaucgacuacgaagaacucagggagcagcugagcaguguguccucuuucgaacgguuugagauuuucccgaagacaagcuccuggcccaaucacgauccuaacaagggugucaccgccgcuuguccacaugcaggggccaaaucauuuuauaagaaucugaucuggcucgugaaaaagggaaacaguuaccccaaauuaagcaagucuuauauaaaugacaagggcaaagaaguacugguucuuuggggcauccaccacccuuccacgucagcugaucaacagagcuuguaccagaacgccgacgcguacguguucgucgggaccaguggauauucuaagaaauuuaagccagagauugcaauccgccccaaagugcgagaucaggagggucguaugaauuacuauuggacucugguggaaccuggcgacaagauuacauucgaggccacugggaaccuagucguuccaagauacgcuuuugccauggaaaggaacgcaggauccggcaucauaauuagcgauaccccggugcaugacugcaauacaaccugucaaacgcccaaaggugcuaucaacacuucgcucccuuuccagaauauucacccaaucacaaucgggaagugccccaaguauguaaaaucuaccaagcugcggcuugccacuggacugcgcaacgugccuuccauucagucaagaggcuuguuuggcgcgauagccggguucaucgagggagguuggacaggcauggucgacgggugguacggauaucaucaccagaaugaacaaggcagugguuacgcagcugaucucaaaagcacccagaacgccauugacgagaucacgaauaaggugaacuccguuauagagaaaaugaauacccaguuuacagcuguggggaaggaguucaaccaccuggagaagaggauugaaaauuuaaacaaaaaggucgaugacggcuuccuggauaucuggacuuacaaugccgagcuccuugugcuguuggaaaacgagcggacccuagacuaucaugauucuaauguaaagaaccuguacgagaagguucgcagccagcucaaaaacaaugcaaaggaaaucggaaacggcuguuuugaguucuaucacaagugcgacaauacauguauggaaucagugaaaaacgggacuuacgauuauccaaaguacagugaggaagccaaacugaaucgagaggagauugacggagucaaacuugaauccaccagaaucuaucaaauucuggcuauauacagcacaguggcgucuucauugguccucgugguuagucugggugcaaucagcuuuuggaugugcuccaacggcucuuuacagugcaggauuuguaucuga

SEQ ID NO: 133161 - RNA, 1701 nt, Artificial Sequence
  derived and/or modified CDS sequence (opt3) from hemagglutinin__InfluenzaA__ADI72927
augaaggccauccuggugguccuccuuuacaccuucgcuacagcaaacgccgacacucugugcauuggcuaucacgcgaauaacagcacggauaccguugacacaguguuggagaaaaauguaacugugacccauuccgucaacuuacuggaagauaagcacaaugggaaacuauguaagcucagaggaguggcuccccugcaucuugguaaaugcaacauagccggcuggauccuggggaauccugagugugaaucuuugucaacagcaaguagcugguccuacauuguugagaccucuucgucagacaacggaacuugcuauccaggcgauuuuaucgacuacgaggagcucagggagcagcugagcaguguguccucuuucgaacgguuugagauuuucccgaagacaagcuccuggcccaaucacgauccuaacaagggugucaccgccgcuuguccacaugcaggggccaaaucauuuuauaagaaucugaucuggcucgugaaaaagggaaacaguuaccccaaauuaagcaagucuuauauaaaugacaagggcaaagaaguacugguucuuuggggcauccaccacccuuccacgucagcugaucaacagagcuuguaccagaacgccgacgcguacguguucgucgggacuagccgcuauucuaagaaauuuaagccagagauugcaauccgacccaaagugcgugaucaggagggaagaaugaauuacuauuggacccugguggaaccuggugacaagauuacauucgaggccacuggcaaccuagucguuccaagguacgcuuuugccauggaacggaacgcaggguccggaaucauaaccagcgauacaccggugcaugacugcaauaccacgugucaaacucccaaaggcgcuauuaacacaucgcucccuuuccagaauauccacccaauuaccaucgguaagugccccaaguauguaaaaucuacuaagcugcgccuugccacagggcugagaaacgugccuuccauccagucaaggggauuguuuggcgcgauugccggcuucauagaagggggauggaccgguauggucgacggcugguacggguaucaucaccagaaugaacaaggaaguggcuacgcagcugaucucaaaagcacgcagaacgccaucgacgagauuaccaauaaggugaacuccguuaucgagaaaaugaauacacaguuuacugcuguggguaaggaguucaaccaccuggaaaagcggauagaaaauuuaaacaaaaaggucgaugacggguuccuggauauuuggaccuacaaugccgagcuccuugugcuguuggaaaacgagcgcacacuagacuaucaugauucuaauguaaagaaccuguacgagaagguucgaagccagcucaaaaacaaugcaaaggaaaucggcaacggauguuuugaguucuaucacaagugcgacaauacuuguauggaaucagugaaaaacggcaccuacgauuauccaaaguacagugaggaagccaaacugaauagagaggagaucgacggggucaaacuugaauccacaaggauuuaucaaauccuggcuauuuacagcaccguggcgucuucauugguccucgugguuagucugggagcaauaaguuuuuggaugugcuccaacgguucuuuacagugccggaucuguauuuga

SEQ ID NO: 133162 - RNA, 1701 nt, Artificial Sequence
  derived and/or modified CDS sequence (opt3) from hemagglutinin__InfluenzaA__ADI72928
augaaggccauccuggugguccuccuuuacaccuucgcuacagcaaacgccgacacucugugcauuggcuaucacgcgaauaacagcacggauaccguugacacaauauuggagaaaaaugugacuguaacccauuccgugaacuuacuggaagauaagcacaaugggaaacuauguaagcucagaggagucgcuccccugcaucuugguaaaugcaacaucgccggcuggauucuggggaauccugagugugaaucuuugucaacagcaaguagcugguccuacaucguggagaccucuucgucagacaacggaacuugcuauccaggcgauuuuauugacuacgaggagcucagggagcagcugagcaguguuuccucuuucgaacgguuugagaucuucccgaagacaagcuccuggcccaaucacgauccuaacaagggugugaccgccgcuuguccacaugcaggggccaaaucauuuuauaagaaucugauauggcucgucaaaaagggaaacaguuaccccaaauuaagcaagucuuauaucaaugacaagggcaaagaagugcugguacuuuggggcauucaccacccuuccacgucagcugaucaacagagcuuguaccagaacgccgacgcguacguuuucguggggaccagucgcuauucuaagaaauuuaagccagagaucgcaauucgacccaaaguccgugaucaggagggaagaaugaauuacuauuggacucugguggaaccuggugacaagaucacauucgaggccacuggcaaccuaguggucccaagguacgcuuuugccauggaacggaacgcaggguccggaauaauuaucagcgauaccccgguucaugacugcaauacaaccugucaaacgcccaaaggcgcuauuaacacuucgcucccuuuccagaauauccacccaaucacaauugguaagugccccaaguaugugaaaucuaccaagcugcgccuugccacugggcugagaaacguaccuuccauacagucaaggggauuguuuggcgcgaucgccggcuucauugaagggggauggacagguaugguggacggcugguacggguaucaucaccagaaugaacaaggaaguggcuacgcagcugaucucaaaagcacccagaacgccaucgacgagauaacgaauaaggucaacuccgugauugagaaaaugaauacccaguuuacagcuguugguaaggaguucaaccaccuggaaaagcggaucgaaaauuuaaacaaaaagguggaugacggguuccuggauaucuggacuuacaaugccgagcuccuuguccuguuggaaaacgagcgcacccuagacuaucaugauucuaaugugaaaaaccuguacgagaagguacgaagccagcucaaaaacaaugcaaaggaaauuggcaacggauguuuugaguucuaucacaagugcgacaauacauguauggaaucaguuaaaaacggcacuuacgauuauccaaaguacagugaggaagccaaacugaauagaaaggagaucgacggggugaaacuugaguccaccaggauuuaucaaauacuggcuaucuacagcacagucgcgucuucauuggugcucgucgugagucugggagcaauuagcuuuuggaugugcuccaacgguucuuuacagugccggaucuguaucuga

SEQ ID NO: 133163 - RNA, 1701 nt, Artificial Sequence; identical to SEQ ID NO: 130717
  derived and/or modified CDS sequence (opt3) from hemagglutinin__InfluenzaA__ADI72929

SEQ ID NO: 133164 - RNA, 1701 nt, Artificial Sequence; identical to SEQ ID NO: 130717
  derived and/or modified CDS sequence (opt3) from hemagglutinin__InfluenzaA__ADI72930

SEQ ID NO: 133165 - RNA, 1701 nt, Artificial Sequence
  derived and/or modified CDS sequence (opt3) from hemagglutinin__InfluenzaA__ADI72931
augaaggccauccuggugguccuccuuuacaccuucgcuacagcaaacgccgacacucugugcauuggcuaucacgcgaauaacagcacggauaccguugacacaguguuggagaaaaauguaacugugacccauuccgucaacuuacuggaagauaagcacaaugggaaacuauguaagcucagaggaguggcuccccugcaucuugguaaaugcaacauagccggcuggauccuggggaauccugagugugaaucuuugucaacagcaaguagcugguccuacauuguugagaccucuucgucagacaacggaacuugcuauccaggcgauuuuaucgacuacgaggagcucagggagcagcugagcaguguguccucuuucgaacgguuugagauuuucccgaagacaagcuccuggcccaaucacgauccuaacaagggugucaccgccgcuuguccacaugcaggggccaaaucauuuuauaagaaucugaucuggcucgugaaaaagggaaacaguuaccccaaauuaagcaagucuuauauaaaugacaagggcaaagaaguacugguucuuuggggcauccaccacccuuccacgucagcugaucaacagagcuuguaccagaacgccgacgcguacguguucgucgggaccagucgcuauucuaagaaauuuaagccagagauugcaauccgacccaaagugcgugaucaggagggaagaaugaauuacuauuggacucugguggaaccuggugacaagauuacauucgaggccacuggcaaccuagucguuccaagguacgcuuuugccauggaacggaacgcaggguccggaaucauaauuagcgauaccccggugcaugacugcaauacaaccugucaaacgcccaaaggcgcuaucaacacuucgcucccuuuccagaauauucacccaaucacaaucgguaagugccccaaguauguaaaaucuaccaagcugcgccuugccacugggcugagaaacgugccuuccauucagucaaggggauuguuuggcgcgauagccggcuucaucgaagggggauggacagguauggucgacggcugguacggguaucaucaccagaaugaacaaggaaguggcuacgcagcugaucucaaaagcacccagaacgccauugacgagaucacgaauaaggugaacuccguuauagagaaaaugaauacccaguuuacagcuguggguaaggaguucaaccaccuggaaaagcggauugaaaauuuaaacaaaaaggucgaugacggguuccuggauaucuggacuuacaaugccgagcuccuugugcuguuggaaaacgagcgcacccuagacuaucaugauucuaauguaaagaaccuguacgagaagguucgaagccagcucaaaaacaaugcaaaggaaaucggcaacggauguuuugaguucuaucacaagugcgacaauacauguauggaaucagugaaaaacggcacuuacgauuauccaaaguacagugaggaagccaaacugaauagagaggagauugacgggaucaaacuugaauccaccaggauuuaucaaauacuggcuaucuacagcacagucgcgucuucauuggugcucgucgugagucugggagcaauuagcuuuuggaugugcuccaacgguucuuuacagugccggaucuguaucuga

SEQ ID NO: 133166 - RNA, 1701 nt, Artificial Sequence; identical to SEQ ID NO: 132373
  derived and/or modified CDS sequence (opt3) from hemagglutinin__InfluenzaA__ADI72932

SEQ ID NO: 133167 - RNA, 1698 nt, Artificial Sequence
  derived and/or modified CDS sequence (opt3) from hemagglutinin__InfluenzaA__ADI75818
augaaggugaaacugcucguccuucugugcaccuucacagccacuuacgcugacacgaucuguauuggcuaucacgcaaacaauagcaccgauacaguugacacuguguuggagaagaacguaaccgugacacauuccgucaauuuacuggaaaacucucacaaugggaaacuaugccuccugaagggaauagcgccccuucagcuggguaacuguucaguggccggcuggaucuuggggaauccugagugcgaacuccugauuaguaaagagagcugguccuacaucguugaaaagccaaacccggagaauggaaccuguuaucccggccauuuugcugauuacgaggaacugagagagcaacucucuucggugagcucauucgaaagguuugagauuuucccuaaggagaguuccuggccaaaccacacugucacaggugugucugccagcugcucccauaauggggaaucaaguuuuuauaaaaacuuacuguggcuuaccgagaagaauggauuguaccccaaccugagcaaaucuuaugcaaauaacaaggaaaaagaggugcuaguucucuggggcgugcaccacccuccauccaucucagaccagaagacgcuguaccauacugaaaacgccuacgucagcguggugaguucucacuauucccggaaguucacccccgagauagcuaaacgcccuaagguccgagaucaggagggccguaucaauuacuauuggacacuucuggaaccaggggacacuauuaucuuugaggcaaacggaaauuugauugccccgagauacgcuuucgcccucagcagggguuuuggcucggggaucauaaacucuaaugcgcccauggauaaaugugacgcaaagugccagaccccucaaggagccauuaacuccucacugccauuccagaauguucaucccgugacaaucggcgaauguccuaaauauguacggagugcuaaguuacgcauggugaccggucugagaaacauuccaagcauccaguccagggggcucuuuggagccaucgcaggcuucauugagggcggguggacgggaauggucgaugguugguacggcuaucaccaccagaaugaacaagggucuggauacgcugccgaccagaaaagcacucagaacgcgauaaauggcaucacaaacaagguaaauucaguuauugagaagaugaacacccaguuuacugccguggguaaagaguucaauaaacuugaacggcgcauggagaaccugaacaaaaaggucgaugacggguucaucgauauauggacauacaaugcagaauugcuagugcugcucgagaacgaacgaacccuggacuuucaugacaguaauguaaagaaccuuuaugagaagguuaagaaucaacugaaaaacaaugcuaaggagauuggcaacggaugcuucgaauuuuaccacaaauguaaugaugagugcauggaauccgugaagaacggcacguaugacuaccccaaauauagcgaggagucuaaguugaauagagaaaagaucgauggggucaaacucgagucaaugggaguguaccagauccuggccauuuauaguaccgucgcuagcuccuuagugcugcuaguuucucucggugccaucucguucuggaugugcagcaacggcucccugcaguguaggauuugcauauga

SEQ ID NO: 133168 - RNA, 1698 nt, Artificial Sequence
  derived and/or modified CDS sequence (opt3) from hemagglutinin__InfluenzaA__ADI75851
augaaggugaaacugcucguccuucugugcaccuucacagccacuuacgcugacacgaucuguauuggcuaucacgcaaacaauagcaccgauacaguugacacuguguuggagaagaacguaaccgugacacauuccgucaauuuacuggaaaacucucacaaugggaaacuaugccuccugaagggaauagcgccccuucagcuggguaacuguucaguggccggcuggaucuuggggaauccugagugcggacuccugauuaguaaagaaagcugguccuacaucguugagaagccaaacccggaaaauggcaccuguuaucccggucauuuugcugauuacgaggagcugagagaacaacucucuucggugagcucauucgagagguuugaaauuuucccuaaggagaguuccuggccaaaccacacugucacaggggugucugccagcugcucccauaauggagagucaaguuuuuaucggaacuuacuguggcuuaccggcaaaaauggcuuguaccccaaccugagcaagucuuaugcaaauaacaaagaaaaggagguucuaguacucuggggagugcaccacccuccaaacaucgucgaccagaaaacgcuguaccgcacugaaaaugccuacguguccguggucucaagccauuauagucgaaaguucacccccgagauagcuaagcguccuaaaguuagagaucaggaagggaggaucaacuacuauuggacacuucuggagccaggugacacuauuaucuuugaggcaaauggcaacuugauugccccgcgguacgcuuucgcccucucucgcggguuuggauccggcaucauaaauagcaacgcgcccauggguaagugugaugcaaaaugccagaccccucaaggggccauuaauucgucucugccauuccagaacgugcaccccguaacaaucggagaauguccuaaguaugugagauccgcuaaauuaaggauggucaccggccugcggaauauuccaucaauccagagucgcggccucuuuggggccaucgcaggauucauugaggguggcuggacggggaugguggacggaugguacggcuaucaucaccagaacgaacaagguagcggguacgcugccgaucagaaguccacucagaaugcgauaaacggcaucacaaauaaaguuaacucugugauugagaagaugaauacccaguuuacugccgucggaaaggaguucaacaaacuugaacgaagaauggagaaccugaauaagaaaguggacgauggcuucaucgacauauggacauacaacgcagaauugcuaguacugcucgagaaugaaaggacccuggauuuucacgacagcaacguuaagaaucuuuaugagaaagugaagucacaacugaagaacaaugcuaaagaaauugggaacggaugcuucgaguuuuaccauaaguguaaugacgagugcauggaaagugucaaaaacgguacguaugauuaccccaaguauuccgaggaaagcaaauugaaucgggagaagaucgacggcgugaagcucgagucuaugggggucuaccagauccuggccauuuauucaaccguggcuaguagcuuaguucugcuagugucccucggagccaucucuuucuggaugugcucgaacggcagccugcagugucguauuugcauauga

SEQ ID NO: 133169 - RNA, 1701 nt, Artificial Sequence; identical to SEQ ID NO: 130482
  derived and/or modified CDS sequence (opt3) from hemagglutinin__InfluenzaA__ADI75884

SEQ ID NO: 133170 - RNA, 1701 nt, Artificial Sequence; identical to SEQ ID NO: 130482
  derived and/or modified CDS sequence (opt3) from hemagglutinin__InfluenzaA__ADI75917

SEQ ID NO: 133171 - RNA, 1698 nt, Artificial Sequence
  derived and/or modified CDS sequence (opt3) from hemagglutinin__InfluenzaA__ADI77349
augaaggugaaacugcucguccuucugugcaccuucacagccacuuacgcugacacgaucuguauuggcuaucacgcaaacaauagcaccgauacaguugacacuguguuggagaagaacguaaccgugacacauuccgucaauuuacuggaaaacucucacaaugggaaacuaugccuccugaagggaauagcgccccuucagcuggguaacuguucaguggccggcuggaucuuggggaauccugagugcgaacuccugauuaguaaagagagcugguccuacaucguugaaaagccaaacccggagaauggaaccuguuaucccggccauuuugcugauuacgaggaacugagagagcaacucucuucggugagcucauucgaaagguuugagauuuucccuaaggagaguuccuggccaaaccacacugucacaggugugucugccagcugcucccauaauggggaaaacucauuuuaucggaauuuacuguggcuuaccggaaagaacggcuuguaccccaaucugaguaagagcuaugcaaacaacaaagagaaggaaguacuaauccucuggggcguucaccacccuccaaauauggccgaccagaaaacgcuguaccauacugagaacgcuuacgugucugucguguccucacacuauagccgcaaguucacccccgaaauagcaaagcgaccuaaagugcgugaucaggaggggagaaucaauuacuauuggacacuucuggagccaggagacacuauuaucuuugaagccaacgguaauuugauugcuccgagguacgccuucgcgcucagucggggcuuugggucuggaaucauaaacuccaaugcacccauggauaagugugacaccaaaugccagacaccucaaggcgccauuaacagcucgcugccauuccagaauguccaucccguuaccaucggugaguguccuaaguaugugcgcucugcuaaauuaagaaugguaacggggcugaggaacauuccauccauccagucacggggacucuuuggcgccaucgcaggcuucauugaagggggauggacugguaugguggauggcugguacggguaucaccaccagaaugagcaaggaaguggcuacgcugccgaccagaaaagcacacagaacgcgauaaaugguaucaccaacaaagucaauuccgugauugaaaagaugaacacucaguuuacagccguugggaaggaguucaacaaacuugagcgccgaauggaaaaucugaacaagaaaguggaugacggcuucaucgauauauggaccuacaaugcagaguugcuaguccugcucgaaaacgagagaacgcuggacuuucaugacucuaaugugaagaaccuuuaugaaaaaguaaagagccaacugaagaauaacgcuaaagagauuggaaauggcugcuucgaguuuuaccacaaguguaacgaugaaugcauggagucaguuaaaaaugggaccuaugacuaccccaaguauagugaagaguccaaauugaacagggagaagaucgauggagugaagcucgaaagcaugggugucuaccagauccuggccauuuauucuacaguggcuucaaguuuaguccugcuagugagccucggcgccaucuccuucuggaugugcucuaaugggucgcugcagugucggauuugcauauga

SEQ ID NO: 133172 - RNA, 1701 nt, Artificial Sequence; identical to SEQ ID NO: 130717
  derived and/or modified CDS sequence (opt3) from hemagglutinin__InfluenzaA__ADI77360

SEQ ID NO: 133173 - RNA, 1701 nt, Artificial Sequence
  derived and/or modified CDS sequence (opt3) from hemagglutinin__InfluenzaA__ADI99498
augaagaccauccuggugguccuccuuuacacauucgccacugcuaacgcagacacgcugugcauuggcuaucacgccaauaacagcaccgauacaguugacacuguguuggagaaaaauguaaccgugacacauuccgucaacuuacuggaagauaagcacaaugggaaacuauguaagcucagaggaguggcgccccugcaucuugguaaaugcaacauagcuggcuggauccuggggaauccugagugugaaucuuugucaaccgccaguagcugguccuacauuguugagacuucuucgucagacaacggaacaugcuauccaggcgauuuuaucgacuacgaagaacucagggagcagcugagcaguguguccucuuucgaacgguuugagauuuucccgaagaccagcuccuggcccaaucacgauucaaacaagggugucacggcagccuguccucaugcuggggcaaaaaguuuuuauaagaaucugaucuggcucgugaaaaagggaaacagcuacccaaaauuaaauaagucuuauauaaacgacaagggcaaagaaguacugguucuuuggggcauccaccaccccuccacuucagccgaucaacagagcuuguaccagaaugcugacgccuacguguucgucgggaccagucgcuauucuaagaaauuuaagccugagauugcgauccgaccaaaagugcguggacaggaggguagaaugaacuacuauuggacacuggugaagcccggcgauaaaauuacuuucgaagcaaccgggaaccuagucguuccuagguacgccuuugcuauggagcggaaugccggauccggcaucauaauuagcgacacaccagugcaugauugcaacaccacgugucaaacuccgaagggugcaaucaauacaucgcuccccuuccagaacauucacccuaucaccaucgggaagugcccaaaauauguaaagucuacuaaacugcgccuugcuacaggacugagaaaugugcccuccauucagucaaggggcuuguuuggcgccauagcgggguucaucgaaggagguuggaccggcauggucgacgggugguacggauaucaucaccagaacgagcaaggcagugguuacgccgcagaccucaagagcacgcagaaugcuauugaugaaaucaccaacaaaguuaauuccgugauagagaagaugaacacacaguuuacugccguggggaaggaguucaaucaccuggaaaaacggauugagaacuuaaauaagaaagucgacgauggcuuccuggacaucuggaccuacaacgcugaacuccuugugcuguuggagaaugaacgcacacuagauuaucaugacucuaacguaaagaaccuguacgagaaaguucgaagccagcucaagaauaacgccaaggagaucggaaauggcuguuuugaguucuaucacaaaugcgauaacacuuguauggagucagugaagaaugggaccuacgacuauccuaaauacagugaagaggcaaagcugaacagagaagagauugauggagucaaacuugaguccacaaggaucuaucaaauucuggccauauacagcaccguggcuucuucauugguccucgugguuagucugggugcgaucagcuuuuggaugugcuccaauggcucuuuacagugccggauuuguaucuga

SEQ ID NO: 133174 - RNA, 1701 nt, Artificial Sequence
  derived and/or modified CDS sequence (opt3) from hemagglutinin__InfluenzaA__ADI99560
augaaggccauccuggugguccuccuuuacaccuucgcuacagcaaacgccgacacucugugcauuggcuaucacgcgaauaacagcacggauaccguugacacaguguuggagaaaaauguaacugugacccauuccgucaacuuacuggaagauaagcacaaugggaaacuauguaagcucagaggaguggcuccccugcaucuugguaaaugcaacauagccggcuggauccuggggaauccugagugugaaucuuugucaacagcaaguagcugguccuacauuguugagaccucuucgucagacaacggaacuugcuauccaggcgauuuuaucaauuacgaggagcucagggagcagcugagcaguguguccucuuucgaacgguuugagauuuucccgaagacaagcuccuggcccaaccacgacucaaauaagggugucaccgccgcuuguccucaugcaggggccaaaaguuuuuauaagaaccugaucuggcucgugaaaaagggaaauagcuacccaaaauuaucuaaguccuauauaaacgauaagggcaaagaaguacugguucuuuggggcauccaccaccccucaacgagcgcugaccaacagaguuuguaccagaaugccgaugcguacguguucgucgggacuucucgcuauuccaagaaauuuaagccugagauugcaauccgaccaaaagugcgugaccaggagggaagaaugaacuacuauuggacccugguggaacccggugauaagauuacauucgaggccacuggcaaccuagucguuccuagguacgcuuuugccauggaacggaaugcagggagcggaaucauaauuucggacaccccagugcaugauugcaacacaaccugucaaacgccgaaaggcgcuaucaauacuucucuccccuuccagaacauucacccuaucacaaucgguaagugcccaaaguauguaaaauccaccaagcugcgccuugccacugggcugagaaaugugcccucaauucagaguaggggauuguuuggcgcgauagccggcuucaucgaagggggauggacagguauggucgacggcugguacggguaucaucaccagaacgaacaaggaagcggcuacgcagcugaccucaaauccacccagaaugccauugauaagaucacgaacaaaguuaauucugugauagagaagaugaacacccaguuuacagcuguggguaaggaguucaaucaccuggaaaaacggauugagaacuuaaauaagaaagucgacgauggguuccuggacaucuggacuuacaacgccgaacuccuugugcuguuggagaaugaacgcacccuagauuaucaugacagcaacguaaagaaccuguacgagaaaguucgaucacagcucaagaauaacgcaaaggagaucggcaauggauguuuugaguucuaucacaaaugcaacaauacauguauggaaagugugaagaacggcacuuacgauuauccuaaauacuccgaagaggccaagcugaauagagaagagauugacggggucaaacuugagagcaccaggaucuaucaaauucuggcuauauacucuacaguggcgucaaguuugguccucgugguuagccugggagcaaucuccuuuuggaugugcucuaacgguucguuacagugccggauuuguaucuga

SEQ ID NO: 133175 - RNA, 1701 nt, Artificial Sequence; identical to SEQ ID NO: 133174
  derived and/or modified CDS sequence (opt3) from hemagglutinin__InfluenzaA__ADI99570

SEQ ID NO: 133176 - RNA, 1701 nt, Artificial Sequence; identical to SEQ ID NO: 133174
  derived and/or modified CDS sequence (opt3) from hemagglutinin__InfluenzaA__ADI99580

SEQ ID NO: 133177 - RNA, 1701 nt, Artificial Sequence; identical to SEQ ID NO: 132330
  derived and/or modified CDS sequence (opt3) from hemagglutinin__InfluenzaA__ADI99590

SEQ ID NO: 133178 - RNA, 1701 nt, Artificial Sequence
  derived and/or modified CDS sequence (opt3) from hemagglutinin__InfluenzaA__ADI99610
augaaggccauccuggugguccuccuuuacaccuucgcuacagcaaacgccgacacucugugcauuggcuaucacgcgaauaacagcacggauaccguugacacaguguuggagaaaaauguaacugugacccauuccgucaacuuacuggaagauaagcacaaugggaaacuauguaagcucagaggaguggcuccccugcaucuugguaaaugcaacauagccggcuggauccuggggaauccugagugugaaucuuugucaacagcaaguagcugguccuacauuguugagaccucuucgucagacaacggaacuugcuauccaggcgauuuuaucaauuacgaggagcucagggagcagcugagcaguguguccucuuucgaacgguuugagauuuucccgaagacaagcuccuggcccaaccacgacucaaauaagggugucaccgccgcuuguccucaugcaggggccaaaaguuuuuauaagaaccugaucuggcucgugaaaaagggaaauagcuacccaaaauuaucuaaguccuauauaaacgauaagggcaaagaaauccugguacuuuggggcauucaccaccccucaacgagcgcugaccaacagaguuuguaccagaaugccgaugcguacguuuucguggggacuucucgcuauuccaagaaauuuaagccugagaucgcaauucgaccaaaaguccgugaccaggagggaagaaugaacuacuauuggacccugguggaacccggugauaagaucacauucgaggccacuggcaaccuaguggucccuagguacgcuuuugccauggaacggaaugcagggagcggaauaauuaucucggacaccccaguucaugauugcaacacaaccugucaaacgccgaaaggcgcuauuaauacuucucuccccuuccagaacauccacccuaucacaauugguaagugcccaaaguaugugaaauccaccaagcugcgccuugccacugggcugagaaauguacccucaauacagaguaggggauuguuuggcgcgaucgccggcuucauugaagggggauggacagguaugguggacggcugguacggguaucaucaccagaacgaacaaggaagcggcuacgcagcugaccucaaauccacccagaaugccaucgauaagauaacgaacaaagucaauucugugauugagaagaugaacacccaguuuacagcuguugguaaggaguucaaucaccuggaaaaacggaucgagaacuuaaauaagaaaguggacgauggguuccuggacaucuggacuuacaacgccgaacuccuuguccuguuggagaaugaacgcacccuagauuaucaugacagcaacgugaagaaccuguacgagaaaguacgaucacagcucaagaauaacgcaaaggagauuggcaauggauguuuugaguucuaucacaaaugcgauaacacauguauggaaaguguuaagaauggcacuuacgacuauccuaaauacuccgaagaggccaagcugaacagagaagagaucgauggggugaaacuugagagcaccaggauuuaucaaauacuggcuaucuacucuacagucgcgucaaguuuggugcucgucgugagccugggagcaauuuccuuuuggaugugcucuaaugguucguuacagugccggaucuguaucuga

SEQ ID NO: 133179 - RNA, 1701 nt, Artificial Sequence
  derived and/or modified CDS sequence (opt3) from hemagglutinin__InfluenzaA__ADI99620
augaaggccauccuggugguccuccuuuacaccuucgcuacagcaaacgccgacacucugugcauuggcuaucacgcgaauaacagcacggauaccguugacacaguguuggagaaaaauguaacugugacccauuccgucaacuuacuggaagauaagcacaaugggaaacuauguaagcucagaggaguggcuccccugcaucuugguaaaugcaacauagccggcuggauccuggggaauccugagugugaaucuuugucaacagcaaguagcugguccuacauuguugagaccucuucgucagacaacggaacuugcuauccaggcgauuuuaucaauuacgaggagcucagggagcagcugagcaguguguccucuuucgaacgguuugagauuuucccgaagacaagcuccuggcccaaccacgacucaaauaagggugucaccgccgcuuguccucaugcaggggccaaaaguuuuuauaagaaccugaucuggcucgugaaaaagggaaauagcuacccaaaauuaucuaaguccuauauaaacgauaagggcaaagaaguacugguucuuuggggcauccaccaccccucaacgagcgcugaccaacagaguuuguaccagaaugccgaugcguacguguucgucgggacuucucgcuauuccaagaaauuuaagccugagauugcaauccgaccaaaagugcgugaccaggagggaagaaugaacuacuauuggacccugguggaacccggugauaagauuacauucgaggccacuggcaaccuagucguuccuagguacgcuuuugccauggaacggaaugcagggagcggaaucauaauuaccgacacaccagugcaugauugcaacaccacgugucaaacuccgaaaggcgcuaucaauacaucgcuccccuuccagaacauucacccuaucaccaucgguaagugcccaaaguauguaaaaucuacuaagcugcgccuugccacagggcugagaaaugugcccuccauucagucaaggggauuguuuggcgcgauagccggcuucaucgaagggggauggaccgguauggucgacggcugguacggguaucaucaccagaacgaacaaggaaguggcuacgcagcugaccucaaaagcacgcagaaugccauugauaagaucaccaacaaaguuaauuccgugauagagaagaugaacacacaguuuacugcuguggguaaggaguucaaucaccuggaaaaacggauugagaacuuaaauaagaaagucgacgauggguuccuggacaucuggaccuacaacgccgaacuccuugugcuguuggagaaugaacgcacacuagauuaucaugacucuaacguaaagaaccuguacgagaaaguucgaagccagcucaagaauaacgcaaaggagaucggcaauggauguuuugaguucuaucacaaaugcgauaacacuuguauggaaucagugaagaauggcaccuacgacuauccuaaauacagugaagaggccaagcugaacagagaagagauugauggggucaaacuugaguccacaaggaucuaucaaauucuggcuauauacagcaccguggcgucuucauugguccucgugguuagucugggagcaaucagcuuuuggaugugcuccaaugguucuuuacagugccggauuuguaucuga

SEQ ID NO: 133180 - RNA, 1701 nt, Artificial Sequence
  derived and/or modified CDS sequence (opt3) from hemagglutinin__InfluenzaA__ADI99630
augaaggccauccuggugguccuccuuuacaccuucgcuacagcaaacgccgacacucugugcauuggcuaucacgcgaauaacagcacggauaccguugacacaguguuggagaaaaauguaacugugacccauuccgucaacuuacuggaagauaagaauaacgggaaacuauguaagcucagaggaguggcuccccugcaccuugguaaaugcaauauagccggcuggauccuggggaacccugagugugaaucuuugucaacagcaaguagcugguccuacauuguugagaccucuucgucagacaauggaacuugcuauccaggcaacuuuaucgauuacgaggagcucagggagcagcugagcaguguguccucuuucgaacgguuugagauuuucccgaagacaagcuccuggcccaaucaugacucaaacaagggugucaccgccgcuuguccucacgcaggggccaaaaguuuuuauaagaaucugaucuggcucgugaaaaagggaaacagcuacccaaaauuaucuaaguccuauauaaaugauaagggcaaagaaguacugguucuuuggggcauccaucaccccucaacgagcgcugaccaacagaguuuguaccagaacgccgaugcguacguguucgucgggacuucucgcuauuccaagaaauuuaagccugagauugcaauccgaccaaaagugcgugaccaggagggaagaaugaacuacuauuggacccugguggaacccggugauaagauuacauucgaggccacuggcaaucuagucguuccuagguacgcuuuugccauggaacggaacgcagggagcggaaucauaauuucggacaccccagugcacgauugcaauacaaccugucaaacgccgaaaggcgcuaucaacacuucucuccccuuccagaauauucauccuaucacaaucgguaagugcccaaaguauguaaaauccaccaagcugcgccuugccacugggcugagaaacgugcccucaauucagaguaggggauuguuuggcgcgauagccggcuucaucgaagggggauggacagguauggucgacggcugguacggguaucaccaucagaaugaacaaggaagcggcuacgcagcugaccucaaauccacccagaacgccauugauaagaucacgaauaaagugaacucuguuauagagaagaugaauacccaguuuacagcuguggguaaggaguucaaccaccuggaaaaacggauugagaauuuaaacaagaaagucgacgauggguuccuggacaucuggacuuacaaugccgaacuccuugugcuguuggagaacgaacgcacccuagauuaucacgacagcaacguaaagaaucuguacgagaaaguucgaucacagcucaagaacaaugcaaaggagaucggcaacggauguuuugaguucuaucauaaaugcgauaauacauguauggaaagugugaagaacggcacuuacgacuauccuaaauacuccgaagaggccaagcugaauagagaagagauugauggggucaaacuugagagcaccaggaucuaucaaauucuggcuauauacucuacaguggcgucaaguuugguccucgugguuagccugggagcaaucuccuuuuggaugugcucuaacgguucguuacagugccggauuuguaucuga

SEQ ID NO: 133181 - RNA, 1701 nt, Artificial Sequence
  derived and/or modified CDS sequence (opt3) from hemagglutinin__InfluenzaA__ADI99640
augaaggccauccuggugguccuccuuuacaccuucgcuacagcaaacgccgacacucugugcauuggcuaucacgcgaauaacagcacggauaccguugacacaguguuggagaaaaauguaacugugacccauuccgucaacuuacuggaagauaagcacaaugggaaacuauguaagcucagaggaguggcuccccugcaucuugguaaaugcaacauagccggcuggauccuggggaauccugagugugaaucuuugucaacagcaaguagcugguccuacauuguugagaccucuucgucagacaacggaacuugcuauccaggcgauuuuaucgacuacgaagaacucagggagcagcugagcaguguguccucuuucgaacgguuugagauuuucccgaagacaagcuccuggcccaaucacgauucaaacaagggugucaccgccgcuuguccucaugcaggggccaaaaguuuuuauaagaaucugaucuggcucgugaaaaagggaaacagcuacccaaaauuaucuaaguccuauauaaaugacaagggcaaagaaguacugguucuuuggggcauccaccaccccucaacgagcacugaucaacagaguuuguaccagaacgcugacucuuacguguucgucgggaccucccgcuauagcaagaaauuuaagccugagauugccauccgaccaaaagugcgugaucaggagggaagaaugaauuacuauuggacacugguggaacccggugacaagauuacuuucgaggcgaccggcaaccuagucguuccuagguacgcauuugccauggaacggaacgcugggucgggaaucauaauuucugauacaccaauccaugacugcaauaccacgugucaaacuccggagggcgccauuaacacaucccuccccuuccagaauauccacccuaucaccauugguaaaugcccaaaguaugugaagucaacuaaacugcgccuugcaacagggcugagaaacguacccaguauacagagcaggggauuguuuggcgcuaucgccggcuucauugaagggggauggaccgguaugguggacggcugguacggguaucaucaccagaaugagcaaggauccggcuacgcggccgaucucaagucuacgcagaacgcaaucgacgagauaaccaauaaagucaacagcgugauugaaaagaugaauacacaguuuacugcuguugguaaagaguucaaccaccuggaaaagcggaucgagaauuuaaacaagaaaguggaugacggguuccuggauaucuggaccuacaaugccgaacuccuuguccuguuggagaacgagcgcacacuagacuaucaugauucaaaugugaagaaccuguacgaaaaaguacgaagucagcucaagaacaaugcuaaagagauuggcaacggauguuuugaguucuaucacaagugcgacaauacuuguauggaguccguuaagaacggcaccuacgauuauccuaaauacagcgaagaggccaagcugaauagagaggaaaucgacggggugaaacuugagucuacaaggauuuaucaaauacuggcaaucuacucaaccgucgccaguagcuuggugcucgucgugucccugggagcuauuucuuuuuggaugugcucgaacgguagcuuacagugccggaucuguaucuga

SEQ ID NO: 133182 - RNA, 1701 nt, Artificial Sequence; identical to SEQ ID NO: 132269
  derived and/or modified CDS sequence (opt3) from hemagglutinin__InfluenzaA__ADI99660

SEQ ID NO: 133183 - RNA, 1701 nt, Artificial Sequence
  derived and/or modified CDS sequence (opt3) from hemagglutinin__InfluenzaA__ADI99670
augaaggccauccuggugguccuccuuuacaccuucgcuacagcaaacgccgacacucugugcauuggcuaucacgcgaauaacagcacggauaccguugacacaguguuggagaaaaauguaacugugacccauuccgucaacauauuagaagauaagcacaaugggaaacuguguaagcuaagaggaguggcuccccuccaucuggguaaaugcaacaucgccggcuggauucuugggaauccugagugugaaucucugucaacagcaaguagcugguccuacaucguugagaccucuucgucagacaacggaacuugcuauccaggcgauuuuauugacuacgaagaguugagggagcagcucagcaguguguccucuuucgaacgguuugagaucuucccgaagacaagcuccuggcccaaucacgauucaaacaagggugucaccgccgcuuguccucaugcaggggccaaaaguuuuuauaagaaucugauauggcuggugaaaaagggaaacagcuacccaaaacucucuaaguccuauaucaaugacaagggcaaagaaguauuaguucuguggggcauucaccaccccucaacgagcgcugaucaacagagucuuuaccagaacgccgacgcguacguguucgucgggacuucucgcuauuccaagaaauuuaagccugagaucgcaauucgaccaaaagugcgugaucaggagggaagaaugaauuacuauuggaccuugguggaacccggugacaagaucacauucgaggccacuggcaaccuggucguuccuagguacgcuuuugccauggaacggaacgcagggagcggaauaauuaucucggauaccccagugcaugacugcaauacaaccugucaaacgccgaaaggcgcuauuaacacuucucuacccuuccagaauauccacccuaucacaauugguaagugcccaaaguauguaaaauccaccaagcuccgccuggccacugggcuuagaaacgugcccucaauacagaguaggggacuguuuggcgcgaucgccggcuucauugaagggggauggacagguauggucgacggcugguacggguaucaucaccagaaugaacaaggaagcggcuacgcagcugauuugaaauccacccagaacgccaucgacgagauaacgaauaaggugaacucuguuauugagaaaaugaauacccaguuuacagcuguggguaaggaguucaaccaccucgagaagcggaucgaaaaucugaacaaaaaggucgaugacggguucuuagauaucuggacuuacaaugccgagcugcucgugcuucuggaaaacgagcgcaccuuggacuaucaugauagcaauguuaaaaaccuauacgagaagguacgaucacagcugaaaaacaaugcaaaggaaauuggcaacggauguuuugaguucuaucacaagugcgacaauacauguauggaaagugugaaaaacggcacuuacggguauccuaaguacuccgaggaagccaaacucaauagagaggagaucgauggagucaagcuggaaagcaccaggauuuaucaaauacuugcuaucuacucuacaguggcgucaagucuggucuuggugguuagccucggugcaauuuccuuuuggaugugcucuaacggcucgcugcagugccggaucuguaucuga

SEQ ID NO: 133184 - RNA, 1701 nt, Artificial Sequence
  derived and/or modified CDS sequence (opt3) from hemagglutinin__InfluenzaA__ADI99680
augaaggccauccuggugguccuccuuuacaccuucgcuacagcaaacgccgacacucugugcauuggcuaucacgcgaauaacagcacggauaccguugacacaguguuggagaaaaauguaacugugacccauuccgucaacauauuagaagauaagcacaaugggaaacuguguaagcuaagaggaguggcuccccuccaucuggguaaaugcaacaucgccggcuggauucuugggaauccugagugugaaucucugucaacagcaaguagcugguccuacaucguugagaccucuucgucagacaacggaacuugcuauccaggcgauuuuauugacuacgaagaguugagggagcagcucagcaguguguccucuuucgaacgguuugagaucuucccgaagacaagcuccuggcccaaucacgauucaaacaagggugucaccgccgcuuguccucaugcaggggccaaaaguuuuuauaagaaucugauauggcuggugaaaaagggaaacagcuacccaaaacucucuaaguccuauaucaaugacaagggcaaagaaguauuaguucuguggggcauucaccaccccucaacgagcgcugaucaacagagucuuuaccagaacgccgacgcguacguguucgucgggacuucucgcuauuccaagaaauuuaagccugagaucgcaauucgaccaaaagugcgugaucaggagggaagaaugaauuacuauuggaccaucguggaacccggugacaagauaacauucgaggccacuggcaacuuggucguuccuagguacgcuuuugccauggaacggaacgcagggagcggaauuaucauuucggauaccccagugcaugacugcaauacaaccugucaaacgccgaaaggcgcuaucaacacuucucugcccuuccagaauauccacccuauuacaauagguaagugcccaaaguauguaaaauccaccaagcuacgccucgccacugggcugagaaacgugcccucaauccagaguaggggacuuuuuggcgcgauugccggcuucaucgaagggggauggacagguauggucgacggcugguacggguaucaucaccagaaugaacaaggaagcggcuacgcagcugaucugaaauccacccagaacgccauagacgagauuacgaauaaggugaacucuguuaucgagaaaaugaauacccaguuuacagcuguggguaaggaguucaaccacuuggagaagcggaucgaaaaucucaacaaaaaggucgaugacggguuccuggauauuuggacuuacaaugccgaguuacuggugcuccuugaaaacgagcgcacccuggacuaucaugauagcaauguuaaaaacuuguacgagaagguacgaucacagcugaaaaacaaugcaaaggaaaucggcaacggauguuuugaguucuaucacaagugcgacaauacauguauggaaagugugaaaaacggcacuuacgauuauccuaaguacuccgaggaagccaaacuaaauagagaggagauugacggggucaagcucgaaagcaccaggauauaucaaauccuggcuauuuacucuacaguggcgucaagucuuguccuggugguuagcuugggagcaaucuccuuuuggaugugcucuaacgguucgcuccagugccggaucuguauuuga

SEQ ID NO: 133185 - RNA, 1701 nt, Artificial Sequence
  derived and/or modified CDS sequence (opt3) from hemagglutinin__InfluenzaA__ADI99690
augaaggccauccuggcugugcuccuuuacaccuucgcaauugccaacgcggacacacugugcauaggcuaucacgcuaauaacagcacugauacggucgacaccguuuuggagaaaaaugugacaguaacucauuccgugaacaucuuagaagauaagcacaaugggaaacuguguaagcuaagaggagucgcaccccuccaucuggguaaaugcaacauugccggcuggauccuugggaauccugagugugaaucucugucaaccgccaguagcugguccuacauuguggagacaucuucgucagacaacggaaccugcuauccaggcgauuuuaucgacuacgaagaguugagggagcagcucagcaguguuuccucuuucgaacgguuugagauauucccgaagacuagcuccuggcccaaucacgauucaaacaagggugugacagcugcauguccucaugccggggcuaaaaguuuuuauaagaaucugaucuggcuggucaaaaagggaaacagcuacccaaaacucucuaaguccuauauuaaugacaagggcaaaaagguguuaguacuguggggcauccaccaccccucaaccagcgccgaucaacagagucuuuaccagaacgcggacgcauacguuuucguggggacgucucgcuauuccaaaaaguuuaaaccugaaauugccauccgaccaaagguccgugaucaggagggaagaaugaauuacuauuggacuuugguggagcccggugacaaaauaaccuucgaagcuacaggcaaccugguggucccuagguacgccuuugcaauggagcggaacgcugggagcggaauuaucauuucggauacuccaguucaugacugcaauaccacaugucaaaccccgaagggcgccaucaacacgucucuacccuuccagaauauccacccuauuacuauagguaagugcccaaaauaugugaaguccacaaaacuccgccuggcgaccgggcuuagaaacguacccucaauccagaguaggggacuguuuggcgccauugcaggcuucaucgaagggggauggacugguaugguggacggcugguacggguaucaucaccagaaugagcaaggaagcggcuacgcugccgauuugaaguccacacagaacgcuauagacgaaauuaccaauaaagucaacucugugaucgagaagaugaauacgcaguuuaccgccguugguaaggaguucaaccaccucgaaaaacggaucgagaaucugaacaagaaaguggaugacggguucuuagauauuuggacauacaaugcagaacugcucguccuucuggagaacgaacgcacuuuggacuaucaugauagcaaugugaagaaccuauacgagaaaguacgaucacagcugaagaacaaugccaaggagaucggcaacggauguuuugaguucuaucacaaaugcgacaauaccuguauggaaaguguuaagaacggcacauacgauuauccuaaauacuccgaagaggcuaagcucaauagagaagagauugacggggugaaacuggagagcacuaggauauaucaaauccuugcgauuuacucuaccgucgcaucaagucugguguuggucgugagccucggagccaucuccuuuuggaugugcucuaacgguucgcugcagugccggaucuguauuuga

SEQ ID NO: 133186 - RNA, 1701 nt, Artificial Sequence
  derived and/or modified CDS sequence (opt3) from hemagglutinin__InfluenzaA__ADI99700
augaaggccauccuggugguccuccuuuacaccuucgcuacagcaaacgccgacacucugugcauuggcuaucacgcgaauaacagcacggauaccguugacacaguguuggagaaaaauguaacugugacccauuccgucaacuuacuggaagauaagcacaaugggaaacuauguaagcucagaggagugucuccccugcaucuugguaaaugcaacauagcuggcuggauccuggggaauccugagugugaaucauugaguacagccagcuccuggucuuacauuguugagaccucgucaagcgacaacggaacuugcuauccaggcgauuuuaucgacuacgaggagcucagggagcagcugaguuccgugucuagcuucgaacgguuugagauuuucccgaagacauccucauggcccaaucacgauaguaacaagggugucaccgcagccuguccucaugcuggggcaaagagcuuuuauaagaaucugaucuggcucgugaaaaagggaaacucuuacccaaaauuauccaagucauauauaaaugacaagggcaaagaaguacugguucuuuggggcgugcaccaccccagcacgagugccgaucaacagucuuuguaccagaacgcugacgccuacgucuucguggggacuucccgcuauagcaagaaauuuaagccugagaucgcgauucgaccaaaagugcgugaucaggagggaagaaugaauuacuauuggacccuggucgaacccggugacaagaucacauucgaggcaacuggcaaccuaguugccccuagguacgcuuuugccauggaacggaacgcagggucgggaauuaucauaucugauaccccagugcaugacugcaauacaaccugucaaacgccgaaaggcgcuauuaacacuucccuccccuuccagaauauccacccuauuacaaucgguaagugcccaaaguauguaaaaucaaccaagcugcgccuugccacugggcugagaaacgugcccaguauccagagcaggggauuguuuggcgcgauugccggcuucauagaagggggauggacagguauggucgacggcugguacggguaucaucaccagaaugaacaaggauccggcuacgcagcugaucucaaaucuacccagaacgccaucgacgagauuacgaauaaggugaacagcguuaucgagaaaaugaauacccaguuuacagcuguggguaaggaguucaaccaccuggaaaagcggauagaaaauuuaaacaaaaaggucgaugacggguuccuggauauuuggacuuacaaugccgagcuccuugugcuguuggaaaacgagcgcacccuagacuaucaugauucaaauguuaaaaaccuguacgagaagguacgaagucagcucaaaaacaaugcaaaggaaaucggcaacggauguuuugaguucuaucacaagugcgacaauacauguauggaauccgugaaaaacggcacuuacgauuauccuaaguacagcgaggaagccaaacugaauagagaggagaucgacggggucaaacuugaaucuaccaggauuuaucaaauccuggcuauuuacucaacaguggcgaguagcuugguccucgugguuucccugggagcaauaucuuuuuggaugugcucgaacgguagcuuacagugccggaucuguauuuga

SEQ ID NO: 133187 - RNA, 1701 nt, Artificial Sequence; identical to SEQ ID NO: 132366
  derived and/or modified CDS sequence (opt3) from hemagglutinin__InfluenzaA__ADI99710

SEQ ID NO: 133188 - RNA, 1701 nt, Artificial Sequence
  derived and/or modified CDS sequence (opt3) from hemagglutinin__InfluenzaA__ADI99720
augaaggccauccuggugguccuccuuuacaccuucgcuacagcaaacgccgacacucugugcauuggcuaucacgcgaauaacagcacggauaccguugacacaguguuggagaaaaauguaacugugacccauuccgucaacuuacuggaagauaagcacaaugggaaacuauguaagcucagaggaguggcuccccugcaucuugguaaaugcaacauagccggcuggauccuggggaauccugagugugaaucuuugucaacagcaaguagcugguccuacauuguugagaccucuucgucagacaacggaacuugcuauccaggcgauuuuaucgacuacgaagaacucagggagcagcugagcaguguguccucuuucgaacgguuugagauuuucccgaagacaagcuccuggcccgaucacgacucaaauaagggugucaccgccgcuuguccucaugcaggggccaaaaguuuuuauaagaaccugaucuggcucgugaaaaagggaaauagcuacccaaaauuaucuaaguccuauauaaacgauaagggcaaagaaguacugguucuuuggggcauccaccaccccucaacgagcgcugaccaacagaguuuguaccagaaugccgaugcguacguguucgucgggacuucucgcuauuccaagaaauuuaagccugagauugcaauccgaccaaaagugcguggacaggaggguagaaugaacuacuauuggacccugguggaacccggcgacaagauuacauucgaggccacugggaaucuagucguuagcagguacgcuuuugccauggaacggaacgcaggaucgggcaucauaauuucugauaccccugugcaugacugcaacacaaccugucaaacgccaaaaggugcuaucaauacuucccucccguuccagaacauucaccccaucacaaucgggaagugcccuaaguauguaaaaucaaccaagcugcgccuugccacuggacugagaaaugugccaaguauucagagcaggggcuuguuuggcgcgauagccggguucaucgagggagguuggacaggcauggucgacgggugguacggauaucaucaccagaacgaacaaggcuccgguuacgcagcugaucucaaaucuacccagaaugccauugacgagaucacgaacaaggugaauagcguuauagagaaaaugaacacccaguuuacagcuguggggaaggaguucaaucaccuggagaagcggauugaaaacuuaaauaaaaaggucgaugacggcuuccuggauaucuggacuuacaacgccgagcuccuugugcuguuggaaaaugagcgcacccuagacuaucaugauucaaacguaaagaaucuguacgagaagguucgaagucagcucaaaaacaacgcaaaggaaaucggaaauggcuguuuugaguucuaucacaagugcgacaacacauguauggaauccgugaaaaaugggacuuacgauuaucccaaguacagcgaggaagccaaacugaacagagaggagauugacggagucaaacuugaaucuaccaggaucuaucaaauucuggcuauauacucaacaguggcgaguagcuugguccucgugguuucccugggugcaaucucuuuuuggaugugcucgaauggcagcuuacagugccggauuuguaucuga

SEQ ID NO: 133189 - RNA, 1701 nt, Artificial Sequence; identical to SEQ ID NO: 130717
  derived and/or modified CDS sequence (opt3) from hemagglutinin__InfluenzaA__ADI99730

SEQ ID NO: 133190 - RNA, 1701 nt, Artificial Sequence; identical to SEQ ID NO: 130717
  derived and/or modified CDS sequence (opt3) from hemagglutinin__InfluenzaA__ADJ00497

SEQ ID NO: 133191 - RNA, 1701 nt, Artificial Sequence; identical to SEQ ID NO: 130717
  derived and/or modified CDS sequence (opt3) from hemagglutinin__InfluenzaA__ADJ00498

SEQ ID NO: 133192 - RNA, 1701 nt, Artificial Sequence; identical to SEQ ID NO: 131911
  derived and/or modified CDS sequence (opt3) from hemagglutinin__InfluenzaA__ADJ00501

SEQ ID NO: 133193 - RNA, 1701 nt, Artificial Sequence; identical to SEQ ID NO: 131881
  derived and/or modified CDS sequence (opt3) from hemagglutinin__InfluenzaA__ADJ18163

SEQ ID NO: 133194 - RNA, 1701 nt, Artificial Sequence; identical to SEQ ID NO: 131881
  derived and/or modified CDS sequence (opt3) from hemagglutinin__InfluenzaA__ADJ18165

SEQ ID NO: 133195 - RNA, 1701 nt, Artificial Sequence
  derived and/or modified CDS sequence (opt3) from hemagglutinin__InfluenzaA__ADJ18167
augaaggccauccuggugguccuccuuuacaccuucgcuacagcaaacgccgacacucugugcauuggcuaucacgcgaauaacagcacggauaccguugacacaguguuggagaaaaauguaacugugacccauuccgucaacuuacuggaagauaagcacaaugggaaacuauguaagcucagaggaguggcuccccugcaucuugguaaaugcaacauagccggcuggauccuggggaauccugagugugaaucuuugucaacagcaaguagcugguccuacauuguugagaccucuucgucagacaacggaacuugcuauccaggcgauuuuaucgacuacgaggagcucagggagcagcugagcaguguguccucuuucgaacgguuugagauuuucccgaagacaagcuccuggcccaaucacgauucaaacaagggugucaccgccgcuuguccuuaugcaggggccaaaaguuuuuacaagaaucugaucuggcucgugaaaaagggaaacagcuauccaaaauuaucuaaguccuacauaaaugacaagggcaaagaaguacugguucuuuggggcauccaucaccccucaacgagcgcugaucaacagaguuuguaccagaacgccgacgcguauguguucgucgggacuucucgcuacuccaagaaauuuaagccugagauugcaauccgaccaaaagugcgugauagagagggaaggaugaauuauuacuggacccugguggaacccggugacaagauuacauucgaggccacuggcaaccuagucguuccucgguaugcuuuugccauggaacgcaacgcagggagcggaaucauaauuucggauaccccagugcacgacugcaauacaaccugucagacgccgaaaggcgcuaucaacacuucucuccccuuccaaaauauucauccuaucacaaucgguaagugcccaaaguacguaaaauccaccaagcugagacuugccacugggcugaggaacauucccucaauacagagucggggauuguuuggcgcgaucgccggcuucauugaagggggauggacagguaugguggacggcugguauggguaccaccaucagaaugaacagggaagcggcuacgcagcugaucucaaauccacccaaaacgccaucgacaagauaacgaauaaagucaacucugugauugagaagaugaauacccaguuuacagcuguugguaaggaguucaaccaccuggaaaaacgcaucgagaauuuaaacaagaaaguggaugacggguuccuggauaucuggacuuauaaugccgaacuccuuguccuguuggagaacgaacgaacccuagacuaccacgauagcaaugugaagaaccuguaugagaaaguaagaucacagcucaagaacaaugcaaaggagauuggcaacggauguuuugaguucuaccauaaaugcgacaauacauguauggaaaguguuaagaacggcacuuaugauuacccuaaauauuccgaagaggccaagcugaauagggaagagaucgacggggugaaacuugagagcacccggauuuaccagauacuggcuaucuacucuacagucgcgucaaguuuggugcucgucgugagccugggagcaauuuccuuuuggaugugcucuaacgguucguuacaaugccguaucuguaucuga

SEQ ID NO: 133196 - RNA, 1701 nt, Artificial Sequence
  derived and/or modified CDS sequence (opt3) from hemagglutinin__InfluenzaA__ADJ18169
augaaggccauccuggugguccuccuuuacaccuucgcuacagcaaacgccgacacucugugcauuggcuaucacgcgaauaacagcacggauaccguugacacaguguuggagaaaaauguaacugugacccauuccgucaacuuacuggaagauaagcacaaugggaaacuauguaagcucagaggaguggcuccccugcaucuugguaaaugcaacauagccggcuggauccuggggaauccugagugugaaucuuugucaacagcaaguagcugguccuacauuguugagaccucuucgucagacaacggaacuugcuauccaggcgauuuuaucgacuacgaggagcucagggagcagcugagcaguguguccucuuucgaacgguuugagauuuucccgaagacaagcuccuggcccaaucacgauucaaacaagggugucaccgccgcuuguccucaugcaggggccaaaaguuuuuauaagaaucugaucuggcucgugaaaaagggaaacagcuacccaaaauuaucuaaguccuauauaaaugacaagggcaaagaaguacugguucuuuggggcauccaccaccccucaacgagcgcugaucaacagaguuuguaccagaacgccgacgcguacguguucgucgggacuucucgcuauuccaagaaauuuaagccugagauugcaauccgaccaaaagugcgugauagagagggaaggaugaauuacuauuggacccugguggaacccggugacaagauuacauucgaggccacuggcaaccuagucguuccucgguacgcuuuugccauggaacgcaacgcagggagcggaaucauaauuucggauaccccagugcaugacugcaauacaaccugucagacgccgaaaggcgcuaucaacacuucucuccccuuccaaaauauucacccuaucacaaucgguaagugcccaaaguauguaaaauccaccaagcugagacuugccacugggcugaggaacgugcccucaauucagagucggggauuguuuggcgcgauagccggcuucaucgaagggggauggacagguauggucgacggcugguacggguaucaucaccagaaugaacagggaagcggcuacgcagcugaucucaaauccacccaaaacgccauugacaagaucacgaauaaagugaacucuguuauagagaagaugaauacccaguuuacagcuguggguaaggaguucaaccaccuggaaaaacgcauugagaauuuaaacaagaaagucgaugacggguuccuggauaucuggacuuacaaugccgaacuccuugugcuguuggagaacgaacgaacccuagacuaucaugauagcaauguaaagaaccuguacgagaaaguuagaucacagcucaagaacaaugcaaaggagaucggcaacggauguuuugaguucuaucacaaaugcgacaauacauguauggaaagugugaagaacggcacuuacgauuauccuaaauacuccgaagaggccaagcugaauagggaagagauugacggggucaaacuugagagcacccggaucuaucagauucuggcuauauacucuacaguggcgucaaguuugguccucgugguuagccugggagcaaucuccuuuuggaugugcucuaacgguucguuacaaugccguauuuguaucuga

SEQ ID NO: 133197 - RNA, 1701 nt, Artificial Sequence
  derived and/or modified CDS sequence (opt3) from hemagglutinin__InfluenzaA__ADJ18171
augaaggccauccuggugguccuccuuuacaccuucgcuacagcaaacgccgacacucugugcauuggcuaucacgcgaauaacagcacggauaccguugacacaguguuggagaaaaauguaacugugacccauuccgucaacuuacuggaagauaagcacaaugggaaacuauguaagcucagaggaguggcuccccugcaucuugguaaaugcaacauagccggcuggauccuggggaauccugagugugaaucuuugucaacagcaaguagcuggccauacauuguugagaccuccucuucggacaacggaacuugcuauccgggcgauuuuaucgacuacgaggaacucagggagcagcugucaagcgugaguuccuucgaacgguuugagauuuuccccaagacaucuagcuggccuaaucacgauuccaacaagggugucaccgccgcuuguccacaugcaggggccaaaucauuuuaucaaaaucugaucuggcucgugaagaaaggaaacaguuaccccaaguuaagcaaaucuuauauacacgacaagggcaaggaaguacugguucuuuggggcauccaccauccuuccacgucagcugaucagcagagcuuguaccagaaugccgacgcguacguguucgucgggaccagucgcuauucuaaaaaguuuaaaccagagauugcaauccgacccaaggugcgugauagacaaggaaggaugaacuacuauuggacucugguggagcuaggugacaaaauuacauucgaagccacuggcaaucucgucguuccucgguacgcuuuugccauggagcgcaacgcaggguccggaaucauaauuagcgauaccccagugcacaacugcaauacaaccugucagacgacuacaggcgcuaucaacaccucgcugccguuccagaauauucaucccaucacuaucgguaagugcccuaaauauguaaagucuacaaagcugagacuugccaccggguugaggaacgugccauccauucagucacggggacucuuuggcgcgauagccggcuucaucgaagggggauggacggguauggucgacggcugguacggguaucaccaccaaaaugagcagggaaguggcuacgcagcugaccugaaaagcacccagaacgccauugauaagaucacaaauaaagugaacuccguuauagaaaagaugaauacucaguuuaccgcuguggguaaagaguucaaccauuuagagaagcgcauugaaaaucugaacaagaaagucgacgauggguuccucgacaucuggacauacaaugccgagcuucugguguugcuagaaaacgagcgaacucuggauuaucacgacucuaauguaaagaaccucuacgaaaaaguuagaagccaacugaagaacaaugcaaaagagaucggcaacggauguuuugaguucuaucauaagugcgauaauaccuguauggaaucagugaagaacggcacauacgacuaucccaaauacagugaggaagccaaacuuaauagggaggaaauugauggggucaagcuggaguccacccggaucuaucagauuuuggcuauauacagcacuguggcgucuucacucguccuggugguuaguuuaggagcaaucagcuuuuggaugugcuccaacgguucucugcagugccguauuuguaucuga

SEQ ID NO: 133198 - RNA, 1701 nt, Artificial Sequence; identical to SEQ ID NO: 131881
  derived and/or modified CDS sequence (opt3) from hemagglutinin__InfluenzaA__ADJ18173

SEQ ID NO: 133199 - RNA, 1701 nt, Artificial Sequence; identical to SEQ ID NO: 131881
  derived and/or modified CDS sequence (opt3) from hemagglutinin__InfluenzaA__ADJ18175

SEQ ID NO: 133200 - RNA, 1701 nt, Artificial Sequence
  derived and/or modified CDS sequence (opt3) from hemagglutinin__InfluenzaA__ADJ18177
augaaggccauccuggugguccuccuuuacaccuucgcuacagcaaacgccgacacucugugcauuggcuaucacgcgaauaacagcacggauaccguugacacaguguuggagaaaaauguaacugugacccauuccgucaacuuacuggaagauaagcacaaugggaaacuauguaagcucagaggaguggcuccccugcaucuugguaaaugcaacauagccggcuggauccuggggaauccugagugugaaucuuugucaacagcaaguagcugguccuacauuguugagaccucuucgucagacaacggaacuugcuauccaggcgauuuuaucgacuacgaagaacucagggagcagcugagcaguguguccucuuucgaacgguuugagauuuucccgaagacaagcuccuggcccaaucacgauucaaacaagggugucaccgccgcuuguccucaugcaggggccaaaaguuuuuauaagaaucugaucuggcucgugaaaaagggaaacagcuacccaaaauuaucuaaguccuauauaaaugacaagggcaaagaaguacugguucuuuggggcauccaccaccccucaacgagcgcugaucaacagaguuuguaccagaacgccgacgcguacguguucgucgggacuucucgcuauuccaagaaauuuaagccugagauugcaauccgaccaaaagugcguggacaggaggguagaaugaauuacuauuggacccugguggaacccggcgauaagauuacauucgaggccacugggaaccuagucguuccuagguacgcuuuugccauggaacggaacgcaggaagcggcaucauaauuucggacaccccagugcaugauugcaauacaaccugucaaacgccgaaaggugcuaucaacacuucucuccccuuccagaauauucacccuaucacaaucgggaagugcccaaaguauguaaaauccaccaagcugcgccuugccacuggacugagaaacauucccucagugcagaguaggggcuuguuuggcgcgauagccggguucaucgagggagguuggacaggcauggucgacgggugguacggauaucaucaccagaaugaacaaggcagcgguuacgcagcugaccucaaauccacccagaacgccauugauaagaucacgaauaaagugaacucuguuauagagaagaugaauacccaguuuacagcuguggggaaggaguucaaccaccuggaaaaacggauugagaauuuaaacaagaaagucgacgauggcuuccuggacaucuggacuuacaaugccgaacuccuugugcuguuggagaacgaacgcacccuagauuaucaugacagcaauguaaagaaccuguacgagaaaguucgaucacagcucaagaacaaugcaaaggagaucggaaacggcuguuuugaguucuaucacaaaugcgauaauacauguauggagagugugaagaacgggacuuacgacuauccuaaauacuccgaagaggccaagcugaauagagaagagauugauggagucaaacuugagagcaccaggaucuaucaaauucuggcuauauacucuacaguggcgucaaguuugguccucgugguuagccugggugcaaucuccuuuuggaugugcucuaacggcucguuacagugccggauuuguaucuga

SEQ ID NO: 133201 - RNA, 1701 nt, Artificial Sequence
  derived and/or modified CDS sequence (opt3) from hemagglutinin__InfluenzaA__ADJ40444
augaaggccauccuggugguccuccuuuacaccuucgcuacagcaaacgccgacacucugugcauuggcuaucacgcgaauaacagcacggauaccguugacacaguguugaaaaagaauguaacugugacccauuccgucaacuuacuggaggauaaacacaaugggaagcuauguaaacucagaggaguggcuccccugcaucuugguaagugcaacauagccggcuggauccuggggaauccugaaugugagucuuugucaacagcaaguagcugguccuacauuguugaaaccucuucgucagacaacggaacuugcuauccaggcgauuuuaucgacuacgaggaacucagggagcagcugagcaguguguccucuuucgagcgguuugaaauuuucccgaagacaagcuccuggcccaaucacgauucaaacaaaggugucaccgccgcuuguccucaugcaggggccaagaguuuuuauaaaaaucugaucuggcucgugaagaaaggaaacagcuacccaaaguuaucuaaguccuauauaaaugacaaaggcaaggagguacugguucuuuggggcauccaccaccccucaacgagcgcugaucaacagaguuuguaccagaacgccgacgcguacguguucgucgggacuucucgcuauuccaaaaaguuuaaaccugaaauugcaauccgaccaaaggugcgugaucaggagggaagaaugaauuacuauuggacccugguggagcccggugacaaaauuacauucgaagccacuggcaaccuagucguuccuagguacgcuuuugccauggagcggaacgcagggagcggaaucauaauuucggauaccccagugcaugacugcaauacaaccugucaaacgccgaagggcgcuaucaacacuucucuccccuuccagaauauucacccuaucacaaucgguaagugcccaaaauauguaaaguccaccaaacugcgccuugccacugggcugagaaacgugcccucaauucagaguaggggauuguuuggcgcgauagccggcuucaucgaagggggauggacagguauggucgacggcugguacggguaucaucaccagaaugagcaaggaagcggcuacgcagcugaucucaaguccacccagaacgccauugacgaaaucacgaauaaagugaacucuguuauagagaagaugaauacccaguuuacagcuguggguaaggaguucaaccaccuggaaaaacggauugagaauuuaaacaagaaagucgaugacggguuccuggauaucuggacuuacaaugccgaacuccuugugcuguuggagaacgaacgcacccuagacuaucaugauagcaauguaaagaaccuguacgagaaaguucgaucacagcucaagaacaaugcaaaggagaucggcaacggauguuuugaguucuaucacaaaugcgacaauacauguauggaaagugugaagaacggcacuuacgauuauccuaaauacuccgaagaggccaagcugaauagagaagagauugacggggucaaacuugagagcaccaggaucuaucaaauucuggcuauauacucuacaguggcgucaaguuugguccucgugguuagccugggagcaaucuccuuuuggaugugcucuaacgguucguuacagugccggauuuguaucuga

SEQ ID NO: 133202 - RNA, 1701 nt, Artificial Sequence
  derived and/or modified CDS sequence (opt3) from hemagglutinin__InfluenzaA__ADJ40454
augaaggccauccuggugguccuccuuuacaccuucgcuacagcaaacgccgacacucugugcauuggcuaucacgcgaauaacagcacggauaccguugacacaguguuggagaaaaauguaacugugacccauuccgucaacuuacuggaagauaagcacaaugggaaacuauguaagcucagaggaguggcuccccugcaucuugguaaaugcaacauagccggcuggauccuggggaauccugagugugaaucuuugucaacagcaaguagcugguccuacauuguugagaccucuucgucagacaacggaacuugcuauccaggcgauuuuaucgacuacgaggagcucagggagcagcugagcaguguguccucuuucgaacgguuugagauuuucccgaagacaagcuccuggcccaaucacgauucaaacaagggugucaccgccgcuuguccucaugcaggggccaaaaguuuuuauaagaaucugaucuggcucgugaaaaagggaaacagcuacccaaaauuaucuaaguccuauauaaaugacaagggcaaagaaguacugguucuuuggggcauccaccaccccucaacgagcgcugaucaacagaguuuguaccagaacgccgacgcguacguguucgucgggacuucucgcuauuccaagaaauuuaagccugagauugcaauccgaccaaaagugcguaaucaggagggaagaaugaacuacuauuggacccugguggaacccggugauaagauuacauucgaggccacuggcaaccuagucguuccuagguacgcuuuugccauggaacggaaugcagggagcggaaucauaauuucggacaccccagugcaugauugcaacacaaccugucaaacgccgaaaggcgcuaucaauacuucucuccccuuccagaacauucacccuaucacaaucgguaagugcccaaaguauguaaaauccaccaagcugcgccuugccacugggcugagaaauauucccucaauacagaguaggggauuguuuggcgcgaucgccggcuucauugaagggggauggacagguaugguggacggcugguacggguaucaucaccagaacgaacaaggaagcggcuacgcagcugaccucaaauccacccagaaugccaucgauaagauaacgaacaaagucaauucugugauugagaagaugaacacccaguuuacagcuguugguaaggaguucaaucaccuggaaaaacggaucgagaacuuaaauaagaaaguggacgauggguuccuggacaucuggacuuacaacgccgaacuccuuguccuguuggagaaugaacgcacccuagauuaucaugacagcaacgugaagaaccuguacgagaaaguacgaucacagcucaagaauaacgcaaaggagauuggcaauggauguuuugaguucuaucacaaaugcgauaacacauguauggaaaguguuaagaauggcacuuacgacuauccuaaauacuccgaagaggccaagcugaacagagaagagaucgaugggguggagcuugaaagcaccaggauuuaucaaauacuggcuaucuacucuacagucgcgucaaguuuggugcucgucgugagccugggagcaauuuccuuuuggaugugcucuaaugguucguuacagugccggaucuguaucuga

SEQ ID NO: 133203 - RNA, 1701 nt, Artificial Sequence
  derived and/or modified CDS sequence (opt3) from hemagglutinin__InfluenzaA__ADJ40464
augaaggccauccuggugguccuccuuuacaccuucgcuacagcaaacacugacacgcugugcauuggcuaucacgccaauaacagcaccgauacaguugacacuguguuggagaagaauguaaccgugacacauuccgucaacuuacuggaagauaagcacaaugggaaacuauguaagcucagaggaguggcgccccugcaucuugguaaaugcaacauagcuggcuggauccuggggaauccugagugugaaucuuugucaaccgccaguagcugguccuacauuguugagacuucuucgucagacaacggaacaugcuauccaggcgauuuuaucgacuacgaggagcucagggagcagcugagcaguguguccucuuucgaacgguuugagauuuucccgaagaccagcuccuggcccaaucacgauucaaacaagggugucacggcagccuguccucaugcuggggcaaaaaguuuuuauaagaaucugaucuggcucgugaaaaagggaaacagcuacccaaaauuaucuaaguccuauauaaaugacaagggcaaagaaguacugguucuuuggggcauccaccaccccucaacuagcgccgaucaacagaguuuguaccagaacgcugacgccuacguguucgucgggaccucucgcuauuccaagaaauuuaagccugagauugcgauccgaccaaaagugcgugaucaggagggaagaaugaauuacuauuggacacugguggaacccggugacaagauuacuuucgaggcaaccggcaaccuagucguuccuagguacgccuuugcuauggaacggaacgccgggagcggaaucauaauuucggauacaccagugcaugacugcaauaccacgugucaaacuccgaaaggcgcaaucaacacaucucuccccuuccagaauauucacccuaucaccaucgguaagugcccaaaguauguaaaauccacuaagcugcgccuugcuacagggcugagaaacgugcccucaauucagaguaggggauuguuuggcgccauagcgggcuucaucgaagggggauggaccgguauggucgacggcugguacggguaucaucaccagaaugaacaaggaagcggcuacgccgcagaucucaaauccacgcagaacgcuauugacgagaucaccaauaaggugaacucuguuauagagaaaaugaauacacaguuuacugccguggguaaggaguucaaccaccuggaaaagcggauugaaaauuuaaacaaaaaggucgaugacggguuccuggauaucuggaccuacaaugcugagcuccuuauccuguuggaaaacgagcgcacacuagacuaucaugauagcaaugugaaaaaccuguacgagaagguacgaucacagcucaaaaacaaugccaaggaaauuggcaacggauguuuugaguucuaucacaagugcgacaauacuuguauggaaaguguuaaaaacggcaccuacgauuauccuaaguacuccgaggaagcaaaacugaauagagaggagaucgacggggugaaacuugaaagcacaaggauuuaucaaauacuggccaucuacucuaccgucgcuucaaguuuggugcucgucgugagccugggagcgauuuccuuuuggaugugcucuaacgguucguuacagugccggaucuguaucuga

SEQ ID NO: 133204 - RNA, 1701 nt, Artificial Sequence
  derived and/or modified CDS sequence (opt3) from hemagglutinin__InfluenzaA__ADJ40474
augaaggccauccuggugguccuccuuuacaccuucgcuacagcaaacgccgacacucugugcauuggcuaucacgcgaauaacagcacggauaccguugacacaguguuggagaaaaauguaacugugacccauuccgucaacuuacuggaagauaagcacaaugggaaacuauguaagcucagaggaguggcuccccugcaucuugguaaaugcaacauagccggcuggauccuggggaauccugagugugaaucuuugucaacagcaaguagcugguccuacauuguugagaccucuucgucagacaacggaacuugcuauccaggcgauuuuaucgacuacgaagaacucagggagcagcugagcaguguguccucuuucgaacgguuugagauuuucccgaagacaagcuccuggcccaaucacgauucaaacaagggugucaccgccgcuuguccucaugcaggggccaaaaguuuuuauaagaaucugaucuggcucgugaaaaagggaaacagcuacccaaaauuaucuaaguccuauauaaaugacaagggcaaagaaguacugguucuuuggggcauccaccaccccucaacgagcgcugaucaacagaguuuguaccagaacgccgacgcguacguguucgucgggacuucucgcuauuccaagaaauuuaagccugagauugcaauccgaccaaaagugcgugagcaggaaggaagaaugaauuacuauuggacccugguggagcccggugauaagauuacauucgaagccacuggcaaccuagucguuccuagguacgcuuuugccauggagcggaacgcagggagcggaaucauaauuucggacaccccagugcaugauugcaauacaaccugucaaacgccgaaaggcgcuaucaacacuucucuccccuuccagaauauucacccuaucacaaucgguaagugcccaaaguauguaaaauccaccaagcugcgccuugccacugggcugagaaacgugcccucaauucagaguaggggauuguuuggcgcgauagccggcuucaucgaagggggauggacagguauggucgacggcugguacggguaucaucaccagaaugagcaaggaagcggcuacgcagcugaccucaaauccacccagaacgccauugaugagaucacgaauaaggugaacucuguuauagaaaagaugaauacccaguuuacagcuguggguaaggaguucaaccaccuggaaaagcggauugagaauuuaaacaaaaaggucgacgauggguuccuggacaucuggacuuacaaugccgaacuccuugugcuguuggagaacgagcgcacccuagauuaucaugacagcaauguuaaaaaccuguacgaaaagguacgaagacagcucaaaaacaaugcaaaggagaucggcaacggauguuuugaguucuaucacaagugcgauaauacauguauggagucagugaaaaacggcacuuacgacuauccuaaguacagugaagaggccaaacugaauagggaggaaauugauggggucaaacuugaguccacccggaucuaucaaauucuggcuauauacagcacaguggcgucuucauugguccucgugguuagucugggagcaaucagcuuuuggaugugcuccaacgguucuuuacagugccguauuuguaucuga

SEQ ID NO: 133205 - RNA, 1701 nt, Artificial Sequence
  derived and/or modified CDS sequence (opt3) from hemagglutinin__InfluenzaA__ADJ40494
augaaggccauccuggugguccuccuuuacaccuucgcuacagcaaacgccgacacucugugcauuggcuaucacgcgaauaacagcacggauaccguugacacaguguuggagaaaaauguaacugugacccauuccgucgauuuacuggaagacaagcacaacgggaaacuauguaagcucagaggaguggcuccccugcaucuugguaaaugcaauauagccggcuggauccuggggaacccugagugugaaucuuugucaacagcaaguagcugguccuacauuguugagaccucuucgucagauaauggaacuugcuauccaggcgacuuuaucgauuacgaggagcucagggagcagcugagcaguguguccucuuucgaacgguuugagauuuucccgaagacaagcuccuggcccaaccacgacucaaauaagggugucaccgccgcuuguccucaugcaggggccaaaaguuuuuauaagacgcugaucuggcucgugaaaaagggaaacagcuacccaaaauuaucuaaguccuauauaaaugauaagggcaaagaaguacugguucuuuggggcauccaccaccccucaacuagcgcugaccaacagaguuuguaccagaacgccgaugcguacguguucgucgggaccucucgcuauuccaagaaauuuaagccugagauugcaauccgaccaaaagugcgugaccaggagggaagaaugaauuacuauuggacacugguggaacccggugauaagauuacuuucgaggccaccggcaaccuagucguuccuagguacgcuuuugccauggaacggaaugcagggagcggaaucauaauuucggacacaccagugcaugacugcaacaccacgugucaaacuccgaaaggcgcuaucaacacaucucuccccuuccagaauauucacccuaucaccaucgguaagugcccaaaguauguaaaauccacuaagcugcgccuugccacagggcugagaaacgugcccucaauucagaguaggggauuguuuggcgcgauagccggcuucaucgaagggggauggaccgguauggucgauggcugguacggguaucaucaccagaaugaacaaggaagcggcuacgcagcugaccucaaauccacgcagaacgccauugaugagaucaccaauaaggugaacucuguuauagagaaaaugaauacacaguuuacugcuguggguaaggaguucaaccaccuggaaaagcggauugaaaauuuaaacaaaaaggucgacgauggguuccuggacaucuggaccuacaaugccgagcuccuugugcuguuggaaaacgagcgcacacuagauuaucaugacagcaauguaaagaaccuguacgagaagguucgaucacagcucaaaaauaacgcaaaggaaaucggcaacggauguuuugaguucuaucacaagugcgauaauacuuguauggaaagugugaaaaacggcaccuacgacuauccuaaguacuccgaggaagccaaacugaauagagaggagauugauggggucaaacuugaaagcacaaggaucuaucaaauucuggcuauauacucuaccguggcgucaaguuugguccucgugguuagccugggagcaaucuccuuuuggaugugcucuaacgguucguuacagugccggauuuguaucuga

SEQ ID NO: 133206 - RNA, 1701 nt, Artificial Sequence
  derived and/or modified CDS sequence (opt3) from hemagglutinin__InfluenzaA__ADJ40514
augaaggccgugcuggucguucuccuuuacaccuucgcuacaacuaacgcagacacgcugugcaucggcuaucacgccaauaacagcaccgauacaguggacacuguauuggagaaaaaugugaccgucacacauuccgugaacuuacuggaagauaagcacaaugggaaacuauguaagcucagaggaguugcgccccugcaucuugguaaaugcaacauugcuggcuggauacuggggaauccugagugugaaucuuugucaaccgccaguagcugguccuacaucguggagacuucuucgucagacaacggaacaugcuauccaggcgauuuuauugacuacgaggagcucagggagcagcugagcagugucuccucuuucgaacgguuugagaucuucccgaagaccagcuccuggcccaaucacgauucaaacaagggugugacggcagccuguccucaugcuggggcaaaaaguuuuuauaagaaucugauuuggcucguaaagaagggaaacagcuacccaaaauuaucuaaguccuauaucaaugacaagggcaaagaaguucuggugcuuuggggcauacaccaccccucaacuagcgccgaucaacagaguuuguaccagaacgcugacgccuacgucuucguggggaccucucgcuauuccaagaaauuuaagccugagaucgcgauucgaccaaaagugcguaaucaggagggaagaaugaacuacuauuggacacuggucgaacccggugauaagaucacuuucgaggcaaccggcaaccuaguugugccuagguacgccuuugcuauggaacggaaugccgggagcggaauuaucauaucggacacaccaguacaugauugcaacaccacgugucaaacuccgaaaggcgcaauuaauacaucucuccccuuccagaacauccacccuauuaccaucgguaagugcccaaaguaugugaaauccacuaagcugcgccuugcuacagggcugagaaauguccccucaauccagaguaggggauuguuuggcgccauugcgggcuucauagaagggggauggaccgguaugguggacggcugguacggguaucaucaccagaacgaacaaggaagcggcuacgccgcagaccucaaauccacgcagaaugcuaucgaugagauuaccaacaagguuaauucugugaucgagaaaaugaacacacaguuuacugccgucgguaaggaguucaaucaccuggaaaagcggauagaaaacuuaaauaaaaagguggacgauggguuccuggacauuuggaccuacaacgcugagcuccuuguacuguuggaaaaugagcgcacacuagauuaucaugacagcaacguuaaaaaccuguacgagaaggugcgaucacagcucaaaaauaacgccaaggaaaucggcaauggauguuuugaguucuaucacaagugcgauaacacuuguauggaaagugucaaaaauggcaccuacgacuauccuaaguacuccgaggaagcaaaacugaacagagaggagaucgauggggugaaacuugaaagcacaaggauuuaucaaauccuggccauuuacucuaccgucgcuucaaguuuggugcucguugugagccugggagcgauauccuuuuggaugugcucuaaugguucguuacagugccggaucuguauuuga

SEQ ID NO: 133207 - RNA, 1701 nt, Artificial Sequence; identical to SEQ ID NO: 130717
  derived and/or modified CDS sequence (opt3) from hemagglutinin__InfluenzaA__ADJ40524

SEQ ID NO: 133208 - RNA, 1701 nt, Artificial Sequence; identical to SEQ ID NO: 131070
  derived and/or modified CDS sequence (opt3) from hemagglutinin__InfluenzaA__ADJ40534

SEQ ID NO: 133209 - RNA, 1701 nt, Artificial Sequence
  derived and/or modified CDS sequence (opt3) from hemagglutinin__InfluenzaA__ADJ40554
augaaggccauccuggugguccuccuuuacaccuucgcuacagcaaacgccgacacucugugcauuggcuaucacgcgaauaacagcacggauaccguugacacaguguuggagaaaaauguaacugugacccauuccgucaacuuacuggaagauaagcacaaugggaaacuauguaagcucagaggaguggcuccccugcaucuugguaaaugcaacauagccggcuggauccuggggaauccugagugugaaucuuugucaacagcaaguagcugguccuacauuguugagaccucuucgucagacaacggaacuugcuauccaggcgauuuuaucgacuacgaggagcucagggagcagcugagcaguguguccucuuucgaacgguuugagauuuucccgaauacaagcuccuggcccaaccacgauucaaauaagggugucaccgccgcuuguccucaugcaggggccaagaguuuuuauaaaaaccugaucuggcucgugaagaaaggaaauagcuacccaaaguuaucuaaauccuauauaaacgacaagggcaaggaaguacugguucuuuggggcauccaccaccccucaacgagcgcugaucaacagaguuuguaccagaaugccgacgcguacguguucgucgggacuucucgcuauuccaaaaaguuuaaaccugagauugcaauccgaccaaaggugcgugaucaggagggaagaaugaacuacuauuggacccugguggaacccggugacaaaauuacauucgaggccacuggcaaccuagucguuccuagguacgcuuuugccauggaacggaaugcagggagcggaaucauaauuucggauaccccagugcaugacugcaacacaaccugucaaacgccgaagggcgcuaucaauacuucucuccccuuccagaacauucacccuaucacaaucgguaaaugcccaaaguauguaaaguccaccaaacugcgccuugccacugggcugagaaaugugcccucaauucagaguaggggauuguuuggcgcgauagccggcuucaucgaagggggauggacagguauggucgacggcugguacggguaucaucaccagaacgaacaaggaagcggcuacgcagcugaucucaaguccacccagaaugccauugacgagaucacgaacaaaguuaauucugugauagagaagaugaacacccaguuuacagcuguggguaaagaguucaaucaccuggaaaagcggauugaaaacuuaaauaagaaagucgaugacggguuccuggauaucuggacuuacaacgccgagcuccuugugcuguuggaaaaugagcgcacccuagacuaucaugauagcaacguaaagaaccuguacgagaaaguucgaucacagcucaagaauaacgcaaaagaaaucggcaauggauguuuugaguucuaucacaagugcgacaacacauguauggaaagugugaagaauggcacuuacgauuauccuaaauacuccgaggaagccaagcugaacagagaggagauugacggggucaaacuugaaagcaccaggaucuaucaaauucuggcuauauacucuacaguggcgucaaguuugguccucgugguuagccugggagcaaucuccuuuuggaugugcucuaaugguucguuacagugccggauuuguaucuga

SEQ ID NO: 133210 - RNA, 1701 nt, Artificial Sequence; identical to SEQ ID NO: 130717
  derived and/or modified CDS sequence (opt3) from hemagglutinin__InfluenzaA__ADJ40564

SEQ ID NO: 133211 - RNA, 1701 nt, Artificial Sequence; identical to SEQ ID NO: 130717
  derived and/or modified CDS sequence (opt3) from hemagglutinin__InfluenzaA__ADJ40574

SEQ ID NO: 133212 - RNA, 1701 nt, Artificial Sequence; identical to SEQ ID NO: 132137
  derived and/or modified CDS sequence (opt3) from hemagglutinin__InfluenzaA__ADJ40584

SEQ ID NO: 133213 - RNA, 1701 nt, Artificial Sequence; identical to SEQ ID NO: 130717
  derived and/or modified CDS sequence (opt3) from hemagglutinin__InfluenzaA__ADJ40594

SEQ ID NO: 133214 - RNA, 1701 nt, Artificial Sequence; identical to SEQ ID NO: 131286
  derived and/or modified CDS sequence (opt3) from hemagglutinin__InfluenzaA__ADJ40604

SEQ ID NO: 133215 - RNA, 1701 nt, Artificial Sequence; identical to SEQ ID NO: 131286
  derived and/or modified CDS sequence (opt3) from hemagglutinin__InfluenzaA__ADJ40614

SEQ ID NO: 133216 - RNA, 1701 nt, Artificial Sequence; identical to SEQ ID NO: 130717
  derived and/or modified CDS sequence (opt3) from hemagglutinin__InfluenzaA__ADJ40634

SEQ ID NO: 133217 - RNA, 1701 nt, Artificial Sequence; identical to SEQ ID NO: 130717
  derived and/or modified CDS sequence (opt3) from hemagglutinin__InfluenzaA__ADJ40644

SEQ ID NO: 133218 - RNA, 1701 nt, Artificial Sequence; identical to SEQ ID NO: 130717
  derived and/or modified CDS sequence (opt3) from hemagglutinin__InfluenzaA__ADJ40654

SEQ ID NO: 133219 - RNA, 1701 nt, Artificial Sequence; identical to SEQ ID NO: 130717
  derived and/or modified CDS sequence (opt3) from hemagglutinin__InfluenzaA__ADJ40664

SEQ ID NO: 133220 - RNA, 1701 nt, Artificial Sequence; identical to SEQ ID NO: 130717
  derived and/or modified CDS sequence (opt3) from hemagglutinin__InfluenzaA__ADJ40674

SEQ ID NO: 133221 - RNA, 1701 nt, Artificial Sequence
  derived and/or modified CDS sequence (opt3) from hemagglutinin__InfluenzaA__ADJ41816
augaagaccaucauugcccugagcuacauguucugccucguguuugcucagaaccuucccggcaaugacaacuccacagcaacucuguguuuggggcaccaugccgucccuaauggaacguuaguuaaaaccauaacaaacgaucaaaucgaggugacuaaugcgaccgaacugguacagucuucaaguacagguagaauuugcgacagcccacacaggauccuagauggcaagaacuguacccucauugacgcucugcuuggggauccgcauugcgacggauuccagaaugagaaaugggaucuguuuguggaacgguccaaggccuucucuaacuguuaucccuacgacgucccugauuaugcaucguugcgcucacucguggccagcaguggcacucuggaguuuaucaaugaagguuucaacuggacagggguuacccaguccggaggcucuugcacguguaaacgaggcagcaaugacuccuuuuucucacgucugaacuggcucuacgagagugagagcaaguauccaguguuaaaugucacuaugcccaacaaugggaaguuugauaaacuguacauauggggaauccaccauccuucuaccgacaaggaacaaacaaaccuuuauauuagagcuuccgguagggugacuguaucaaccaaacggagccagcagacaguuaucccaaacauuggcagucgccccugggugagaggguugucuuccaggaucagcauauacuggaccauugucaagccuggagauauccugcuaauuucgucuacgggcaaucucaucgcaccacgggguuacuucaaaauccgcacugggaaguccucaauuaugcgaagugacgccccgauaggaacaugcagcuccgaguguaucacccccaacggcucuauuccuaaugacaagccauuucagaacgugaauaaaaucacuuauggcgcuugccccagauacgugaagcaaaacacacugaaacuugccaccgggaugaggaaugucccugaaaagcagacgcggggaauauucggugcgauugcaggcuuuaucgagaacgggugggagggaaugguugauggcugguaugguuuccgucaccagaauagcgaagggaccggccaggccgcugaccugaaaucaacacaagccgcaaucgaucagauuaacggaaaguugaaucgcgugaucgagaaaacuaacgaaaaguuccaccagauugagaaggaauuuagugagguagagggcagaauacaagaccucgaaaaauacguggaggauaccaagaucgaccugugguccuauaaugcugaauuacuggucgcccucgagaaccagcauacaauugaucuuacugacagcgaaaugaauaaacuguucgagaagaccaggaaacaguugcgggagaacgcggaagauauggggaacggauguuuuaagaucuaccacaagugcgacaaugccugcaucgguucuauucgaaacggcacauaugaucaugacguguaccgcgacgaggcacuaaauaacagauuccagauaaaagggguugaacugaagucaggauacaaagauuggauccucuggauuaguuuugcuaucagcuguuuccugcuuugcgugguccuguugggcuuuauuaugugggccugucaaaaggguaauaucaggugcaacauauguaucuga

SEQ ID NO: 133222 - RNA, 1701 nt, Artificial Sequence; identical to SEQ ID NO: 130717
  derived and/or modified CDS sequence (opt3) from hemagglutinin__InfluenzaA__ADJ56640

SEQ ID NO: 133223 - RNA, 1701 nt, Artificial Sequence; identical to SEQ ID NO: 131515
  derived and/or modified CDS sequence (opt3) from hemagglutinin__InfluenzaA__ADJ56650

SEQ ID NO: 133224 - RNA, 1701 nt, Artificial Sequence; identical to SEQ ID NO: 130808
  derived and/or modified CDS sequence (opt3) from hemagglutinin__InfluenzaA__ADJ67983

SEQ ID NO: 133225 - RNA, 1701 nt, Artificial Sequence; identical to SEQ ID NO: 130808
  derived and/or modified CDS sequence (opt3) from hemagglutinin__InfluenzaA__ADJ67984

SEQ ID NO: 133226 - RNA, 1701 nt, Artificial Sequence; identical to SEQ ID NO: 130808
  derived and/or modified CDS sequence (opt3) from hemagglutinin__InfluenzaA__ADJ67985

SEQ ID NO: 133227 - RNA, 1701 nt, Artificial Sequence
  derived and/or modified CDS sequence (opt3) from hemagglutinin__InfluenzaA__ADJ80241
augaaggccauccuggugguccuccuuuacaccuucgcuacagcaaacgccgacacucugugcauuggcuaucacgcgaauaacagcacggauaccguugacacaguguuggagaaaaauguaacugugacccauuccgucaacuuacuggaagauaagcacaaugggaaacuauguaagcucagaggaguggcuccccugcaucuugguaaaugcaacauagccggcuggauccuggggaauccugagugugaaucuuugucaacagcaaguagcugguccuacauuguugagaccucuucgucagacaacggaacuugcuauccaggcgauuuuaucgacuacgaggagcucagggagcagcugagcaguguguccucuuucgaacgguuugagauuuucccgaagacaagcuccuggcccaaucacgauucaaacaagggugucaccgccgcuuguccucaugcaggggccaaaaguuuuuauaagaaucugaucuggcucgugaaaaagggaaacagcuacccaaaauuaucuaaguccuauauaaaugacaagggcaaagaaguacugguucuuuggggcauccaccaccccucaacgagcgcugaucaacagaguuuguaccagaacgccgacgcguacguguucgucgggacuucucgcuauuccaagaaauuuaagccugagauugcaauccgaccaaaagugcguaaucaggagggaagaaugaacuacuauuggacccugguggaacccggugauaagauuacauucgaggccacuggcaaccuagucguuccuagguacgcuuuugccauggaacggaaugcagggagcggaaucauaauuucggacaccccagugcaugauugcaacacaaccugucaaacgccgaaaggcgcuaucaauacuucucuccccuuccagaacauucacccuaucacaaucgguaagugcccaaaguauguaaaauccaccaagcugcgccuugccacugggcugagaaaugugcccucaauucagaguaggggauuguuuggcgcgauagccggcuucaucgaagggggauggacagguauggucgacggcugguacggguaucaucaccagaacgaacaaggaagcggcuacgcagcugaccucaaauccacccagaaugccauugauaagaucacgaacaaaguuaauucugugauagagaagaugaacacccaguuuacagcuguggguaaggaguucaaucaccuggaaaaacggauugagaacuuaaauaagaaagucgacgauggguuccuggacaucuggacuuacaacgccgaacuccuugugcuguuggagaaugaacgcacccuagauuaucaugacagcaacguaaagaaccuguacgagaaaguucgaucacagcucaagaauaacgcaaaggagaucggcaauggauguuuugaguucuaucacaaaugcgauaacacauguauggaaagugugaagaauggcacuuacgacuauccuaaauacuccgaagaggccaagcugaacagagaagagauugauggggucaaacuugagagcaccaggaucuaucaaauucuggcuauauacucuacaguggcgucaaguuugguccucgugguuagccugggagcaaucuccuuuuggaugugcucuaaugguucguuacagugccggauuuguaucuga

SEQ ID NO: 133228 - RNA, 1701 nt, Artificial Sequence
  derived and/or modified CDS sequence (opt3) from hemagglutinin__InfluenzaA__ADJ80242
augaaggccauccuggugguccuccuuuacaccuucgcuacagcaaacgccgacacucugugcauuggcuaucacgcgaauaacagcacggauaccguugacacaguguuggagaaaaauguaacugugacccauuccgucaacuuacuggaagauaagcacaaugggaaacuauguaagcucagaggaguggcuccccugcaucuugguaaaugcaacauagccggcuggauccuggggaauccugagugugaaucuuugucaacagcaaguagcugguccuacauuguugagaccucuucgucagacaacggaacuugcuauccaggcgauuuuaucgacuacgaggagcucagggagcagcugagcaguguguccucuuucgaacgguuugagauuuucccgaagacaagcuccuggcccaaucacgauucaaacaagggugucaccgccgcuuguccucaugcaggggccaaaaguuuuuauaagaaucugaucuggcucgugaaaaagggaaacagcuacccaaaauuaucuaaguccuauauaaaugacaagggcaaagaaguacugguucuuuggggcauccaccaccccucaacgagcgcugaucaacagaguuuguaccagaacgccgacgcguacguguucgucgggacuucucgcuauuccaagaaauuuaagccugagauugcaauccgaccaaaagugcgugaucaggagggaagaaugaauuacuauuggacccugguggaacccggugacaagauuacauucgaggccacuggcaaccuagucguuccuagguacgcuuuugccauggaacggaacgcagggagcggaaucauaauuucggauaccccagugcaugacugcaauacaaccugucaaacgccgaaaggcgcuaucaacacuucucuccccuuccagaauauucacccuaucacaaucgguaagugcccaaaguauguaaaauccaccaagcugcgccuugccacugggcugagaaacgugcccucaauucagaguaggggauuguuuggcgcgauagccggcuucaucgaagggggauggacagguauggucgacggcugguacggguaucaucaccagaaugaacaaggaagcggcuacgcagcugaucucaaauccacccagaacgccauugacgagaucacgaauaaggugaacucuguuauagagaaaaugaauacccaguuuacagcuguggguaaggaguucaaccaccuggaaaagcggauugaaaauuuaaacaaaaaggucgaugacggguuccuggauaucuggacuuacaaugccgagcuccuugugcuguuggaaaacgagcgcacccuagacuaucaugauagcaauguaaagaaccuguacgagaagguucgaucacagcucaaaaacaaugcaaaggaaaucggcaacggauguuuugaguucuaucacaagugcgacaauacauguauggaaagugugaaaaacggcacuuacgauuauccuaaguacuccgaggaagccaaacugaauagagaggagauugacggggucaaacuugaaagcaccaggaucuaucaaauucuggcuauauacucuacagcggcaucaaguuuggugcucgucgugagccugggagccaucuccuuuuggaugugcucuaacgguucguuacagugccggauuuguaucuga

SEQ ID NO: 133229 - RNA, 1701 nt, Artificial Sequence; identical to SEQ ID NO: 132269
  derived and/or modified CDS sequence (opt3) from hemagglutinin__InfluenzaA__ADJ80243

SEQ ID NO: 133230 - RNA, 1701 nt, Artificial Sequence; identical to SEQ ID NO: 130717
  derived and/or modified CDS sequence (opt3) from hemagglutinin__InfluenzaA__ADJ80634

SEQ ID NO: 133231 - RNA, 1701 nt, Artificial Sequence; identical to SEQ ID NO: 132719
  derived and/or modified CDS sequence (opt3) from hemagglutinin__InfluenzaA__ADJ80644

SEQ ID NO: 133232 - RNA, 1701 nt, Artificial Sequence; identical to SEQ ID NO: 132719
  derived and/or modified CDS sequence (opt3) from hemagglutinin__InfluenzaA__ADJ80654

SEQ ID NO: 133233 - RNA, 1701 nt, Artificial Sequence; identical to SEQ ID NO: 131881
  derived and/or modified CDS sequence (opt3) from hemagglutinin__InfluenzaA__ADJ80674

SEQ ID NO: 133234 - RNA, 1701 nt, Artificial Sequence; identical to SEQ ID NO: 131881
  derived and/or modified CDS sequence (opt3) from hemagglutinin__InfluenzaA__ADJ80684

SEQ ID NO: 133235 - RNA, 1701 nt, Artificial Sequence
  derived and/or modified CDS sequence (opt3) from hemagglutinin__InfluenzaA__ADJ80694
augaaggccauccuggugguccuccuuuacaccuucgcuacagcaaacgccgacacucugugcauuggcuaucacgcgaauaacagcacggauaccguugacacaguguuggagaaaaauguaacugugacccauuccgucaacauauuagaagauaaucacaacgggaagcuguguaaacuaagaggaguggcuccccuccaucuggguaagugcaauaucgccggcuggauucuugggaacccugagugugaaucucugucaacagcaaguagcugguccuacaucguugagaccucuucgucagacaauggaacuugcuauccaggcgauuuuauugacuacgaagaguugagggagcagcucagcaguguguccucuuucgaacgguuugagaucuucccgaaaacaagcuccuggcccaaccacgauucaaauaagggugucaccgccgcuuguccucaugcaggggccaagaguuuuuauaaaaaccugauauggcuggugaagaaaggaaauagcuacccaaagcucucuaaauccuauaucaacgacaagggcaaggaaguauuaguucuguggggcauucaccaccccucaacgagcgcugaucaacagagucuuuaccagaaugccgacgcguacguguucgucgggucuucccgcuauagcaaaaaguuuaaaccugagaucgcaauucgaccaaaggugcgugaucaggagggaagaaugaacuacuauuggacuuugguggaacccggugacaaaaucaccuucgaggccacaggcaaccuggucguuccuagguacgcuuuugccauggaacggaaugcagggucgggaauaauuaucucugauacuccagugcaugacugcaacaccacaugucaaaccccgaagggcgcuauuaauacgucccuacccuuccagaacauccacccuaucacuauugguaaaugcccaaaguauguaaagucaacaaaacuccgccuggccaccgggcuuagaaaugugcccaguauacagagcaggggacuguuuggcgcgaucgccggcuucauugaagggggauggacugguauggucgacggcugguacggguaucaucaccagaacgaacaaggauccggcuacgcagcugauuugaagucuacacagaaugccaucgacgagauaaccaacaaagugaauagcguuauugagaagaugaacacgcaguuuaccgcuguggguaaagaguucaaucaccucgagaagcggaucgaaaaccugaauaagaaagucgaugacggguucuuagauaucuggacauacaacgccgagcugcucgugcuucuggaaaaugagcgcacuuuggacuaucaugauucaaacguaaagaaccuauacgagaaaguucgaagucagcugaagaauaacgcaaaagaagugggcaauggauguuuugaguucuaucacaagugcgacaacaccuguauggaauccgucaagaauggcacauacgauuauccuaaauacagcgaggaagccaagcucaacagagaggagauugacggggugaaacuggaaucuacuaggaucuaucaaauucuugcuauauacucaaccgcggcaaguagccuggucuuggugguuucccucggagccaucucuuuuuggaugugcucgaaugguagccugcagugccggauuuguaucuga

SEQ ID NO: 133236 - RNA, 1701 nt, Artificial Sequence; identical to SEQ ID NO: 131881
  derived and/or modified CDS sequence (opt3) from hemagglutinin__InfluenzaA__ADJ80704

SEQ ID NO: 133237 - RNA, 1701 nt, Artificial Sequence
  derived and/or modified CDS sequence (opt3) from hemagglutinin__InfluenzaA__ADJ80714
augaaggccauccuggugguccuccuuuacaccuucgcuacagcaaacgccgacacucugugcauuggcuaucacgcgaauaacagcacggauaccguugacacaguguuggagaaaaauguaacugugacccauuccgucaacuuacuggaagauaagcacaaugggaaacuauguaagcucagaggagcugcaccccugcaucuugguaaaugcaacauagccggcuggauccuggggaauccugagugugaaucuuugucaacagccaguagcugguccuacauuguggagaccucuucgucagacaacggaacuugcuauccaggcgauuuuaucgacuacgaggagcucagggagcagcugagcaguguuuccucuuucgaacgguuugagauuuucccgaagacaagcuccuggcccaaucacgauucaaacaagggugugaccgcugcauguccucaugccggggcuaaaaguuuuuauaagaaucugaucuggcucgucaaaaagggaaacagcuacccaaaauuaucuaaguccuauauaaaugacaagggcaaagaagugcugguacuuuggggcauccaccaccccucaacgagcgccgaucaacagaguuuguaccagaacgcggacgcauacguuuucguggggacuucucgcuauuccaagaaauuuaagccugagauugccauccgaccaaaaguccgugaucaggagggaagaaugaauuacuauuggacccugguggaacccggugacaagauuacauucgaggcuacuggcaaccuaguggucccuagguacgccuuugcaauggaacggaacgcugggagcggaaucauaauuucggauaccccaguucaugacugcaauacaaccugucaaacgccgaaaggcgccaucaacacuucucuccccuuccagaauauucacccuaucacaaucgguaagugcccaaaguaugugaaauccaccaagcugcgccuugcgacugggcugagaaacguacccucaauucagaguaggggauuguuuggcgccauagcaggcuucaucgaagggggauggacagguaugguggacggcugguacggguaucaucaccagaaugaacaaggaagcggcuacgcugccgaucucaaauccacccagaacgcuauugacaagaucacgaauaaagucaacucugugauagagaagaugaauacccaguuuacagccguugguaaggaguucaaccaccuggaaaaacggauugagaauuuaaacaagaaaguggaugacggguuccuggauaucuggacuuacaaugcagaacuccuuguccuguuggagaacgaacgcacccuagacuaucaugauagcaaugugaagaaccuguacgagaaaguacgaucacagcucaagaacaaugccaaggagaucggcaacggauguuuugaguucuaucacaaaugcgacaauacauguauggaaaguguuaagaacggcacuuacgauuauccuaaauacuccgaagaggcuaagcugaauagagaagagauugacggggugaaacuugagagcaccaggaucuaucaaauucuggcgauauacucuacagucgcaucaaguuuggugcucgucgugagccugggagccaucuccuuuuggaugugcucuaacgguucguuacagugccggauuuguaucuga

SEQ ID NO: 133238 - RNA, 1701 nt, Artificial Sequence; identical to SEQ ID NO: 130717
  derived and/or modified CDS sequence (opt3) from hemagglutinin__InfluenzaA__ADJ80724

SEQ ID NO: 133239 - RNA, 1701 nt, Artificial Sequence; identical to SEQ ID NO: 131881
  derived and/or modified CDS sequence (opt3) from hemagglutinin__InfluenzaA__ADJ80734

SEQ ID NO: 133240 - RNA, 1701 nt, Artificial Sequence; identical to SEQ ID NO: 131881
  derived and/or modified CDS sequence (opt3) from hemagglutinin__InfluenzaA__ADJ80744

SEQ ID NO: 133241 - RNA, 1701 nt, Artificial Sequence; identical to SEQ ID NO: 131881
  derived and/or modified CDS sequence (opt3) from hemagglutinin__InfluenzaA__ADJ80754

SEQ ID NO: 133242 - RNA, 1701 nt, Artificial Sequence
  derived and/or modified CDS sequence (opt3) from hemagglutinin__InfluenzaA__ADJ80774
augaaggccauccuggugguccuccuuuacaccuucgcuacagcaaacgccgacacucugugcauuggcuaucacgcgaauaacagcacggauaccguugacacaguguuggagaaaaauguaacugugacccauuccgucaacauauuagaagauaagcacaaugggaaacuguguaagcuaagaggaguggcuccccuccaucuggguaaaugcaacaucgccggcuggauucuugggaauccugagugugaaucucugucaacagcaaacaguuggagcuacaucguugagaccuccucuucggacaauggaacuugcuauccaggcgauuuuauugacuacgaagaguugagggagcagcucucaagcgugaguuccuucgaacgguuugagaucuucccgaagacaucuagcuggcccaaccacgauuccaauaagggugucaccgccgcuuguccucaugcaggggccaaaucauuuuauaagaaccugauauggcuggugaaaaagggaaauaguuacccaaaacucagcaagucuuauaucaacgacaagggcaaagaaguauuaguucuguggggcauucaccaccccuccacgucagcugaucaacagagccuuuaccagaaugccgacgcguacguguucgucgggaguucucgcuauuccaagaaauuuaagccugagaucgcaauucgaccaaaagugcgugaucaggagggaagaaugaacuacuauuggacuuugguggaacccggugacaagaucaccuucgaggccacaggcaaccuggucguuccuagguacgcuuuugccauggaacggaaugcagggagcggaauaauuaucucggauacuccagugcaugacugcaacaccacaugucaaaccccgaaaggcgcuauuaauacgucucuacccuuccagaacauccacccuaucacuauugguaagugcccaaaguauguaaaauccacaaagcuccgccuggccaccgggcuuagaaaugugcccucaauacagaguaggggacuguuuggcgcgaucgccggcuucauugaagggggauggacugguauggucgacggcugguacggguaucaucaccagaacgaacaaggaagcggcuacgcagcugauuugaaauccacacagaaugccaucgacgagauaaccaacaagguaaauucuguuauugagaaaaugaacacgcaguuuaccgcuguggguaaggaguucaaucaccucgagaagcggaucgaaaaccugaauaaaaaggucgaugacggguucuuagauaucuggacauacaacgccgagcugcucgugcuucuggaaaaugagcgcacuuuggacuaucaugauagcaacgugaaaaaccuauacgagaagguucgaucacagcugaaaaauaacgcaaaggaagugggcaauggauguuuugaguucuaucacaagugcgacaacaccuguauggaaagugucaaaaauggcacauacgauuauccuaaguacuccgaggaagccaaacucaacagagaggagauugacggggugaagcuggaaagcacuaggaucuaucaaauucuugcuauauacucuaccgcggcaucaagucuggucuuggugguuagccucggagccaucuccuuuuggaugugcucuaaugguucgcugcagugccggauuuguaucuga

SEQ ID NO: 133243 - RNA, 1701 nt, Artificial Sequence
  derived and/or modified CDS sequence (opt3) from hemagglutinin__InfluenzaA__ADJ80784
augaaggccauccuggugguccuccuuuacaccuucgcuacagcaaacgccgacacucugugcauuggcuaucacgcgaauaacagcacggauaccguugacacaguguuggagaaaaauguaacugugacccauuccgucaacuuacuggaagauaagcacaaugggaaacuauguaagcucagaggaguggcuccccugcaucuugguaaaugcaacauagccggcuggauccuggggaauccugagugugaaucuuugucaacagcaaguagcugguccuacauuguugagaccucuucgucagacaacggaacuugcuauccaggcgauuuuaucgacuacgaggagcucagggagcagcugagcaguguguccucuuucgaacgguuugagauuuucccgaagacaagcuccuggcccaaucacgauucaaacaagggugucaccgccgcuuguccucaugcaggggccaaaaguuuuuauaagaaucugaucuggcucgugaaaaagggaaacagcuacccaaaauuaucuaaguccuauauaaaugacaagggcaaagaaguacugguucuuuggggcauccaccaccccucaacgagcgcugaucaacagaguuuguaccagaacgccgacgcguacguguucgucgggacuucucgcuauuccaagaaauuuaagccugagauugcaauccgaccaaaagugcgugaucaggagggaagaaugaauuacuauuggacccugguggaacccggugacaagauuacauucgaggccacuggcaaccuagucguuccuagguacgcuuuugccauggaacggaacgcagggagcggaaucauaauuucggauaccccagugcaugacugcaauacaaccugucaaacgccgaaaggcgcuaucaacacuucucuccccuuccacaauauucauccuaucacaaucgguaagugcccaaaguauguaaaauccaccaagcugcgccuugccacugggcugagaaacgugcccucaauucagaguaggggauuguuuggcgcgauagccggcuucaucgaagggggauggacagguauggucgacggcugguacggguaucaccaccagaaugaacagggaagcggcuacgcagcugaucucaaauccacccaaaacgccauugacaagaucacgaauaaagugaacucuguuauagagaagaugaauacccaguuuacagcuguggguaaggaguucaaccaucuggaaaaacggauugagaauuuaaacaagaaagucgaugacggguuccuggauaucuggacuuacaaugccgaacuccuugugcuguuggagaacgaacgcacccuagacuaucacgauagcaauguaaagaaccuguacgagaaaguucgaucacagcucaagaacaaugcaaaggagaucggcaacggauguuuugaguucuaucauaaaugcgacaauacauguauggaaagugugaagaacggcacuuacgauuauccuaaauacuccgaagaggccaagcugaauagagaagagauugacggggucaaacuugagagcaccaggaucuaucagauucuggcuauauacucuacaguggcgucaaguuugguccucgugguuagccugggagcaaucuccuuuuggaugugcucuaacgguucguuacaaugccggauuuguaucuga

SEQ ID NO: 133244 - RNA, 1701 nt, Artificial Sequence; identical to SEQ ID NO: 131881
  derived and/or modified CDS sequence (opt3) from hemagglutinin__InfluenzaA__ADJ80794

SEQ ID NO: 133245 - RNA, 1701 nt, Artificial Sequence; identical to SEQ ID NO: 132719
  derived and/or modified CDS sequence (opt3) from hemagglutinin__InfluenzaA__ADJ80804

SEQ ID NO: 133246 - RNA, 1701 nt, Artificial Sequence
  derived and/or modified CDS sequence (opt3) from hemagglutinin__InfluenzaA__ADJ80814
augaaggccauccuggugguccuccuuuacaccuucgcuacagcaaacgccgacacucugugcauuggcuaucacgcgaauaacagcacggauaccguugacacaguguuggagaaaaauguaacugugacccauuccgucaacuuacuggaagauaagcacaaugggaaacuauguaagcucagaggaguggcuccccugcaucuugguaaaugcaacauagccggcuggauccuggggaauccugagugugaaucuuugucaacagcaaguagcugguccuacauuguugagaccucuucgucagacaacggaacuugcuauccaggcgauuuuaucgacuacgaggagcucagggagcagcugagcaguguguccucuuucgaacgguuugagauuuucccgaagacaagcuccuggcccaaucacgauucaaacaagggugucaccgccgcuuguccucgcgcaggggccaaaaguuuuuauaagaaucugaucuggcucgugaaaaagggaaacagcuacccaaaauuaucuaaguccuauauaaaugacaagggcaaagaaguacugguucuuuggggcauccaucaccccucaacgagcgcugaucaacagaguuuguaccagaacgccgacgcguacguguucgucgggacuucucgauauuccaagaaauuuaagccugagauugcaauccguccaaaagugagagaucaggagggaaggaugaauuacuauuggacccugguggaacccggugacaagauuacauucgaggccacuggcaaccuagucguuccucgguacgcuuuugccaucgaacgcaacgcagggagcggaauaauuaucucggauaccccagugcacgacugcaauacaaccugucaaacgccgaaaggcgcuauuaacacuucucuccccuuccagaauauccauccuaucacaauugguaagugcccaaaguauguaaaauccaccaagcugagacuugccacugggcugaggaacgugcccucaauacagagucggggauuguuuggcgcgaucgccggcuucauugaagggggauggacagguauggucgacggcugguacggguaucaccaucagaaugaacaaggaagcggcuacgcagcugaucucaaauccacccagaacgccaucgacaagauaacgaauaaagugaacucuguuauugagaagaugaauacccaguuuacagcuguggguaaggaguucaaccaccuggaaaaacgcaucgagaauuuaaacaagaaagucgaugacggguuccuggauaucuggacuuacaaugccgaacuccuugugcuguuggagaacgaacgaacccuagacuaucacgauagcaauguaaagaaccuguacgagaaaguuagaucacagcucaagaacaaugcaaaggagauuggcaacggauguuuugaguucuaucauaaaugcgacaauacauguauggaaagugugaagaacggcacuuacgauuauccuaaauacuccgaagaggccaagcugaauagggaagagaucgacggggucaaacuugagagcacccggauuuaucaaauacuggcuaucuacucuacaguggcgucaaguuugguccucgugguuagccugggagcaauuuccuuuuggaugugcucuaacgguucguuacagugccguaucuguaucuga

SEQ ID NO: 133247 - RNA, 1701 nt, Artificial Sequence
  derived and/or modified CDS sequence (opt3) from hemagglutinin__InfluenzaA__ADJ80834
augaaggccauccuggugguccuccuuuacaccuucgcuacagcaaacgccgacacucugugcauuggcuaucacgcgaauaacagcacggauaccguugacacaguguuggagaaaaauguaacugugacccauuccgucaacuuacuggaagauaagcacaaugggaaacuauguaagcucagaggaguggcuccccugcaucuugguaaaugcaacauagccggcuggauccuggggaauccugagugugaaucuuugucaacagcaaguagcugguccuacauuguugagaccucuucgucagacaacggaacuugcuauccaggcgauuuuaucgacuacgaggagcucagggagcagcugagcaguguguccucuuucgaacgguuugagauuuucccgaagacaagcuccuggcccaaucacgauucaaacaagggugucaccgccgcuuguccucaugcaggggccaaaaguuuuuauaagaaucugaucuggcucgugaaaaagggaaacagcuacccaaaauuaucuaaguccuauauaaaugacaagggcaaagaaguacugguucuuuggggcauccaccaccccucaacgagcacugaucaacagaguuuguaccagaacgcugacgccuacguguucgucgggaccucucgcuauuccaagaaauuuaagccugagauugcgauccgaccaaaagugcgugaucaggagggaagaaugaauuacuauuggacacugguggaacccggugacaagauuacuuucgaggcaaccggcaaccuagucguuccuagguacgccuuugcuauggaacggaacagcgggucgggaaucauaauuucugauacaccagugcauuauugcaauaccacgugucaaacuccgaaaggcgccaucaacacaucccuccccuuccagaauauucacccuaucaccaucgguaagugcccaaaguacguaaaaucaacuaagcugcgccuugcaacagggcugagaaacgugcccaguauucagagcaggggauuguuuggcgcuauagccggcuucaucgaagggggauggaccgguauggucgacggcugguauggguaccaucaccagaaugaacaaggauccggcuacgcggccgaccucaaaucuacgcagaacgcaauugaugagaucaccaauaaggugaacagcguuauagagaaaaugaauacacaguuuacugcuguggguaaggaguucaaccaccuggaaaagcggauugaaaauuuaaacaaaaaggucgacgauggguuccuggacaucuggaccuauaaugccgagcuccuugugcuguuggaaaacgagcgcacacuagauuaccaugacucaaauguaaagaaccuguaugagaagguucgaagucagcucaaaaacaaugcuaaggaaaucggcaacggauguuuugaguucuaccacaagugcgauaauacuuguauggaauccgugaaaaacggcaccuaugacuacccuaaguauagcgaggaagccaaacugaauagagaggagauugauggggucaaacuugaaucuacaaggaucuaccaaauucuggcaauauacucaaccguggccaguagcuugguccucgugguuucccugggagcuaucucuuuuuggaugugcucgaacgguagcuuacagugccggauuuguaucuga

SEQ ID NO: 133248 - RNA, 1701 nt, Artificial Sequence; identical to SEQ ID NO: 132919
  derived and/or modified CDS sequence (opt3) from hemagglutinin__InfluenzaA__ADJ80848

SEQ ID NO: 133249 - RNA, 1701 nt, Artificial Sequence
  derived and/or modified CDS sequence (opt3) from hemagglutinin__InfluenzaA__ADJ80858
augaagaccauccuggugguccuccuuuacacauucgccacugcuaacgcagacacgcugugcauuggcuaucacgccaauaacagcaccgauacaguugacacuguguuggagaaaaauguaaccgugacacauuccgucaacuuacuggaagauaagcacaaugggaaacuauguaagcucagaggaguggcgccccugcaucuugguaaaugcaacauagcuggcuggauccuggggaauccugagugugaaucuuugucaaccgccaguagcugguccuacauuguugagacuucuucgucagacaacggaacaugcuauccaggcgauuuuaucgacuacgaggagcucagggagcagcugagcaguguguccucuuucgaacgguuugagauuuucccgaagaccagcuccuggcccaaucacgauucaaacaagggugucacggcagccuguccucaugcuggggcaaaaaguuuuuauaagaaucugaucuggcucgugaaaaagggaaacagcuacccaaaauuaucuaaguccuauauaaaugacaagggcaaagaaguacugguucuuuggggcauccaccaccccucaacuagcgccgaucaacagaguuuguaccagaacgcugacgccuacguguucgucgggaccucucgcuauuccaagaaauuuaagccugagauugcgauccgaccaaaagugcgugaucaggagggaagaaugaauuacuauuggacacugguggaacccggugacaagauuacuuucgaggcaaccggcaaccuagucguuccuagguacgccuuugcuauggaacggaacgccgggagcggaaucauaauuucggauacaccagugcaugacugcaauaccacgugucaaacuccgaaaggcgcaaucaacacaucucuccccuuccagaauauucacccuaucaccaucgguaagugcccaaaguauguaaaauccacuaagcugcgccuugcuacagggcugagaaacgugcccucaauucagaguaggggauuguuuggcgccauagcgggcuucaucgaagggggauggaccgguauggucgacggcugguacggguaucaucaccagaaugaacaaggaagcggcuacgccgcagaucucaaauccacgcagaacgcuauugacaagaucaccaauaaagugaacucuguuauagagaagaugaauacacaguuuacugccguggguaaggaguucaaccaccuggaaaaacggauugagaauuuaaacaagaaagucgaugacggguuccuggauaucuggaccuacaaugcugaacuccuugugcuguuggagaacgaacgcacacuagacuaucaugauagcaauguaaagaaccuguacgagaaaguucgaucacagcucaagaacaaugccaaggagaucggcaacggauguuuugaguucuaucacaaaugcgacaauacuuguauggaaagugugaagaacggcaccuacgauuauccuaaauacuccgaagaggcaaagcugaauagagaagagauugacggggucaaacuugagagcacaaggaucuaucaaauucuggccauauacucuaccguggcuucaaguuugguccucgugguuagccugggagcgaucuccuuuuggaugugcucuaacgguucguuacagugccggauuuguaucuga

SEQ ID NO: 133250 - RNA, 1701 nt, Artificial Sequence
  derived and/or modified CDS sequence (opt3) from hemagglutinin__InfluenzaA__ADJ80868
augaaggccauccuggugguccuccuuuacaccuucgcuacagcaaacgccgacacucugugcauuggcuaucacgcgaauaacagcacggauaccguugacacaguguuggagaaaaauguaacugugacccauuccgucaacuuacuggaagauaagcacaaugggaaacuauguaagcucagaggaguggcuccccugcaucuugguaaaugcaacauagccggcuggauccuggggaauccugagugugaaucuuugucaacagcaaguagcugguccuacauuguugagaccucuucgucagacaacggaacuugcuauccaggcgauuuuaucgacuacgaagaacucagggagcagcugagcaguguguccucuuucgaacgguuugagauuuucccgaagacaagcuccuggcccaaucacgauucaaacaagggugucaccgccgcuuguccuaaugcaggggccaaaaguuuuuauaagaaccugaucuggcucgugaaaaagggaaauagcuacccaaaauuaucuaaguccuauauaaacgacaagggcaaagaaguacugguucuuuggggcauccaucaccccucaacgagcgcugaucaacagaguuuguaccagaaugccgacgcguacguguucgucgggacuucucgcuauuccaagaaauuuaagccugagauugcaauccgaccaaaagugcgugaucaggagggaagaaugaacuacuauuggacccugguggaacccgguggcaagauuacauucgaggccacugggaaccuagucguuccuagguacgcuuuugccauggaacggaaugcaggaagcggcaucauaauuucggacaccccagugcacgauugcaacacaaccugucaaacgccgaaaggugcuaucaauacuucucuccccuuccagaacauucauccuaucacaaucgggaagugcccaaaguauguaaaauccaccaagcugcgccuugccacuggacugagaaaugugcccucaauucagaguaggggcuuguuuggcgcgauagccggguucaucgagggagguuggacaggcauggucgacgggugguacggauaucaccaucagaacgaacaaggcagcgguuacgcagcugaccucaaauccacccagaaugccauugauaagaucacgaacaaaguuaauucugugauagagaagaugaacacccaguuuacagcuguggggaaggaguucaaucaccuggaaaaacggauugagaacuuaaauaagaaagucgacgauggcuuccuggacaucuggacuuacaacgccgaacuccuugugcuguuggagaaugaacgcacccuagauuaucacgacagcaacguaaagaaccuguacgagaaaguucgaucacagcucaagaauaacgcaaaggagaucggaaauggcuguuuugaguucuaucauaaaugcgauaacacauguauggagagugugaagaaugggacuuacgacuauccuaaauacuccgaagaggccaagcugaacagagaagagauugauggagucaaacuugagagcaccaggaucuaucaaauucuggcuauauacucuacaguggcgucaaguuugguccucgugguuagccugggugcaaucuccuuuuggaugugcucuaauggcucguuacagugccggauuuguaucuga

SEQ ID NO: 133251 - RNA, 1701 nt, Artificial Sequence; identical to SEQ ID NO: 131881
  derived and/or modified CDS sequence (opt3) from hemagglutinin__InfluenzaA__ADJ80883

SEQ ID NO: 133252 - RNA, 1701 nt, Artificial Sequence; identical to SEQ ID NO: 131881
  derived and/or modified CDS sequence (opt3) from hemagglutinin__InfluenzaA__ADJ80893

SEQ ID NO: 133253 - RNA, 1701 nt, Artificial Sequence; identical to SEQ ID NO: 131881
  derived and/or modified CDS sequence (opt3) from hemagglutinin__InfluenzaA__ADJ80910

SEQ ID NO: 133254 - RNA, 1701 nt, Artificial Sequence; identical to SEQ ID NO: 130717
  derived and/or modified CDS sequence (opt3) from hemagglutinin__InfluenzaA__ADJ80927

SEQ ID NO: 133255 - RNA, 1701 nt, Artificial Sequence
  derived and/or modified CDS sequence (opt3) from hemagglutinin__InfluenzaA__ADJ80937
augaaggccauccuggugguccuccuuuacaccuucgcuacagcaaacgccgacacucugugcauuggcuaucacgcgaauaacagcacggauaccguugacacaguguuggagaagaauguaacugugacccauuccgucaacuuacuggaagauaagcacaaugggaaacuauguaagcucagaggaguggcuccccugcaucuugguaaaugcaacauagccggcuggauccuggggaauccugagugugaaucuuugucaacagcaaguagcugguccuacauuguugagaccucuucgucagacaacggaacuugcuauccaggcgauuuuaucgacuacgaggagcucagggagcagcugagcaguguguccucuuucgaacgguuugagauuuucccgaagacaagcuccuggcccaaucacgauucaaacaagggugucaccgccgcuuguccucaugcaggggccaaaaguuuuuauaagaaucugaucuggcucgugaaaaagggaaacagcuacccaaaauuaucuaaguccuauauaaaugacaagggcaaagaaguacugguucuuuggggcauccaccaccccucaacgagcgcugaucaacagaguuuguaccagaacgccgacgcguacgcauucguggggacuucucgcuauuccaagaaauuuaagccugagauugccauccgaccaaaaguccgugaucaggagggaagaaugaauuacuauuggacccugguggaacccggugacaagauuacauucgaggcuacuggcaaccuaguggucccuagguacgccuuugcaauggaacggaacgcugggagcggaaucauaauuucggauaccccaguucauaauugcaacacaaccugucaaacgccgaaaggcgccaucaauacuucucuccccuuccagaacauucacccuaucacaaucgguaagugcccaaaguaugugaaauccaccaagcugcgccuugcgacugggcugagaaauguacccucaauucagaguaggggauuguuuggcgccauagcaggcuucaucgaagggggauggacagguaugguggacggcugguacggguaucaucaccagaacgaacaaggaagcggcuacgcugccgaccucaaauccacccagaaugcuauugaugagaucacgaacaaggucaauucugugauagagaaaaugaacacccaguuuacagccguugguaaggaguucaaucaccuggaaaagcggauugaaaacuuaaauaaaaagguggacgauggguuccuggacaucuggacuuacaacgcagagcuccuuguccuguuggaaaaugagcgcacccuagauuaucaugacagcaacgugaaaucacuguacgagaagguacgaagucagcucaaaaacaaugccaaggaaaucggcaacggauguuuugaguucuaucacaagugcgauaauacauguauggaauccguuaaaaacggcacuuacgacuauccuaaguacagcgaggaagcuaaacugaauagagaggagauugauggggugaaacuugaaucuaccaggaucuaucaaauucuggcgauauacucaacagucgcaaguagcuuggugcucgucgugucccugggagccaucucuuuuuggaugugcucgaacgguagcuuacagugccggauuuguaucuga

SEQ ID NO: 133256 - RNA, 1701 nt, Artificial Sequence; identical to SEQ ID NO: 131881
  derived and/or modified CDS sequence (opt3) from hemagglutinin__InfluenzaA__ADJ80947

SEQ ID NO: 133257 - RNA, 1701 nt, Artificial Sequence; identical to SEQ ID NO: 131881
  derived and/or modified CDS sequence (opt3) from hemagglutinin__InfluenzaA__ADJ80967

SEQ ID NO: 133258 - RNA, 1701 nt, Artificial Sequence; identical to SEQ ID NO: 131881
  derived and/or modified CDS sequence (opt3) from hemagglutinin__InfluenzaA__ADJ80977

SEQ ID NO: 133259 - RNA, 1701 nt, Artificial Sequence
  derived and/or modified CDS sequence (opt3) from hemagglutinin__InfluenzaA__ADJ80993
augaaggccauccuggugguccuccuuuacaccuucgcuacagcaaacgccgacacucugugcauuggcuaucacgcgaauaacagcacggauaccguugacacaguguuggagaaaaauguaacugugacccauuccgucaacuuacuggaagauaagcacaaugggaaacuauguaagcucagaggaguggcuccccugcaucuugguaaaugcaacauagccggcuggauccuggggaauccugagugugaaucuuugucaacagcaaguagcugguccuacauuguugagaccucuucgucagacaacggaacuugcuauccaggcgauuuuaucgacuacgaggagcucagggagcagcugagcaguguguccucuuucgaacgguuugagauuuucccgaagacaagcuccuggcccaaucacgauucaaacaagggugucaccgccgcuuguccuaaugcaggggccaaaaguuuuuauaagaaccugaucuggcucgugaaaaagggaaauagcuacccaaaauuaucuaaguccuauauaaacgacaagggcaaagaaguacugguucuuuggggcauccaucaccccucaacgagcgcugaucaacagaguuuguaccagaaugccgacgcguacguguucgucgggacuucucgcuauuccaagaaauuuaagccugagauugcaauccgaccaaaagugcgugaucaggagggaagaaugaacuacuauuggacccugguggaacccggugacaagauuacauucgaggccacuggcaaccuagucguuccuagguacgcuuuugccauggaacggaaugcagggagcggaaucauaauuucggauaccccagugcacgacugcaacacaaccugucaaacgccgaaaggcgcuaucaauacuucucuccccuuccagaacauucauccuaucacaaucgguaagugcccaaaguauguaaaauccaccaagcugcgccuugccacugggcugagaaaugugcccucaauucagaguaggggauuguuuggcgcgauagccggcuucaucgaagggggauggacagguauggucgacggcugguacggguaucaccaucagaacgaacaaggaagcggcuacgcagcugaucucaaauccacccagaaugccauugacaagaucacgaacaaaguuaauucugugauagagaagaugaacacccaguuuacagcuguggguaaggaguucaaucaccuggaaaaacggauugagaacuuaaauaagaaagucgaugacggguuccuggauaucuggacuuacaacgccgaacuccuugugcuguuggagaaugaacgcacccuagacuaucacgauagcaacguaaagaaccuguacgagaaaguucgaucacagcucaagaauaacgcaaaggagaucggcaauggauguuuugaguucuaucauaaaugcgacaacacauguauggaaagugugaagaauggcacuuacgauuauccuaaauacuccgaagaggccaagcugaacagagaagagauugacggggucaaacuugagagcaccaggaucuaucaaauucuggcuauauacucuacaguggcgucaaguuugguccucgugguuagccugggagcaaucuccuuuuggaugugcucuaaugguucguuacagugccggauuuguaucuga

SEQ ID NO: 133260 - RNA, 1701 nt, Artificial Sequence
  derived and/or modified CDS sequence (opt3) from hemagglutinin__InfluenzaA__ADJ81003
augaaggccauccuggugguccuccuuuacaccuucgcuacagcaaacgccgacacucugugcauuggcuaucacgcgaauaacagcacggauaccguugacacaguguuggagaaaaauguaacugugacccauuccgucaacuuacuggaagauaagcacaaugggaaacuauguaagcucagaggaguggcuccccugcaucuugguaaaugcaacauagccggcuggauccuggggaauccugagugugaaucuuugucaacagcaaguagcugguccuacauuguugagaccucuucgucagacaacggaacuugcuauccaggcgauuuuaucgacuacgaggagcucagggagcagcugagcaguguguccucuuucgaacgguuugagauuuucccgaagacaagcuccuggcccaaucacgauucaaacaagggugucaccgccgcuuguccucaugcaggggccaaaaguuuuuauaagaaucugaucuggcucgugaaaaagggaaacagcuacccaaaauuaucuaaguccuauauaaaugacaagggcaaagaaguacugguucuuuggggcauccaccaccccucaacgagcgcugaucaacagaguuuguaccagaacgccgacgcguacguguucgucgggacuucucgcuauuccaagaaauuuaagccugagauugcaauccgaccaaaagugcgugaucaggagggaagaaugaauuacuauuggacccugguggaacccggugacaagauuacauucgaggccacuggcaaccuagucguuccuagguacgcuuuugccauggaacggaacgcagggagcggaaucauaauuucggauaccccagugcaugacugcaauacaaccugucaaacgccgaaaggcgcuaucaacacuucucuccccuuccagaauauucacccuaucacaaucgguaagugcccaaaguauguaaaauccaccaagcugcgccuugccacugggcugagaaacgugcccucaauucagaguaggggauuguuuggcgcgauagccggcuucaucgaagggggauggacagguauggucgacggcugguacggguaucaucaccagaaugaacaaggaagcggcuacgcagcugaucucaaauccacccagaacgccauugacaagaucacgaauaaagugaacucuguuauagagaagaugaauacccaguuuacagcuguggguaaggaguucaaccaccuggaaaaacggauugagaauuuaaacaagaaagucgaugacggguuccuggauaucuggacuuacaaugccgaacuccuugugcuguuggagaacgaacgcacccuagacuaucaugauagcaauguaaagaaccuguacgagaaaguucgaucacagcucaagaacaaugcaaaggagaucggcaacggauguuuugaguucuaucacaaaugcgacaauacauguauggaaagugugaagaacggcacuuacgauuauccuaaauacuccgaagaggccaagcugaauagagaaaagauugacggggucaaacuugagagcaccaggaucuaucaaauucuggcuauauacucuacaguggcgucaaguuugguccucgugguuagccugggagcaaucuccuuuuggaugugcucuaacgguucguuacagugccggauuuguaucuga

SEQ ID NO: 133261 - RNA, 1701 nt, Artificial Sequence; identical to SEQ ID NO: 132919
  derived and/or modified CDS sequence (opt3) from hemagglutinin__InfluenzaA__ADJ81013

SEQ ID NO: 133262 - RNA, 1701 nt, Artificial Sequence
  derived and/or modified CDS sequence (opt3) from hemagglutinin__InfluenzaA__ADJ81023
augaaggccauccuggugguccuccuuuacaccuucgcuacagcaaacgccgacacucugugcauuggcuaucacgcgaauaacagcacggauaccguugacacaguguuggagaagaauguaacugugacccauuccgucaacuuacuggaagauaagcacaaugggaaacuauguaagcucagaggaguggcuccccugcaucuugguaaaugcaacauagccggcuggauccuggggaauccugagugugaaucuuugucaacagcaaguagcugguccuacauuguugagaccucuucgucagacaacggaacuugcuauccaggcgauuuuaucgacuacgaggagcucagggagcagcugagcaguguguccucuuucgaacgguuugagauguucccgaagacaagcuccuggcccaaucacgauucaaacaagggugucaccgccgcuuguccucaugcaggggccaaaaguuuuuauaagaaucugauuuggcucgugaaaaagggaaacagcuacccaaaauuaaauaagucuuauaucaacgacaagggcaaagaaguacugguucuuuggggcauacaccaccccuccacgucagcugaucaacagagcuuguaccagaaugccgacgcguacguguucgucgggacuagccgcuauucuaagaaauuuaagccugagaucgcaauucgaccaaaagugcgugaucaggagggaagaaugaacuacuauuggacccugguggaacccggugacaagaucacauucgaggccacuggcaaccuagucguuccuagguacgcuuuugccauggaacggaaugcaggguccggaauuaucauaagcgauaccccagugcaugacugcaacacaaccugucaaacgccgaaaggcgcuauuaauacuucgcuccccuuccagaacauccacccuauuacaaucgguaagugcccaaaguauguaaaaucuaccaagcugcgccuugccacugggcugagaaaugugcccuccauccagucaaggggauuguuuggcgcgauugccggcuucauagaagggggauggacagguauggucgacggcugguacggguaucaucaccagaacgaacaaggaaguggcuacgcagcugaucucaaaagcacccagaaugccaucgacgagauuacgaacaagguaaauuccguuaucgagaaaaugaacacccaguuuacagcuguggguaaggaguucaaucaccuggaaaagcggauagaaaacuuaaauaaaaaggucgaugacggguuccuggauauuuggacuuacaacgccgagcuccuugugcuguuggaaaaugagcgcacccuagacuaucaugauucuaacgugaaaaaccuguacgagaagguucgaagccagcucaaaaauaacgcaaaggaaaucggcaauggauguuuugaguucuaucacaagugcgacaacacauguauggaaucagugaaaaauggcacuuacgauuauccuaaguacagugaggaagccaaacugaacagagaggagaucgacggggucaaacuugaauccaccaggauuuaucaaauccuggcuauuuacagcacaguggcgucuucauugguccucgugguuagucugggagcaauaaguuuuuggaugugcuccaaugguucuuuacagugccggaucuguauuuga

SEQ ID NO: 133263 - RNA, 1701 nt, Artificial Sequence; identical to SEQ ID NO: 131881
  derived and/or modified CDS sequence (opt3) from hemagglutinin__InfluenzaA__ADJ81033

SEQ ID NO: 133264 - RNA, 1701 nt, Artificial Sequence; identical to SEQ ID NO: 130717
  derived and/or modified CDS sequence (opt3) from hemagglutinin__InfluenzaA__ADJ81043

SEQ ID NO: 133265 - RNA, 1701 nt, Artificial Sequence
  derived and/or modified CDS sequence (opt3) from hemagglutinin__InfluenzaA__ADJ81053
augaaggccauccuggugguccuccuuuacaccuucacaacugcuaacgcagacacgcugugcauuggcuaucacgccaauaacagcaccgauacaguugacacuguguuggagaaaaauguaaccgugacacauuccgucaacuuacuggaagauaagcacaaugggaaacuauguaagcucagaggaguggcgccccugcaucuugguaaaugcaacauagcuggcuggauccuggggaauccugagugugaaucuuugucaaccgccaguagcugguccuacauuguugagacuucuucgucagacaacggaacaugcuauccaggcgauuuuaucgacuacgaggagcucagggagcagcugagcaguguguccucuuucgaacgguuugagauuuucccgaagaccagcuccuggcccaaucacgauucaaacaagggugucacggcagccuguccucaugcuggggcaaaaaguuuuuauaagaaucugaucuggcucgugaaaaagggaaacagcuacccaaaauuaucuaaguccuauauaaaugacaagggcaaagaaguacugguucuuuggggcauccaccaccccucaacuagcgccgaucaacagaguuuguaccagaacgcugacgccuacguguucgucgggaccucucgcuauuccaagaaauuuaagccugagauugcgauccgaccaaaagugcgugaucaggagggaagaaugaauuacuauuggacacugguggaacccggugacaagauuacuuucgaggcaaccggcaaccuagucguuccuagguacgccuuugcuauggaacggaacgccgggagcggaaucauaauuucggauacaccagugcaugacugcaauaccacgugucaaacuccgaaaggcgcaaucaacacaucucuccccuuccagaauauucacccuaucaccaucgguaagugcccaaaguauguaaaauccacuaagcugcgccuugcuacagggcugagaaacgugcccucaauucagaguaggggauuguuuggcgccauagcgggcuucaucgaagggggauggaccgguauggucgacggcugguacggguaucaucaccagaaugaacaaggaagcggcuacgccgcagaucucaaauccacgcagaacgcuauugacaagaucaccaauaaagugaacucuguuauagagaagaugaauacacaguuuacugccguggguaaggaguucaaccaccuggaaaaacggauugagaauuuaaacaagaaagucgaugacggguuccuggauaucuggaccuacaaugcugaacuccuugugcuguuggagaacgaacgcacacuagacuaucaugauagcaauguaaagaaccuguacgagaaaguucgaucacagcucaagaacaaugccaaggagaucggcaacggauguuuugaguucuaucacaaaugcgacaauacuuguauggaaagugugaagaacggcaccuacgauuauccuaaauacuccgaagaggcaaagcugaauagagaagagauugacggggucaaacuugagagcacaaggaucuaucaaauucuggccauauacucuaccguggcuucaaguuugguccucgugguuagccugggagcgaucuccuuuuggaugugcucuaacgguucguuacagugccggauuuguaucuga

SEQ ID NO: 133266 - RNA, 1701 nt, Artificial Sequence; identical to SEQ ID NO: 131881
  derived and/or modified CDS sequence (opt3) from hemagglutinin__InfluenzaA__ADJ81063

SEQ ID NO: 133267 - RNA, 1701 nt, Artificial Sequence; identical to SEQ ID NO: 131661
  derived and/or modified CDS sequence (opt3) from hemagglutinin__InfluenzaA__ADJ84772

SEQ ID NO: 133268 - RNA, 1701 nt, Artificial Sequence
  derived and/or modified CDS sequence (opt3) from hemagglutinin__InfluenzaA__ADJ88782
augaagaccaucauugcccugagcuacaugcucugccuuguguucgcucagaaacugcccggcaacgacaauuccacagcaacuuuguguuuagggcaccaugccgucccuaacggaacgauaguuaagaccaucacaaaugaucaaauugaggugacuaacgcgaccgaacugguacagucuucaaguacaggugagaucugcgacagcccacaccagauucuagauggcgaaaauuguacccucaucgacgcucugcuuggggauccgcagugcgacggauuucaaaacaaaaagugggaucuguucguggagagauccaaagccuauucuaauuguuaccccuaugacgucccugauuacgcaucguugaggucacucauagccagcaguggcacucuggaauuuaacaaugaguccuucaacuggacaggugugacccagaaugggacgucuagcgcuugcauccggcgcuccaacaauucauuuuucagucgacugaacuggcucacucauuuaaaguuuaaguauccagcacugaauguuaccaugcccaacaacgagcaguucgacaaacuuuacauuuggggagugcaccauccuggcacagauaaugaccagaucuuuuuguaugcccaagcuagcggccguauuacugucucuaccaagagaucccagcagacagugaucccaaacauagggucaaggccccggguacgcaauauuccuagcagaaucaguauuuacuggaccaucguuaaaccaggagauauccugcuaauuaacucuacggguaaucucauagccccgaggggcuacuucaagauccgguccgggaaaagcucgauuaugcgcucugacgcgcccaucggaaaguguaacuccgaaugcauaacuccuaauggcucaauuccaaacgacaagcccuuucagaaugugaaccgaaucacauauggugcauguccuagauacgucaaacaaaauacccugaagcuggccacugggaugaggaacgugccagagaaacagacacggggaaucuucggcgcuauugccggcuuuaucgaaaaugggugggagggaaugguggaugguugguauggcuuccgucaccagaacagugaggggcgcggacaagcagcugaccuuaagagcacccaggccgcgauugaucagauaaauggcaaauugaacagacucaucgguaagacgaacgaaaaauuccaccagauugagaaggaauuuuccgaggucgaagggaggauccaagaccuggagaaguacguugaggauaccaaaaucgacuuauggucuuauaaugccgaacugcucguggcacuugagaaccagcauacaauugaucugacugacagcgaaaugaauaaguuguucgagaaaaccaagaaacagcuaggcgaaaacgcugaggauaugggaaauggcugcuuuaagauauaccacaagugugacaacgccugcaucgggucaauucggaauggaacauaugaucaugacguauaccgagacgaggcucugaacaaucgcuuccagaucaaagguguggaacucaagaguggcuacaaagauuggauucuguggaucuccuuugccauaagcugcuuccuucugugugucgcauugcucggguuuaucaugugggccugccaaaagggaaacauuagauguaauaucugcauuuga

SEQ ID NO: 133269 - RNA, 1701 nt, Artificial Sequence
  derived and/or modified CDS sequence (opt3) from hemagglutinin__InfluenzaA__ADK21733
augaaggccauccuggugguccuccuuuacaccuucgcuacagcaaacgccgacacucugugcauuggcuaucacgcgaauaacagcacggauaccguugacacaguguuggagaaaaauguaacugugacccauuccgucaacuuacuggaagauaagcacaaugggaaacuauguaagcucagaggaguggcuccccugcaucuugguaaaugcaacauagccggcuggauccuggggaauccugagugugaaucuuugucaacagcaaguagcugguccuacauuguugagaccucuucgucagacaacggaacuugcuauccaggcgauuuuaucgacuacgaggagcucagggagcagcugagcaguguguccucuuucgaacgguuugagauuuucccgaagacaagcuccuggcccaaucacgauucaaacaagggugucaccgccgcuuguccucaugcaggggccaaaaguuuuuauaagaaucugaucuggcucgugaaaaagggaaacagcuacccaaaauuaucuaaguccuauauaaaugacaagggcaaagaaguacugguucuuuggggcauccaccaccccucaacgagcacugaucaacagaguuuguaccagaacgcugacgccuacguguucgucgggaccucucgcuauuccaagaaauuuaagccugagauugcgauccgaccaaaagugcgugaucaggagggaagaaugaauuacuauuggacacugguggaacccggugacaagauuacuuucgaggcaaccggcaaccuagucguuccuagguacgccuuugcuauggaacggaacgccgggagcggaaucauaauuucggauacaccagcacaugacugcaauaccacgugucaaacuccgaaaggcgcuaucaacacaucucuccccuuccagaauauucacccuaucaccaucgguaagugcccaaaguaugugaaauccacuaagcugcgccuugccacagggcugagaaacguacccucaauucagaguaggggauuguuuggcgcgauagccggcuucaucgaagggggauggaccgguaugguggacggcugguacggguaucaucaccagaaugaacaaggaagcggcuacgcagcugaucucaaauccacgcagaacgccauugacaagaucaccaauaaagucaacucugugauagagaagaugaauacacaguuuacugcuguugguaaggaguucaaccaccuggaaaaacggauugagaauuuaaacaagaaaguggaugacggguuccuggauaucuggaccuacaaugccgaacuccuuguccuguuggagaacgaacgcacacuagacuaucaugauagcaaugugaagaaccuguacgagaaaguacgaucacagcucaagaacaaugcaaaggagaucggcaacggauguuuugaguucuaucacaaaugcgacaauacuuguauggaaaguguuaagaacggcaccuacgauuauccuaaauacuccgaagaggccaagcugaauagagaagagauugacggggugaaacuugagagcacaaggaucuaucaaauucuggcuauauacucuaccgucgcgucaaguuuggugcucgucgugagccugggagcaaucuccuuuuggaugugcucuaacgguucguuacagugccggauuuguaucuga

SEQ ID NO: 133270 - RNA, 1701 nt, Artificial Sequence
  derived and/or modified CDS sequence (opt3) from hemagglutinin__InfluenzaA__ADK21743
augaaggccauccuggugguccuccuuuacaccuucgcuacagcaaacgccgacacucugugcauuggcuaucacgcgaauaacagcacggauaccguugacacaguguuggagaaaaauguaacugugacccauuccgucaacuuacuggaagauaagcacaaugggaaacuauguaagcucagaggaguggcuccccugcaucuugguaaaugcaacauagccggcuggauccuggggaauccugagugugaaucuuugucaacagcaaguagcugguccuacauuguugagaccucuucgucagacaacggaacuugcuauccaggcgauuuuaucgacuacgaggagcucagggagcagcugagcaguguguccucuuucgaacgguuugagauuuucccgaagacaagcuccuggcccaaucacgauucaaacaagggugucaccgccgcuuguccucaugcaggggccaaaaguuuuuauaagaaucugaucuggcucgugaaaaagggaaacagcuacccaaaaauaucuaauuccuauaucaacgacaagggcaaggaaguauuaguucuguggggcauucaccaccccucaacgagcgcugaucaacagagucuuuaccagaaugccgacgcguacguguucgucgggacuucucgcuauuccaaaaaguuuaaaccugagaucgcaauucgaccaaaggugcgugaucaggagggaagaaugaacuacuauuggaccuugguggaacccggugacaaaaucacauucgaggccacuggcaaccuggucguuccuagguacgcuuuugccauggaacggaaugcagggagcggaauaauuaucucggauaccccagcucaugacugcaacacaaccugucaaacgccgaagggcgccauuaauacuucucuacccuuccagaacauccacccuaucacaauugguaaaugcccaaaguaugugaaguccaccaaacuccgccuggcgacugggcuuagaaauguacccucaauacagaguaggggacuguuuggcgccaucgcaggcuucauugaagggggauggacagguaugguggacggcugguacggguaucaucaccagaacgaacaaggaagcggcuacgcugccgauuugaaguccacccagaaugcuaucgacgagauaacgaacaaagucaauucugugauugagaagaugaacacccaguuuacagccguugguaaagaguucaaucaccucgaaaagcggaucgaaaaccugaauaagaaaguggaugacggguucuuagauaucuggacuuacaacgcagagcugcucguccuucuggaaaaugagcgcaccuuggacuaucaugauagcaacgugaagaaccuauacgagaaaguacgaucacagcugaagaauaacgccaaagaaauuggcaauggauguuuugaguucuaucacaagugcgacaacacauguauggaaaguguuaagaauggcacuuacgauuauccuaaauacuccgaggaagcuaagcucaacagagaggagaucgacggggugaaacuggaaagcaccaggauuuaucaaauacuugcgaucuacucuacagucgcaucaagucugguguuggucgugagccucggagccauuuccuuuuggaugugcucuaaugguucgcugcagugccggaucuguaucuga

SEQ ID NO: 133271 - RNA, 1701 nt, Artificial Sequence
  derived and/or modified CDS sequence (opt3) from hemagglutinin__InfluenzaA__ADK21753
augaaggccauccuggugguccuccuuuacaccuucgcuacagcaaacgccgacacucugugcauuggcuaucacgcgaauaacagcacggauaccguugacacaguguuggagaaaaauguaacugugacccauuccgucaacuuacuggaagauaagcacaaugggaaacuauguaagcucagaggaguggcuccccugcaucuugguaaaugcaacauagccggcuggauccuggggaauccugagugugaaucuuugucaacagcaaguagcugguccuacauuguugagaccucuucgucagacaacggaacuugcuauccaggcgauuuuaucgacuacgaagaacucagggagcagcugagcaguguguccucuuucgaacgguuugagauuuucccgaagacaagcuccuggcccaaucacgauucaaacaagggugucaccgccgcuuguccucaugcaggggccaaaaguuuuuauaagaaucugaucuggcucgugaaaaagggaaacagcuacccaaaauuaucuaaguccuauauaaaugacaagggcaaagaaguacugguucuuuggggcauccaccaccccucaacgagcgcugaucaacagaguuuguaccagaacgccgacgcguacguguucgucgggacuucucgcuauuccaagaaauuuaagccugagauugcaauccgaccaaaagugcgugaucaggagggaagaaugaauuacuauuggacccugguggaacccggugacaagauuacauucgaggccacuggcaaccuagucguuccuagguacgcuuuugccauggaagggaacgcaggaagcggcaucauaauuucggauaccccagugcaugacugcaauacaaccugucaaacgccgaaaggugcuaucaacacuucucuccccuuccagaauauucacccuaucacaaucgggaagugcccaaaguauguaaaauccaccaagcugcggcuugccacuggacugcgcaacgugcccucaauucagaguagaggcuuguuuggcgcgauagccggguucaucgagggagguuggacaggcauggucgacgggugguacggauaucaucaccagaaugaacaaggcagcgguuacgcagcugaucucaaauccacccagaacgccauugacaagaucacgaauaaagugaacucuguuauagagaagaugaauacccaguuuacagcuguggggaaggaguucaaccaccuggagaaaaggauugagaauuuaaacaagaaagucgaugacggcuuccuggauaucuggacuuacaaugccgaacuccuugugcuguuggagaacgaacggacccuagacuaucaugauagcaauguaaagaaccuguacgagaaaguucgcucacagcucaagaacaaugcaaaggagaucggaaacggcuguuuugaguucuaucacaaaugcgacaauacauguauggaaagugugaagaacgggacuuacgauuauccuaaauacuccgaagaggccaagcugaaucgagaagagauugacggagucaaacuugagagcaccagaaucuaucaaauucuggcuauauacucuacaguggcgucaaguuugguccucgugguuagccugggugcaaucuccuuuuggaugugcucuaacggcucguuacagugcaggauuuguaucuga

SEQ ID NO: 133272 - RNA, 1701 nt, Artificial Sequence
  derived and/or modified CDS sequence (opt3) from hemagglutinin__InfluenzaA__ADK21763
augaaggccauccuggugguccuccuuuacaccuucgcuacagcaaacgccgacacucugugcauuggcuaucacgcgaauaacagcacggauaccguugacacaguguuggagaaaaauguaacugugacccauuccgucaacuuacuggaagauaagcacaaugggaaacuauguaagcucagaggaguggcuccccugcaucuugguaaaugcaacauagccggcuggauccuggggaauccugagugugaaucuuugucaacagcaaguagcugguccuacauuguugagaccucuucgucagacaacggaacuugcuauccaggcgauuuuaucgacuacgaggagcucagggagcagcugagcaguguguccucuuucgaacgguuugagauuuucccgaagacaagcuccuggcccaaucacgauucaaacaagggugucaccgccgcuuguccucaugcaggggccaaaaguuuuuauaagaaucugaucuggcucgugaaaaagggaaacagcuacccaaaauuaucuaaguccuauauaaaugacaagggcaaagaaguacugguucuuuggggcauccaccaccccucaacgagcgcugaucaacagaguuuguaccagaacgccgacgcguacguguucgucgggacuucuaaguauuccaaaaaguuuaaaccugagauugcaauccgcccaaaggugcgagaucaggagggacguaugaauuacuauuggacccugguggaacccggugacaaaauuacauucgaggccacuggcaaccuagucguuccuagauacgcuuuugccauggaaaggaacgcagggagcggaaucauaauuucggauaccccagugcaugacugcaauacaaccugucaaacgccgaagggcgcuaucaacacuucucuccccuuccagaauauucacccuaucacaaucgguaagugcccaaaauauguaaaguccaccaaacugcggcuugccacugggcugcgcaacgugcccucaauucagaguagaggauuguuuggcgcgauagccggcuucaucgaagggggauggacagguauggucgacggcugguacggguaucaucaccagaaugaacaaggaagcggcuacgcagcugaucucaaguccacccagaacgccauugacgagaucacgaauaaagugaacucuguuauagagaagaugaauacccaguuuacagcuguggguaaggaauuuaaccaccuggagaaaaggauugaaaauuuaaacaagaaagucgaugacggguuccuggauaucuggacuuacaaugccgagcuccuugugcuguuggaaaacgagcggacccuagacuaucaugauagcaauguaaagaaccuguacgagaaaguucgcucacagcucaagaacaaugcaaaggaaaucggcaacggauguuucgaguucuaucacaaaugcgacaauacauguauggaaagugugaagaacggcacuuacgauuauccuaaauacuccgaggaagccaagcugaaucgagaggagauugacggggucaaacuugaaagcaccagaaucuaucaaauucuggcuauauacucuacaguggcgucaaguuugguccucgugguuagccugggagcaaucuccuuuuggaugugcucuaacgguucguuacagugcaggauuuguaucuga

SEQ ID NO: 133273 - RNA, 1701 nt, Artificial Sequence; identical to SEQ ID NO: 131881
  derived and/or modified CDS sequence (opt3) from hemagglutinin__InfluenzaA__ADK21773

SEQ ID NO: 133274 - RNA, 1701 nt, Artificial Sequence; identical to SEQ ID NO: 131881
  derived and/or modified CDS sequence (opt3) from hemagglutinin__InfluenzaA__ADK21783

SEQ ID NO: 133275 - RNA, 1701 nt, Artificial Sequence; identical to SEQ ID NO: 130717
  derived and/or modified CDS sequence (opt3) from hemagglutinin__InfluenzaA__ADK21813

SEQ ID NO: 133276 - RNA, 1701 nt, Artificial Sequence; identical to SEQ ID NO: 132137
  derived and/or modified CDS sequence (opt3) from hemagglutinin__InfluenzaA__ADK21823

SEQ ID NO: 133277 - RNA, 1701 nt, Artificial Sequence
  derived and/or modified CDS sequence (opt3) from hemagglutinin__InfluenzaA__ADK21833
augaaggccauccuggugguccuccuuuacaccuucgcuacagcaaacgccgacacucugugcauuggcuaucacgcgaauaacagcacggauaccguugacacaguguuggagaaaaauguaacugugacccauuccgucaacuuacuggaagauaagcacaaugggaaacuauguaagcucagaggaguggcuccccugcaucuugguaaaugcaacauagccggcuggauccuggggaauccugagugugaaucuuugucaacagcaaguagcugguccuacauuguugagaccucuucgucagacaacggaacuugcuauccaggcgauuuuaucgacuacgaggagcucagggagcagcugagcaguguguccucuuucgaacgguuugagauuuucccgaagacaagcuccuggcccaaucacgauucaaacaagggugucaccgccgcuuguccucaugcaggggccaaaaguuuuuauaagaaucugaucuggcucgugaaaaagggaaacagcuacccaaaauuaucuaaguccuauauaaaugacaagggcaaagaaguacugguucuuuggggcauccaccaccccucaacgagcgcugaucaacagaguuuguaccagaacgccgacgcguacguguucgucgggacuucucgcuauuccaagaaauuuaagccugagauugcaauccgaccaaaagugcgugaucaggagggaagaaugaauuacuauuggacccugguggaacccggugacaagauuacauucgaggccacuggcaaccuagucguuccuagguacgcuuuugccauggaacggaacgcagggagcggaaucauaauuucggauaccccagugcgcgacugcaauacaaccugucaaacgccgaaaggcgcuaucaacacuucucuccccuuccagaauauucauccuaucacaaucgguaagugcccaaaguauguaaaauccaccaagcugagacuugccacugggcugaggaacgugcccucaauucagagucggggauuguuuggcgcgauagccggcuucaucgaagggggauggacagguauggucgacggcugguacggguaucaccaucagaaugaacaaggaagcggcuacgcagcugaucucaaauccacccagaacgccauugacgagaucacgaauaaggugaacucuguuauagagaaaaugaauacccaguuuacagcuguggguaaggaguucaaccaccuggaaaagcgcauugaaaauuuaaacaaaaaggucgaugacggguuccuggauaucuggacuuacaaugccgagcuccuugugcuguuggaaaacgagcgaacccuagacuaucacgauagcaauguaaagaaccuguacgagaagguuagaucacagcucaaaaacaaugcaaaggaaaucggcaacggauguuuugaguucuaucauaagugcgacaauacauguauggaaagugugaaaaacggcacuuacgauuauccuaaguacuccgaggaagccaaacugaauagggaggagauugacggggucaaacuugaaagcacccggaucuaucaaauucuggcuauauacucuacaguggcgucaaguuugguccucgugguuagccugggagcaaucuccuuuuggaugugcucuaacgguucguuacagugccguauuuguaucuga

SEQ ID NO: 133278 - RNA, 1701 nt, Artificial Sequence; identical to SEQ ID NO: 131881
  derived and/or modified CDS sequence (opt3) from hemagglutinin__InfluenzaA__ADK21843

SEQ ID NO: 133279 - RNA, 1701 nt, Artificial Sequence; identical to SEQ ID NO: 131070
  derived and/or modified CDS sequence (opt3) from hemagglutinin__InfluenzaA__ADK21853

SEQ ID NO: 133280 - RNA, 1701 nt, Artificial Sequence; identical to SEQ ID NO: 132366
  derived and/or modified CDS sequence (opt3) from hemagglutinin__InfluenzaA__ADK21863

SEQ ID NO: 133281 - RNA, 1701 nt, Artificial Sequence; identical to SEQ ID NO: 131164
  derived and/or modified CDS sequence (opt3) from hemagglutinin__InfluenzaA__ADK21873

SEQ ID NO: 133282 - RNA, 1701 nt, Artificial Sequence
  derived and/or modified CDS sequence (opt3) from hemagglutinin__InfluenzaA__ADK21883
augaaggccauccuggugguccuccuuuacaccuucgcuacagcaaacgccgacacucugugcauuggcuaucacgcgaauaacagcacggauaccguugacacaguguuggagaaaaauguaacugugacccauuccgucaacuuacuggaagauaagcacaaugggaaacuauguaagcucagaggaguggcuccccugcaucuugguaaaugcaacauagccggcuggauccuggggaauccugagugugaaucuuugucaacagcaaguagcugguccuacauuguugagaccucuucgucagacaacggaacuugcuauccaggcgauuuuaucgacuacgaggagcucagggagcagcugagcaguguguccucuuucgaacgguuugagauuuucccgaagacaagcuccuggcccaaucacgauucaaacaagggugucaccgccgcuuguccucaugcaggggccaaaaguuuuuauaagaaucugaucuggcucgugaaaaagggaaacagcuacccaaaauuaucuaaguccuauauaaaugacaagggcaaagaaguacugguucuuuggggcauccaccaccccucaacgagcgcugaucaacagaguuuguaccagaacgccgacgcguacguguucgucgggacuucucgcuauuccaagaaauuuaagccugagauugcaauccgaccaaaagugcgugaucaggagggaagaaugaauuacuauuggacccugguggaacccggugacaagauuacauucgaggccacuggcaaccuagucguuccuaaauacgcuuuugccauggaaaggaacgcagggagcggaaucauaauuucggauaccccagugcaugacugcaauacaaccugucaaacgccgaagggcgcuaucaacacuucucuccccuuccagaauauucacccuaucacaaucgguaagugcccaaaauauguaaaguccaccaaacugcggcuugccacugggcugcgcaacauucccucaauacagaguagaggauuguuuggcgcgaucgccggcuucauugaagggggauggacagguaugguggacggcugguacggguaucaucaccagaaugaacaaggaagcggcuacgcagcugaucucaaguccacccagaacgccaucgacgagauaacgaauaaagucaacucugugauugagaagaugaauacccaguuuacagcuguugguaaggaauuuaaccaccuggagaaaaggaucgaaaauuuaaacaagaaaguggaugacggguuccuggauaucuggacuuacaaugccgagcuccuuguccuguuggaaaacgagcggacccuagacuaucaugauagcaaugugaagaaccuguacgagaaaguacgcucacagcucaagaacaaugcaaaggaaauuggcaacggauguuucgaguucuaucacaaaugcgacaauacauguauggaaaguguuaagaacggcacuuacgauuauccuaaauacuccgaggaagccaagcugaaucgagaggagaucgacggggugaaacuugaaagcaccagaauuuaucaaauacuggcuaucuacucuacagucgcgucaaguuuggugcucgucgugagccugggagcaauuuccuuuuggaugugcucuaacgguucguuacagugcaggaucuguaucuga

SEQ ID NO: 133283 - RNA, 1701 nt, Artificial Sequence; identical to SEQ ID NO: 130717
  derived and/or modified CDS sequence (opt3) from hemagglutinin__InfluenzaA__ADK21893

SEQ ID NO: 133284 - RNA, 1701 nt, Artificial Sequence; identical to SEQ ID NO: 132314
  derived and/or modified CDS sequence (opt3) from hemagglutinin__InfluenzaA__ADK21903

SEQ ID NO: 133285 - RNA, 1701 nt, Artificial Sequence; identical to SEQ ID NO: 132427
  derived and/or modified CDS sequence (opt3) from hemagglutinin__InfluenzaA__ADK21913

SEQ ID NO: 133286 - RNA, 1701 nt, Artificial Sequence
  derived and/or modified CDS sequence (opt3) from hemagglutinin__InfluenzaA__ADK21923
augaaggccauccuggugguccuccuuuacaccuucgcuacagcaaacgccgacacucugugcauuggcuaucacgcgaauaacagcacggauaccguugacacaguguuggagaaaaauguaacugugacccauuccgucaacauauuagaagauaagcacaaugggaaacuguguaagcuaagaggaguggcuccccuccaucuggguaaaugcaacaucgccggcuggauucuugggaauccugagugugaaucucugucaacagcaaguagcugguccuacaucguugagaccucuucgucagacaacggaacuugcuauccaggcgauuuuauugacuacgaagaguugagggagcagcucagcaguguguccucuuucgaacgguuugagaucuucccgaagacaagcuccuggcccaaucacgauucaaacaagggugucaccgccgcuuguccucaugcaggggccaaaaguuuuuauaagaaucugauauggcuggugaaaaagggaaacagcuacccaaaacucucuaaguccuauaucaaugacaagggcaaagaaguauuaguucuguggggcauucaccaccccucaacgagcgcugaucaacagagucuuuaccagaacgccgacgcguacguguucgucgggacuucucgcuauuccaagaaauuuaagccugagaucgcaauucgaccaaaagugcgugaucaggagggaagaaugaauuacuauuggaccuugguggaacccggugacaagaucacauucgaggccacuggcaaccuggucguuccuagguacgcuuuugccauggaacggaacgcagggagcggaauaauuaucucggauaccccagugcaugacugcaauacaaccugucaaacgccgaaaggcgcuauuaacacuucucuacccuuccagaauauccacccuaucacaauugguaagugcccaaaguauguaaaauccaccaagcuccgccuggccacugggcuuagaaacgugcccucaauacagaguaggggacuguuuggcgcgaucgccggcuucauugaagggggauggacagguauggucgacggcugguacggguaucaucaccagaaugaacaaggaagcggcuacgcagcugauuugaaauccacccagaacgccaucgacgagauaacgaauaaggugaacucuguuauugagaaaaugaauacccaguuuacagcuguggguaaggaguucaaccaccucgagaagcggaucgaaaaucugaacaaaaaggucgaugacggguucuuagauaucuggacuuacaaugccgagcugcucgugcuucuggaaaacgagcgcaccuuggacuaucaugauagcaauguaaagaaccuauacgagaaagcacgaucacagcugaaaaacaaugccaaggaaauuggcaacggauguuuugaguucuaucacaagugcgacaauacauguauggaaaguguuaaaaacggcacuuacgauuauccuaaguacuccgaggaagcuaaacucaauagagagaagaucgacggggugaaacuggagagcaccaggauuuaucaaauacuugcgaucuacucuacagucgcaucaacccugguguuggucgugagucucggagccauuagcuuuuggaugugcuccaacgguucucugcagugccggaucuguaucuga

SEQ ID NO: 133287 - RNA, 1701 nt, Artificial Sequence
  derived and/or modified CDS sequence (opt3) from hemagglutinin__InfluenzaA__ADK21933
augaaggccauccuggugguccuccuuuacaccuucgcuacagcaaacgccgacacucugugcauuggcuaucacgcgaauaacagcacggauaccguugacacaguguuggagaaaaauguaacugugacccauuccgucgauuuacuggaagacaagcacaacgggaaacuauguaagcucagaggaguggcuccccugcaucuugguaaaugcaauauagccggcuggauccuggggaacccugagugugaaucuuugucaacagcaaguagcugguccuacauuguugagaccucuucgucagauaauggaacuugcuauccaggcgacuuuaucgauuacgaggagcucagggagcagcugagcaguguguccucuuucgaacgguuugagauuuucccgaagacaagcuccuggcccaaccacgacucaaauaagggugucaccgccgcuuguccuaacgcaggggccaaaaguuuuuauaagaaucugaucuggcucgugaaaaagggaaacagcuacccaaaauuaucuaaguccuauauaaaugauaagggcaaagaaguacugguucuuuggggcauccaucaccccucaacgagcgcugaccaacagaguuuguaccagaacgccgaugcguacguguucgucgggacuucucgcuauuccaagaaauuuaagccugagauugcaauccgaccaaaagugcgugaccaggagggaagaaugaauuacuauuggacccugguggaacccggugauaagauuacauucgaggccacuggcaaccuagucguuccuagguacgcuuuugccauggaacggaacgcagggagcggaaucauaauuucggacaccccagugcacgacugcaauacaaccugucaaacgccgaaaggcgcuaucaacacuucucuccccuuccagaauauucauccuaucacaaucgguaagugcccaaaguauguaaaauccaccaagcugcgccuugccacugggcugagaaacgugcccucaauucagaguaggggauuguuuggcgcgauagccggcuucaucgaagggggauggacagguauggucgauggcugguacggguaucaccaucagaaugaacaaggaagcggcuacgcagcugaccucaaauccacccagaacgccauugaugagaucacgaauaaggugaacucuguuauagagaaaaugaauacccaguuuacagcuguggguaaggaguucaaccaccuggaaaagcggauugaaaauuuaaacaaaaaggucgacgauggguuccuggacaucuggacuuacaaugccgagcuccuugugcuguuggaaaacgagcgcacccuagauuaucacgacagcaauguaaagaaccuguacgagaagguucgaucacagcucaaaaacaaugcaaaggaaaucggcaacggauguuuugaguucuaucauaagugcgauaauacauguauggaaagugugaaaaacggcacuuacgacuauccuaaguacuccgaggaagccaaacugaauagagaggagauugauggggucaaacuugaaagcaccaggaucuaucaaauucuggcuauauacucuacaguggcgucaaguuugguccucgugguuagccugggagcaaucuccuuuuggaugugcucuaacgguucguuacagugccggauuuguaucuga

SEQ ID NO: 133288 - RNA, 1701 nt, Artificial Sequence; identical to SEQ ID NO: 130717
  derived and/or modified CDS sequence (opt3) from hemagglutinin__InfluenzaA__ADK21943

SEQ ID NO: 133289 - RNA, 1701 nt, Artificial Sequence
  derived and/or modified CDS sequence (opt3) from hemagglutinin__InfluenzaA__ADK21953
augaaggccauccuggugguccuccuuuacaccuucgcuacagcaaacgccgacacucugugcauuggcuaucacgcgaauaacagcacggauaccguugacacaguguuggagaaaaauguaacugugacccauuccgucaacuuacuggaagauaagcacaaugggaaacuauguaagcucagaggaguggcuccccugcaucuugguaaaugcaacauagccggcuggauccuggggaauccugagugugaaucuuugucaacagcaaguagcugguccuacauuguugagaccucuucgucagacaacggaacuugcuauccaggcgauuuuaucgaccacgaagaacucagggagcagcugagcaguguguccucuuucgaacgguuugagauuuucccgaagacaagcuccuggcccaaucaugauucaaacaagggugucaccgccgcuuguccucacgcaggggccaaaaguuuuuacaagaaucugaucuggcucgugaaaaagggaaacagcuauccaaaauuaucuaaguccuacauaaaugacaagggcaaagaaguacugguucuuugggcuauccaccaucccucaacgagcgccgaucaacagaguuuguaucagaacgcggacgcauacguguucgucggcacuucucgcuacuccaagaaauuuaagccugagauugccauccgaccaaaagugcgugaucaggaggggagaaugaauuauuacuggacccugguggaacccggagacaagauuacauucgaggcuacugguaaccuagucguuccuagguaugccuuugcaauggaacggaacgcuggcagcgggaucauaauuucggauaccccagugcacgacugcaauacaaccugucaaacgccgaaaggagccaucaacacuucucuccccuuccagaauauucauccuaucacaaucggcaagugcccaaaguacguaaaauccaccaagcugcgccuugcgacuggucugagaaacgugcccucaauucagaguaggggguuguuuggagccauagcaggcuucaucgagggcggguggacaggaauggucgacgguugguauggcuaccaccaccagaaugaacaagggagcggauaugcugccgaucucaaauccacccagaacgcuauugacgagaucacgaauaaggugaacucuguuauagagaaaaugaauacccaguuuacagccgugggcaaggaguucaaccaucuggagaagcggauugaaaauuuaaacaaaaaggucgaugacgguuuccuggauaucuggacuuacaaugcagagcuccuugugcuguuggaaaacgagcgcacccuagacuaccacgauagcaauguaaagaaccuguaugagaagguucgaucacagcucaaaaacaaugccaaggaaaucgggaacggcuguuuugaguucuaccauaagugcgacaauacauguauggaaagugugaaaaacggaacuuaugauuacccuaaguauuccgaggaagcuaaacugaauagagaggagauugacggcgucaaacuugaaagcaccaggaucuaccaaauucuggcgauauauucuacaguggcaucaaguuugguccucgugguuagccugggggccaucuccuuuuggaugugcucuaacggaucguuacagugccggauuuguaucuga

SEQ ID NO: 133290 - RNA, 1701 nt, Artificial Sequence; identical to SEQ ID NO: 132904
  derived and/or modified CDS sequence (opt3) from hemagglutinin__InfluenzaA__ADK32390

SEQ ID NO: 133291 - RNA, 1701 nt, Artificial Sequence; identical to SEQ ID NO: 132904
  derived and/or modified CDS sequence (opt3) from hemagglutinin__InfluenzaA__ADK32400

SEQ ID NO: 133292 - RNA, 1701 nt, Artificial Sequence
  derived and/or modified CDS sequence (opt3) from hemagglutinin__InfluenzaA__ADK32420
augaaggccauccuggugguccuccuuuacaccuucgcuacagcaaacgccgacacucugugcauuggcuaucacgcgaauaacagcacggauaccguugacacaguguuggagaaaaauguaacugugacccauuccgucaacuuacuggaagauaagcacaaugggaaacuauguaagcucagaggaguggcuccccugcaucuugguaaaugcaacauagccggcuggauccuggggaauccugagugugaaucuuugucaacagcaaguagcugguccuacauuguugagaccucuucgucagacaacggaacuugcuauccaggcgauuuuaucgacuacgaagaacucagggagcagcugagcaguguguccucuuucgaacgguuugagauuuucccgaagacaagcuccuggcccaaucacgauucaaacaagggugucaccgccgcuuguccucaugcaggggccaaaaguuuuuauaagaaucugaucuggcucgugaaaaagggaaacagcuacccaaaauuaucuaaguccuauauaaaugacaagggcaaagaaguacugguucuuuggggcauccaccaccccucaacgagcgcugaucaacagaguuuguaccagaacgccgacgcguacguguucgucgggacuucucgcuauuccaagaaauuuaagccugagauugcaauccgaccaaaagugcgugagcaggaaggaagaaugaauuacuauuggacccugguggagcccggugauaagauuacauucgaagccacuggcaaccuagucguuccuagguacgcuuuugccauggagcggaacgcagggagcggaaucauaauuucggacaccccagugcaugauugcaauacaaccugucaaacgccgaaaggcgcuaucaacacuucucuccccuuccagaauauucacuccaucacaaucgguaagugcccuaaguauguaaaaucaaccaagcugcgccuugccacugggcugagaaacgugccaaguauucagagcaggggauuguuuggcgcgauagccggcuucaucgaagggggauggacagguauggucgacggcugguacggguaucaucaccagaaugagcaaggauccggcuacgcagcugaccucaaaucuacccagaacgccauugaugagaucacgaauaaggugaacagcguuauagaaaagaugaauacccaguuuacagcuguggguaaggaguucaaccaccuggaaaagcggauugagaauuuaaacaaaaaggucgacgauggguuccuggacaucuggacuuacaaugccgaacuccuugugcuguuggagaacgagcgcacccuagauuaucaugacucaaauguuaaaaaccuguacgaaaagguacgaaaccagcucaaaaauaacgcaaaggagaucggcaauggauguuuugaguucuaucacaagugcgauaacacauguauggagagugugaaaaauggcacuuacgacuaucccaaguacuccgaagaggccaaacugaacagagaggaaauugauggggucaaacuugagagcaccaggaucuaucaaauucuggcuauauacucuacaguggcgucaaguuugguccucgugguuagccugggagcaaucuccuuuuggaugugcucuaaugguucguuacagugccggauuuguaucuga

SEQ ID NO: 133293 - RNA, 1701 nt, Artificial Sequence; identical to SEQ ID NO: 132269
  derived and/or modified CDS sequence (opt3) from hemagglutinin__InfluenzaA__ADK32430

SEQ ID NO: 133294 - RNA, 1701 nt, Artificial Sequence
  derived and/or modified CDS sequence (opt3) from hemagglutinin__InfluenzaA__ADK32440
augaaggccauccuggugguccuccuuuacaccuucgcuacagcaaacgccgacacucugugcauuggcuaucacgcgaauaacagcacggauaccguugacacaguguuggagaaaaauguaacugugacccauuccgucaacuuacuggaagauaagcacaaugggaaacuauguaagcucagaggaguggcuccccugcaucuugguaaaugcaacauagccggcuggauccuggggaauccugagugugaaucuuugucaacagcaaguagcugguccuacauuguugagaccucuucgucagacaacggaacuugcuauccaggcgauuuuaucgacuacgaggagcucagggagcagcugagcaguguguccucuuucgaacgguuugagauuuucccgaagacaagcuccuggcccaaucacgauucaaacaagggugucaccgccgcuuguccucaugcaggggccaaaaguuuuuauaagaaucugaucuggcucgugaaaaagggaaacagcuacccaaaauuaucuaaguccuauauaaaugacaagggcaaagaaguacugguucuuuggggcauccaccaccccucaacgagcgcugaucaacagaguuuguaccagaacgccgacgcguacguguucgucgggacuucucgcuauuccaagaaauuuaagccugagauugcaauccgaccaaaagugcgugaucaggagggaagaaugaauuacuauuggacccugguggaacccggugacaagauuacauucgaggccacuggcaaccuagucguuccuagguacgcuuuugccauggaacggaacgcagggagcggaaucauaauuucggauaccccagugcaugacugcaauacaaccugucaaacgccgaaaggcgcuaucaacacuucucuccccuuccagaauauucacccuaucacaaucgguaagugcccaaaguauguaaaauccaccaagcugcgccuugccacugggcugagaaacgugcccucaauucagaguaggggauuguuuggcgcgauagccggcuucaucgaagggggauggacagguauggucgacggcugguacggguaucaucaccagaaugaacaaggaagcggcuacgcagcugaucucaaauccacccagaacgccauugacgguaucacgaauaaggugaacucuguuauagagaaaaugaauacccaguuuacagcuguggggaaggaguucaaccaccuggaaaagcggauugagaauuuaaacaaaaaggucgaugacggcuuccuggauaucuggacuuacaaugccgaacuccuugugcuguuggagaacgaacgcacccuagacuaucaugauagcaauguaaagaaccuguacgagaagguucgaucacagcucaaaaacaaugcaaaggagaucggaaacggcuguuuugaguucuaucacaagugcgacaauacauguauggaaagugugaaaaacgggacuuacgauuauccuaaguacuccgaagaggccaaacugaauagagaagagauugacggagucaaacuugagagcaccaggaucuaucaaauucuggcuauauacucuacaguggcgucaaguuugguccucgugguuagccugggugcaaucuccuuuuggaugugcucuaacggcucguuacagugccggauuuguaucuga

SEQ ID NO: 133295 - RNA, 1701 nt, Artificial Sequence
  derived and/or modified CDS sequence (opt3) from hemagglutinin__InfluenzaA__ADK32450
augaaggccauccuggugguccuccuuuacaccuucgcuacagcaaacgccgacacucugugcauuggcuaucacgcgaauaacagcacggauaccguugacacaguguuggagaaaaauguaacugugacccauuccgucaacauauuagaagauaagcacaaugggaaacuguguaagcuaagaggaguggcuccccuccaucuggguaaaugcaacaucgccggcuggauucuugggaauccugagugugaaucucugucaacagcaaguagcugguccuacaucguugagaccucuucgucagacaacggaacuugcuauccaggcgauuuuauugacuacgaagaguugagggagcagcucagcaguguguccucuuucgaacgguuugagaucuucccgaagacaagcuccuggcccaaucacgauucaaacaagggugucaccgccgcuuguccucaugcaggggccaaaaguuuuuauaagaaucugauauggcuggugaaaaagggaaacagcuacccaaaacucucuaaguccuauaucaaugacaagggcaaagaaguauuaguucuguggggcauucaccaccccucaacgagcgcugaucaacagagucuuuaccagaacgccgacgcguacguguucgucgggucuucccgcuauagcaagaaauuuaagccugagaucgcaauucgaccaaaagugcgugaucaggagggaagaaugaauuacuauuggacuuugguggaacccggugacaagaucaccuucgaggccacaggcaaccuggucguuccuagguacgcuuuugccauggaacggaacgcagggucgggaauaauuaucucugaugcuccagugcaugacugcaauacuaccugucaaacaccgaaaggcgccauuaacaccucccuacccuuccagaauauccacccuaucacgauugguaagugcccaaaguauguaaaaucaacuaagcuccgccuggcgacagggcuuagaaacgugcccaguauacagagcaggggacuguuuggcgccaucgcaggcuucauugaagggggauggaccgguauggucgacggcugguacggguaucaucaccagaaugaacaaggauccggcuacgcugccgauuugaaaucuacucagaacgcuaucgacgagauaacaaauaaggugaacagcguuauugagaaaaugaauacccaguuuacggccguggguaaggaguucaaccaccucgagaagcggaucgaaaaucugaacaaaaaggucgaugacggguucuuagauaucuggaccuacaaugcagagcugcucgugcuucuggaaaacgagcgcacauuggacuaucaugauucaaauguuaaaaaccuauacgagaagguacgaagucagcugaaaaacaaugccaaggaagugggcaacggauguuuugaguucuaucacaagugcgacaauacuuguauggaauccgucaaaaacggcaccuacgauuauccuaaguacagcgaggaagcuaaacucaauagagaggagauugacggggugaagcuggaaucuacaaggaucuaucaaauucuugcgauauacucaacugcagccaguagccuggucuuggugguuucccucggagcuaucucuuuuuggaugugcucgaacgguagccugcagugccggauuuguaucuga

SEQ ID NO: 133296 - RNA, 1701 nt, Artificial Sequence
  derived and/or modified CDS sequence (opt3) from hemagglutinin__InfluenzaA__ADK32460
augaaggccauccuggugguccuccuuuacaccuucgcuacagcaaacgccgacacucugugcauuggcuaucacgcgaauaacagcacggauaccguugacacaguguuggagaagaauguaacugugacccauuccgucaacuuacuggaagauaagcacaaugggaaacuauguaagcucagaggaguggcuccccugcaucuugguaaaugcaacauagccggcuggauccuggggaauccugagugugaaucuuugucaacagcaaguagcugguccuacauuguugagaccucuucgucagacaacggaacuugcuauccaggcgauuuuaucgacuacgaggagcucagggagcagcugagcaguguguccucuuucgaacgguuugagauuuucccgaagacaagcuccuggcccaaucacgauucaaacaagggugucaccgccgcuuguccucaugcaggggccaaaaguuuuuauaagaaucugaucuggcucgugaaaaagggaaacagcuacccaaaauuaucuaaguccuauauaaaugacaagggcaaagaaguacugguucuuuggggcauccaccaccccucaacgagcgcugaucaacagaguuuguaccagaacgccgacgcguacgcauucguggggacuucucgcuauuccaagaaauuuaagccugagauugccauccgaccaaaaguccgugaucaggagggaagaaugaauuacuauuggacccugguggaacccggugacaagauuacauucgaggcuacuggcaaccuaguggucccuagguacgccuuugcaauggaacggaacgcugggagcggaaucauaauuucggauaccccaguucaugacugcaauacaaccugucaaacgccgaaaggcgccaucaacacuucucuccccuuccagaauauucacccuaucacaaucgguaagugcccaaaguaugugaaauccaccaagcugcgccuugcgacugggcugagaaacguacccucaauucagaguaggggauuguuuggcgccauagcaggcuucaucgaagggggauggacagguaugguggacggcugguacggguaucaucaccagaaugaacaaggaagcggcuacgcugccgaucucaaauccacccagaacgcuauugacgagaucacgaauaaggucaacucugugauagagaaaaugaauacccaguuuacagccguugguaaggaguucaaccaccuggaaaagcggauugaaaauuuaaacaaaaagguggaugacggguuccuggauaucuggacuuacaaugcagagcuccuuguccuguuggaaaacgagcgcacccuagacuaucaugauagcaaugugaaaaaccuguacgagaagguacgaucacagcucaaaaacaaugccaaggaaaucggcaacggauguuuugaguucuaucacaagugcgacaauacauguauggaaaguguuaaaaacggcacuuacgauuauccuaaguacuccgaggaagcuaaacugaauagagaggagauugacggggugaaacuugaaagcaccaggaucuaucaaauucuggcgauauacucuacagucgcaucaaguuuggugcucgucgugagccugggagccaucuccuuuuggaugugcucuaacgguucguuacagugccggauuuguaucuga

SEQ ID NO: 133297 - RNA, 1701 nt, Artificial Sequence; identical to SEQ ID NO: 131881
  derived and/or modified CDS sequence (opt3) from hemagglutinin__InfluenzaA__ADK32470

SEQ ID NO: 133298 - RNA, 1701 nt, Artificial Sequence
  derived and/or modified CDS sequence (opt3) from hemagglutinin__InfluenzaA__ADK32480
augaaggccauccuggugguccuccuuuacaccuucgcuacagcaaacgccgacacucugugcauuggcuaucacgcgaauaacagcacggauaccguugacacaguguuggagaaaaauguaacugugacccauuccgucaacuuacuggaagauaagcacaaugggaaacuauguaagcucagaggaguggcuccccugcaucuugguaaaugcaacauagccggcuggauccuggggaauccugagugugaaucuuugucaacagcaaguagcugguccuacauuguugagaccucuucgucagacaacggaacuugcuauccaggcgauuuuaucgacuacgaggagcucagggagcagcugagcaguguguccucuuucgaacgguuugagauuuucccgaagacaagcuccuggcccaaucacgauucaaacaagggugucaccgccgcuuguccucaugcaggggccaaaaguuuuuauaagaaucugaucuggcucgugaaaaagggaaacagcuacccaaaauuaucuaaguccuauauaaaugacaagggcaaagaaguacugguucuuuggggcauccaccaccccucaacgagcgcugaucaacagaguuuguaccagaacgccgacgcguacguguucgucgggacuucucgcuauuccaagaaauuuaagccugagauugcaauccgaccaaaagugcgugaucaggagggaagaaugaauuacuauuggacccugguggaacccggugacaagauuacauucgaggccacuggcaaccuagucguuccuagguacgcuuuugccauggaacggaacgcagggagcggaaucauaauuucggauaccccagcucaugacugcaauacaaccugucaaacgccgaaaggcgccaucaacacuucucuccccuuccagaauauucacccuaucacaaucgguaagugcccaaaguaugugaaauccaccaagcugcgccuugcgacugggcugagaaacguacccucaauucagaguaggggauuguuuggcgccauagcaggcuucaucgaagggggauggacagguaugguggacggcugguacggguaucaucaccagaaugaacaaggaagcggcuacgcugccgaucucaaauccacccagaacgcuauugacaagaucacgaauaaagucaacucugugauagagaagaugaauacccaguuuacagccguugguaaggaguucaaccaccuggaaaaacggauugagaauuuaaacaagaaaguggaugacggguuccuggauaucuggacuuacaaugcagaacuccuuguccuguuggagaacgaacgcacccuagacuaucaugauagcaaugugaagaaccuguacgagaaaguacgaucacagcucaagaacaaugccaaggagaucggcaacggauguuuugaguucuaucacaaaugcgacaauacauguauggaaaguguuaagaacggcacuuacgauuauccuaaauacuccgaagaggcuaagcugaauagagaagagauugacggggugaaacuugagagcaccaggaucuaucaaauucuggcgauauacucuacagucgcaucaaguuuggugcucgucgugagccugggagccaucuccuuuuggaugugcucuaacgguucguuacagugccggauuuguaucuga

SEQ ID NO: 133299 - RNA, 1701 nt, Artificial Sequence; identical to SEQ ID NO: 131881
  derived and/or modified CDS sequence (opt3) from hemagglutinin__InfluenzaA__ADK32490

SEQ ID NO: 133300 - RNA, 1701 nt, Artificial Sequence; identical to SEQ ID NO: 131881
  derived and/or modified CDS sequence (opt3) from hemagglutinin__InfluenzaA__ADK32502

SEQ ID NO: 133301 - RNA, 1701 nt, Artificial Sequence; identical to SEQ ID NO: 132353
  derived and/or modified CDS sequence (opt3) from hemagglutinin__InfluenzaA__ADK32637

SEQ ID NO: 133302 - RNA, 1701 nt, Artificial Sequence; identical to SEQ ID NO: 131881
  derived and/or modified CDS sequence (opt3) from hemagglutinin__InfluenzaA__ADK32647

SEQ ID NO: 133303 - RNA, 1701 nt, Artificial Sequence; identical to SEQ ID NO: 132045
  derived and/or modified CDS sequence (opt3) from hemagglutinin__InfluenzaA__ADK32657

SEQ ID NO: 133304 - RNA, 1701 nt, Artificial Sequence; identical to SEQ ID NO: 132269
  derived and/or modified CDS sequence (opt3) from hemagglutinin__InfluenzaA__ADK32677

SEQ ID NO: 133305 - RNA, 1701 nt, Artificial Sequence
  derived and/or modified CDS sequence (opt3) from hemagglutinin__InfluenzaA__ADK32687
augaaggccauccuggugguccuccuuuacaccuucgcuacagcaaacgccgacacucugugcauuggcuaucacgcgaauaacagcacggauaccguugacacaguguuggagaaaaauguaacugugacccauuccgucaacuuacuggaagauaagcacaaugggaaacuauguaagcucagaggaguggcuccccugcaucuugguaaaugcaacauagccggcuggauccuggggaauccugagugugaaucuuugucaacagcaaguagcugguccuacauuguugagaccucuucgucagacaacggaacuugcuauccaggcgauuuuaucgacuacgaggagcucagggagcagcugagcaguguguccucuuucgaacgguuugagauuuucccgaagacaagcuccuggcccaaucacgauucaaacaagggugucaccgccgcuuguccucaugcaggggccaaaaauuuuuauaagaaccugaucuggcucgugaaaaagggaaauaguuacccaaaauuaagcaagucuuauauaaacgacaagggcaaagaaguacugguucuuuggggcauccaccaccccuccacgucagcugaucaacagagcuuguaccagaaugccgacgcguacguguucgucgggacuucccgcuauucuaagaaauuuaagccugagauugcaauccgaccaaaagugcgugaucaggagggaagaaugaacuacuauuggacccugguggaacccggugacaagauuacauucgaggccacuggcaaccuagucguuccuagguacgcuuuugccauggaacggaaugcaggguccggaaucauaauuagcgauaccccagugcaugacugcaacacaaccugucaaacgccgaaaggcgcuaucaauacuucgcuccccuuccagaacauucacccuaucacaaucgguaagugcccaaaguauguaaaaucuaccaagcugcgccuugccacugggcugagaaaugugcccuccauucagucaaggggauuguuuggcgcgauagccggcuucaucgaagggggauggacagguauggucgacggcugguacggguaucaucaccagaacgaacaaggaaguggcuacgcagcugaucucaaaagcacccagaaugccauugacaagaucacgaacaaagugaauaguguuauagagaagaugaacacccaguuuacagcuguggguaaggaguucaaucaccuggaaaaacggauugagaacuuaaauaagaaagucgaugacggguuccuggauaucuggacuuacaacgccgaacuccuugugcuguuggagaaugaacgcacccuagacuaucaugauucuaacguaaagaaccuguacgagaaaguucgaagccagcucaagaauaacgcaaaggagaucggcaauggauguuuugaguucuaucacaaaugcgacaacacauguauggaaucagugaagaauggcacuuacgauuauccuaaauacagugaagaggccaagcugaacagagaagagauugacggggucaaacuugaguccaccaggaucuaucaaauucuggcuauauacagcacaguggcgucuucauugguccucgugguuagucugggagcaaucagcuuuuggaugugcuccaaugguucuuuacagugccggauuuguaucuga

SEQ ID NO: 133306 - RNA, 1701 nt, Artificial Sequence; identical to SEQ ID NO: 132508
  derived and/or modified CDS sequence (opt3) from hemagglutinin__InfluenzaA__ADK32697

SEQ ID NO: 133307 - RNA, 1701 nt, Artificial Sequence; identical to SEQ ID NO: 131881
  derived and/or modified CDS sequence (opt3) from hemagglutinin__InfluenzaA__ADK32776

SEQ ID NO: 133308 - RNA, 1701 nt, Artificial Sequence; identical to SEQ ID NO: 132269
  derived and/or modified CDS sequence (opt3) from hemagglutinin__InfluenzaA__ADK33621

SEQ ID NO: 133309 - RNA, 1701 nt, Artificial Sequence
  derived and/or modified CDS sequence (opt3) from hemagglutinin__InfluenzaA__ADK33631
augaaggccauccuggugguccuccuuuacaccuucgcuacagcaaacgccgacacucugugcauuggcuaucacgcgaauaacagcacggauaccguugacacaguguuggagaaaaauguaacugugacccauuccgucaacuuacuggaagugaagcacaaugggaaacuauguaagcucagaggaguugcuccccugcaucuugguaaaugcaacauagccggcuggauccuggggaauccugagugugaaucuuugucaacagcaaguagcugguccuacauuguggagaccucuucgucagauaacggaacuugcuauccaggcgacuuuaucaauuacgaggagcucagggagcagcugagcagugucuccucuuucgaacgguuugagauuuucccgaagacaagcuccuggcccaaccacgauucaaauaagggugugaccgccgcuuguccucaugcaggggccaaaaguuuuuauaagaaccugaucuggcucguuaaaaagggaaauagcuacccaaaauuaucuaaguccuauauaaacgacaagggcaaagaaguacuggugcuuuggggcauccaccaccccucaacgagcgcugaucaacagaguuuguaccagaaugccgacgcguacgucuucguggggacuucucgcuauuccaagaaauuuaagccugagauugcaauccgaccaaaagugcgugaucaggagggaagaaugaacuacuauuggacccuggucgaacccggugacaagauuacauucgaggccacuggcaaccuaguugugccuagguacgcuuuugccauggaacggaaugcagggagcggaaucauaauuucggauaccccaguacaugacugcaacacaaccugucaaacgccgaaaggcgcuaucaauacuucucuccccuuccagaacauucacccuaucacaaucgguaagugcccaaaguaugugaaauccaccaagcugcgccuugccacugggcugagaaauguccccucaauucagaguaggggauuguuuggcgcgauagccggcuucaucgaagggggauggacagguaugguggauggcugguacggguaucaucaccagaacgaacaaggaagcggcuacgcagcugaccucaaauccacccagaaugccauugacaagaucacgaacaaaguuaauucugugauagagaagaugaacacccaguuuacagcugucgguaaggaguucaaucaccuggaaaaacggauugagaacuuaaauaagaaaguggaugacggguuccuggauaucuggacuuacaacgccgaacuccuuguacuguuggagaaugaacgcacccuagacuaucaugauagcaacguuaagaaccuguacgagaaagugcgaucacagcucaagaauaacgcaaaggagaucggcaauggauguuuugaguucuaucacaaaugcgacaacacauguauggaaagugucaagaauggcacuuacgauuauccuaaauacuccgaagaggccaagcugaacagagaagagauugacggggugaaacuugagagcaccaggaucuaucaaauucuggcuauauacucuacagucgcgucaaguuuggugcucguugugagccugggagcaaucuccuuuuggaugugcucuaaugguucguuacagugccggauuuguaucuga

SEQ ID NO: 133310 - RNA, 1701 nt, Artificial Sequence; identical to SEQ ID NO: 132269
  derived and/or modified CDS sequence (opt3) from hemagglutinin__InfluenzaA__ADK33641

SEQ ID NO: 133311 - RNA, 1701 nt, Artificial Sequence; identical to SEQ ID NO: 131881
  derived and/or modified CDS sequence (opt3) from hemagglutinin__InfluenzaA__ADK33651

SEQ ID NO: 133312 - RNA, 1701 nt, Artificial Sequence; identical to SEQ ID NO: 131881
  derived and/or modified CDS sequence (opt3) from hemagglutinin__InfluenzaA__ADK33661

SEQ ID NO: 133313 - RNA, 1701 nt, Artificial Sequence; identical to SEQ ID NO: 131881
  derived and/or modified CDS sequence (opt3) from hemagglutinin__InfluenzaA__ADK33671

SEQ ID NO: 133314 - RNA, 1701 nt, Artificial Sequence
  derived and/or modified CDS sequence (opt3) from hemagglutinin__InfluenzaA__ADK33681
augaaggccauccuggugguccuccuuuacaccuucgcuacagcaaacgccgacacucugugcauuggcuaucacgcgaauaacagcacggauaccguugacacaguguuggagaaaaauguaacugugacccauuccgucaacuuacuggaagauaagcacaaugggaaacuauguaagcucagaggaguggcuccccugcaucuugguaaaugcaacauagccggcuggauccuggggaauccugagugugaaucuuugucaacagcaaguagcugguccuacauuguugagaccucuucgucagacaacggaacuugcuauccaggcgauuuuaucgacuacgaggagcucagggagcagcugagcaguguguccucuuucgaacgguuugagauuuucccgaagacaagcuccuggcccaaucacgauucaaacaagggugucaccgccgcuuguccucaugcaggggccaaaaguuuuuauaagaaucugaucuggcucgugaaaaagggaaacagcuacccaaaauuaucuaaguccuauauaaaugacaagggcaaagaaguacugguucuuuggggcauccaccaccccucaacgagcgcugaucaacagaguuuguaccagaacgccgacgcguacguguucgucgggacuucucgcuauuccaagaaauuuaagccugagauugcaauccgaccaaaagugcgugaucaggagggaagaaugaauuacuauuggacccugguggaacccggugacaagauuacauucgaggccacuggcaaccuagucguuccuagguacgcuuuugccauggaacggaacgcagggagcggaaucauaauuucggauaccccagugcaugacugcaauacaaccugucaaacgccgaaaggcgcuaucaacacuucucuccccuuccagaauauucacccuaucacaaucgguaagugcccaaaguauguaaaauccaccaagcugcgccuugccacugggcugagaaacgugcccucaauucagaguaggggauuguuuggcgcgauagccggcuucaucgaagggggauggacagguauggucgacggcugguacggguaucaucaccagaaugaacaaggaagcggcuacgcagcugaucucaaauccacccagaacgccauugacgagaucacgaauaaggugaacucuguuauagagaaaaugaauacccaguuuacagcuguggguaaggaguucaaccaccuggaaaagcggauugaaaauuuaaacaaaaaggucgaugacggguuccuggauaucuggacuuacaaugccgagcuccuugugcuguuggaaaacgagcgcacccuagacuaucaugauagcaauguuaaaaagcuguacgagaaaguacgaucacagcucaagaacaacgcaaaggaaaucggcaauggauguuuugaguucuaucacaaaugcgacaacacauguauggaaagugugaagaauggcacuuacgauuauccuaaauacuccgaggaagccaagcugaacagagaggagauugacggggucaaacuugaaagcaccaggaucuaucaaauucuggcuauauacucuacaguggcgucaaguuugguccucgugguuagccugggagcaaucuccuuuuggaugugcucuaaugguucguuacagugccggauuuguaucuga

SEQ ID NO: 133315 - RNA, 1701 nt, Artificial Sequence; identical to SEQ ID NO: 132330
  derived and/or modified CDS sequence (opt3) from hemagglutinin__InfluenzaA__ADK33691

SEQ ID NO: 133316 - RNA, 1701 nt, Artificial Sequence
  derived and/or modified CDS sequence (opt3) from hemagglutinin__InfluenzaA__ADK33701
augaaggccauccuggugguccuccuuuacaccuucgcuacagcaaacgccgacacucugugcauuggcuaucacgcgaauaacagcacggauaccguugacacaguguuggagaaaaauguaacugugacccauuccgucaacuuacuggaagauaagcacaaugggaaacuauguaagcucagaggaguggcuccccugcaucuugguaaaugcaacauagccggcuggauccuggggaauccugagugugaaucuuugucaacagcaaguagcugguccuacauuguugagaccucuucgucagacaacggaacuugcuauccaggcgauuuuaucgacuacgaggagcucagggagcagcugagcaguguguccucuuucgaacgguuugagauuuucccgaagacaagcuccuggcccaaucacgauucaaacaagggugucaccgccgcuuguccucaugcaggggccaaaaguuuuuauaagaaucugaucuggcucgugaaaaagggaaacagcuacccaaaauuaucuaaguccuauauaaaugacaagggcaaagaaguacugguucuuuggggcauccaccaccccucaacgagcgcugaucaacagaguuuguaccagaacgccgacgcguacguguucgucgggacuucucgcuauuccaagaaauuuaagccugagauugcaauccgaccaaaagugcgugaucaggagggaagaaugaauuacuauuggacccugguggaacccggugacaagauuacauucgaggccacuggcaaccuagucguuccuagguacgcuuuugccauggaacggaacgcagggagcggaaucauaauuucggauaccccagugcaugacugcaauacaaccugucaaacgccgaaaggcgcuaucaacacuucucuccccuuccagaauauucacccuaucacaaucgguaagugcccaaaguauguaaaauccaccaagcugcgccuugccacugggcugagaaacgugcccucaauucagaguaggggauuguuuggcgcgauagccggcuucaucgaagggggauggacagguauggucgacggcugguacggguaucaucaccagaaugaacaaggaagcggcuacgcagcugaucucaaauccacccagaacgccauugacaagaucacgaauaaagugaacucuguuauagagaagaugaauacccaguuuacagcuguggguaaggaguucaaccaccuggaaaaacggauugagaauuuaaacaagaaagucgaugacggguuccuggauaucuggacuuacaaugccgaacuccuugugcuguuggagaacgaacgcacccuagacuaucaugauagcaauguaaagaaccuguacgagaaaguucgaucacagcucaagaacaaugcaaaggagaucggcaacggauguuuugaguucuaucacaaaugcgacaauacauguauggaaagugugaagaacggcacuuacgauuauccuaaauacuccgaagaggccaagcugaauagagaagagauugacggggucaaacuugagagcaccaggguguaucaaauccuggcuauuuacucuacagucgcgucaaguuuggugcucguugugagccugggagcaauauccuuuuggaugugcucuaacgguucguuacagugccggaucuguauuuga

SEQ ID NO: 133317 - RNA, 1701 nt, Artificial Sequence
  derived and/or modified CDS sequence (opt3) from hemagglutinin__InfluenzaA__ADK33711
augaaggccauccuggugguccuccuuuacaccuucgcuacagcaaacgccgacacucugugcauuggcuaucacgcgaauaacagcacggauaccguugacacaguguuggagaaaaauguaacugugacccauuccgucaacuuacuggaagauaagcacaaugggaaacuauguaagcucagaggaguggcuccccugcaucuugguaaaugcaacauagccggcuggauccuggggaauccugagugugaaucuuugucaacagcaaguagcugguccuacauuguugagaccucuucgucagacaacggaacuugcuauccaggcgauuuuaucgacuacgaggagcucagggagcagcugagcaguguguccucuuucgaacgguuugagauuuucccgaagacaagcuccuggcccaaucacgauucaaacaagggugucaccgccgcuuguccucaugcaggggccaaaaguuuuuauaagaaucugaucuggcucgugaaaaagggaaacagcuacccaaaauuaucuaaguccuauauaaaugacaagggcaaagaaauccugguacuuuggggcauucaccaccccucaacgagcgcugaucaacagaguuuguaccagaacgccgacgcguacguuuucguggggacuucucgcuauuccaagaaauuuaagccugagaucgcaauucgaccaaaaguccgugaucaggagggaagaaugaauuacuauuggacccugguggaacccggugacaagaucacauucgaggccacuggcaaccuaguggucccuagguacgcuuuugccauggaacggaacgcagggagcggaauaauuaucucggauaccccaguucaugacugcaauacaaccugucaaacgccgaaaggcgcuauuaacacuucucuccccuuccagaauauccacccuaucacaauugguaagugcccaaaguaugugaaauccaccaagcugcgccuugccacugggcugagaaacauacccucaauccagaguaggggauuguuuggcgcgauugccggcuucaucgaagggggauggacagguaugguagacggcugguacggguaucaucaccagaaugaacaaggaagcggcuacgcagcugaucucaaauccacccagaacgccauagacgagauuacgaauaaggugaacucugucaucgagaaaaugaauacccaguuuacagcuguggguaaggaguucaaccaccuggaaaagcggaucgaaaauuuaaacaaaaagguugaugacggguuccuggauauuuggacuuacaaugccgagcuccuugugcuguuggaaaacgagcgcacccuagacuaucaugauagcaaugucaaaaaccuguacgagaaggugcgaucacagcucaaaaacaaugcaaaggaaaucggcaacggauguuuugaguucuaucacaagugcgacaauacauguauggaaaguguaaagaacggcacuuacgauuauccuaaguacuccgaggaagccaaacugaauagagaggagauugacgggguuaaacuugaaagcaccaggauauaucaaauccuggcuauuuacucuacaguggcgucaaguuugguccucguggucagccugggagcaaucuccuuuuggaugugcucuaacgguucguuacagugccggaucuguauuuga

SEQ ID NO: 133318 - RNA, 1701 nt, Artificial Sequence
  derived and/or modified CDS sequence (opt3) from hemagglutinin__InfluenzaA__ADK33721
augaaggccauccuggugguccuccuuuacaccuucguuacagcuaacgcagacacucugugcauuggcuaucacgccaauaacagcacggauaccguggacacaguauuggagaaaaaugugacugucacccauuccgugaacuuacuggaagauaagcacaaugggaaacuauguaagcucagaggaguugcgccccugcaucuugguaaaugcaacauagcuggcuggauccuggggaauccugagugugaaucuuugucaacagccaguagcugguccuacauuguggagaccucuucgucagacaacggaacuugcuauccaggcgauuuuaucgacuacgaggagcucagggagcagcugagcagugucuccucuuucgaacgguuugagauuuucccgaagacaagcuccuggcccaaucacgauucaaacaagggugugaccgcagccuguccucaugcuggggcaaaaaguuuuuauaagaaucugaucuggcucguaaagaagggaaacagcuacccaaaauuaucuaaguccuauauaaaugacaagggcaaagaaguucuggugcuuuggggcauccaccaccccucaacgagcgccgaucaacagaguuuguaccagaacgcugacgccuacgucuucguggggacuucucgcuauuccaagaaauuuaagccugagauugcgauccgaccaaaagugcgugaucaggagggaagaaugaauuacuauuggacccuggucgaacccggugacaagauuacauucgaggcaacuggcaaccuaguugugccuagguacgccuuugcuauggaacggaacgccgggagcggaaucauaauuucggauaccccaguacaugacugcaauacaaccugucaaacgccgaaaggcgcaaucaacacuucucuccccuuccagaauauucacccuaucacaaucgguaagugcccaaaguaugugaaauccaccaagcugcgccuugcuacugggcugagaaacguccccucaauucagaguaggggauuguuuggcgccauagcgggcuucaucgaagggggauggacagguaugguggacggcugguacggguaucaucaccagaaugaacaaggaagcggcuacgccgcagaucucaaauccacccagcacgcuauugacgagaucacgaacaagguuaauucugugauagagaaaaugaacacccaguuuacagccgucgguaaggaguucaaucaucuggaaaagcggauugaaaacuuaaauaaaaagguggaugacggguuccuggauaucuggacuuacaacgcugagcuccuuguacuguuggaaaaugagcgcacccuagacuaucacgauagcaacguuaaaaaucuguacgagaaggugcgaucacagcucaaaaacaacgccaaggaaaucggcaauggauguuuugaguucuaucauaagugcgacaacacauguauggaaagugucaaaaauggcacuuacgauuauccuaaguacuccgaggaagcaaaacugaacagagaggagauugacggggugaaacuugaaagcaccaggaucuaucaaauucuggccauauacucuacagucgcuucaaguuuggugcucguugugagccugggagcgaucuccuuuuggaugugcucuaaugguucguuacagugccggauuuguaucuga

SEQ ID NO: 133319 - RNA, 1701 nt, Artificial Sequence
  derived and/or modified CDS sequence (opt3) from hemagglutinin__InfluenzaA__ADK33731
augaaggccacccuggugguccuccuuuacacauucgcuacugcaaacgccgacacgcugugcaucggcuaucacgcgaauaacagcaccgauacaguugacacuguguuggagaaaaauguaaccgugacacauuccgucaacuuacuggaagauaagcacaaugggaaacuauguaagcucagaggaguggcuccccugcaucuugguaaaugcaacauugccggcuggauacuggggaauccugagugugaaucuuugucaaccgcaaguagcugguccuacaucguugagacuucuucgucaggaaacggcacaugcuauccaggugacuuuauugauuacgaagaacucagggagcagcugagcaguguguccucuuucgaacgguuugagaucuucccgaagaccagcuccuggcccaaucacgacucaaacaagggggucacggccgcuuguccucaugcaggagccaaaaguuuuuauaagaaucugauuuggcucgugaaaaagggcaacagcuacccaaaauuaucuaaguccuauaucaaugauaagggcaaagaaguacugguucuuugggggauacaccaccccucaacuagcgcugaccaacagaguuuguaccagaacgccgaugcguacgcauucgugggaaccucucgcuauuccaagaaauuuaagccugagaucgccauucgaccaaaaguccgugaccaggaggguagaaugaauuacuauuggacacugguggaacccggcgauaagaucacuuucgaggcuaccgggaaccuacucgugccuagguacgccuuugcaauggaacggaacgcuggaagcggcauuaucauaucggacacaccaguccaugauugcaauaccacgugucaaacuccgaaaggugccauuaacacaucucugcccuuccagaauauccacccuauuaccaucgggaagugcccaaaguauguuaaauccacuaaacuucgccuggcgacaggauugagaaacgugcccucaauccagaguaggggccucuuuggcgccauugcaggguucauagagggagguuggaccggcaugguagacgggugguacggauaucaucaccagaaugaacaaggcagcgguuacgcugccgaccugaaauccacgcagaacgcuaucgaugagauuaccaauaaggugaacucugucaucgagaaaaugaauacacaguuuacugccguggggaaggaguucaaccacuuagagaagcggauagaaaaucugaacaaaaagguugacgauggcuuccucgacauuuggaccuacaaugcagagcuucugguguugcuagaaaacgagcgcacacuggauuaucaugacagcaaugucaaaaaccucuacgagaaggugcgaucacagcugaaaaacaaugccaaggaaaucggaaacggcuguuuugaguucuaucacaagugcgauaauacuuguauggaaaguguaaagaacgggaccuacgacuauccuaaguacuccgaggaagcuaaacuuaauagagaggagaucgauggaguuaagcuggaaagcacaaggauuuaucaaaucuuggcgauuuacucuaccguggcaucaagucucguccugguggucagcuuaggugccauauccuuuuggaugugcucuaacggcucgcugcagugccggaucuguauuuga

SEQ ID NO: 133320 - RNA, 1701 nt, Artificial Sequence; identical to SEQ ID NO: 132884
  derived and/or modified CDS sequence (opt3) from hemagglutinin__InfluenzaA__ADK33741

SEQ ID NO: 133321 - RNA, 1701 nt, Artificial Sequence; identical to SEQ ID NO: 130717
  derived and/or modified CDS sequence (opt3) from hemagglutinin__InfluenzaA__ADK33751

SEQ ID NO: 133322 - RNA, 1701 nt, Artificial Sequence
  derived and/or modified CDS sequence (opt3) from hemagglutinin__InfluenzaA__ADK33761
augaaggccauccuggugguccuccuuuacaccuucgcuacagcaaacgccgacacucugugcauuggcuaucacgcgaauaacagcacggauaccguugacacaguguuggagaaaaauguaacugugacccauuccgucaacuuacuggaagauaagcacaaugggaaacuauguaagcucagaggaguggcuccccugcaucuugguaaaugcaacauagccggcuggauccuggggaauccugagugugaaucuuugucaacagcaaguagcugguccuacauuguugagaccucuucgucagacaacggaacuugcuauccaggcgauuuuaucgacuacgaggagcucagggagcagcugagcaguguguccucuuucgaacgguuugagauuuucccgaagacaagcuccuggcccaaucacgauucaaacaagggugucaccgccgcuuguccucaugcaggggccaaaaguuuuuauaagaaucugaucuggcucgugaaaaagggaaacagcuacccaaaauuaucuaaguccuauauaaaugacaagggcaaagaaguacugguucuuuggggcauccaccaccccucaacgagcgcugaucaacagaguuuguaccagaacgccgacgcguacguguucgucgggacuucucgcuauuccaagaaauuuaagccugagauugcaauccgaccaaaagugcgugaucaggagggaagaaugaauuacuauuggacccugguggaacccggugacaagauuacauucgaggccacuggcaaccuagucguuccuagguacgcuuuugccauggaacggaacgcagggagcggaaucauaauuucggauaccccagugcaugacugcaauacaaccugucaaacgccgaaaggcgcuaucaacacuucucuccccuuccagaauauucacccuaucacaaucgguaagugcccaaaguauguaaaauccaccaagcugucacuugccacugggcugcgcaacgugcccaguauucagagcagaggauuguuuggcgcgauagccggcuucaucgaagggggauggacagguauggucgacggcugguacggguaucaucaccagaaugaacaaggauccggcuacgcagcugaucucaaaucuacccagaacgccauugacgagaucacgaauaaggugaacagcguuauagagaaaaugaauacccaguuuacagcuguggguaaggaguucaaccaccuggaaaagaggauugaaaauuuaaacaaaaaggucgaugacggguuccuggauaucuggacuuacaaugccgagcuccuugugcuguuggaaaacgagcggacccuagacuaucaugauucaaauguaaagaaccuguacgagaagguucgcagucagcucaaaaacaaugcaaaggaaaucggcaacggauguuuugaguucuaucacaagugcgacaauacauguauggaauccgugaaaaacggcacuuacgauuauccuaaguacagcgaggaagccaaacugaaucgagaggagauugacggggucaaacuugaaucuaccagaaucuaucaaauucuggcuauauacucaacaguggcgaguagcuugguccucgugguuucccugggagcaaucucuuuuuggaugugcucgaacgguagcuuacagugcaggauuuguaucuga

SEQ ID NO: 133323 - RNA, 1701 nt, Artificial Sequence; identical to SEQ ID NO: 131881
  derived and/or modified CDS sequence (opt3) from hemagglutinin__InfluenzaA__ADK33771

SEQ ID NO: 133324 - RNA, 1701 nt, Artificial Sequence; identical to SEQ ID NO: 131881
  derived and/or modified CDS sequence (opt3) from hemagglutinin__InfluenzaA__ADK33781

SEQ ID NO: 133325 - RNA, 1701 nt, Artificial Sequence; identical to SEQ ID NO: 131818
  derived and/or modified CDS sequence (opt3) from hemagglutinin__InfluenzaA__ADK33791

SEQ ID NO: 133326 - RNA, 1701 nt, Artificial Sequence; identical to SEQ ID NO: 133316
  derived and/or modified CDS sequence (opt3) from hemagglutinin__InfluenzaA__ADK33801

SEQ ID NO: 133327 - RNA, 1701 nt, Artificial Sequence
  derived and/or modified CDS sequence (opt3) from hemagglutinin__InfluenzaA__ADK33811
augaaggccauccuggugguccuccuuuacaccuucgcuacagcaaacgccgacacucugugcauuggcuaucacgcgaauaacagcacggauaccguugacacaguguuggagaagaauguaacugugacccauuccgucaacuuacuggaagauaagcacaaugggaaacuauguaagcucagaggaguggcuccccugcaucuugguaaaugcaacauagccggcuggauccuggggaauccugagugugaaucuuugucaacagcaaguagcugguccuacauuguugagaccucuucgucagacaacggaacuugcuauccaggcgauuuuaucgacuacgaggagcucagggagcagcugagcaguguguccucuuucgaacgguuugagauuuucccgaagacaagcuccuggcccaaucacgauucaaacaagggugucaccgccgcuuguccucaugcaggggccaaaaguuuuuauaagaaucugaucuggcucgugaaaaagggaaacagcuacccaaaauuaucuaaguccuauauaaaugacaagggcaaagaaguacugguucuuuggggcauccaccaccccucaacgagcgcugaucaacagaguuuguaccagaacgccgacgcguacguguucgucgggacuucucgcuauuccaagaaauuuaagccugagauugcaauccgaccaaaagugcgugaucaggagggaagaaugaauuacuauuggacccugguggaacccggugacaagauuacauucgaggccacuggcaaccuagucguuccuagguacgcuuuugccauggaacggaacgcagggagcggaaucauaauuucggauaccccagugcaugacugcaauacaaccugucaaacgccgaaaggcgcuaucaacacuucucuccccuuccagaauauucacccuaucacaaucgguaagugcccaaaguauguaaaauccaccaagcugcgccuugccacugggcugagaaacgugcccucaauucagaguaggggauuguuuggcgcgauagccggcuucaucgaagggggauggacagguauggucgacggcugguacggguaucaucaccagaaugaacaaggaagcggcuacgcagcugaucucaaauccacccagcacgccauugacgagaucacgaacaagguaaauucuguuauagagaaaaugaacacccaguuuacagcuguggguaaggaguucaaucaucuggaaaagcggauugaaaacuuaaauaaaaaggucgaugacggguuccuggauaucuggacuuacaacgccgagcuccuugugcuguuggaaaaugagcgcacccuagacuaucacgauagcaacgugaaaaaucuguacgagaagguucgaucacagcucaaaaacaacgcaaaggaaaucggcaauggauguuuugaguucuaucauaagugcgacaacacauguauggaaagugugaaaaauggcacuuacgauuauccuaaguacuccgaggaagccaaacugaacagagaggagauugacgggaucaaacuugaaagcaccaggauuuaucaaauacuggcuaucuacucuacagucgcgucaaguuuggugcucgucgugagccugggagcaauuuccuuuuggaugugcucuaaugguucguuacagugccggaucuguaucuga

SEQ ID NO: 133328 - RNA, 1701 nt, Artificial Sequence
  derived and/or modified CDS sequence (opt3) from hemagglutinin__InfluenzaA__ADK33821
augaaggccauccuggugguccuccuuuacaccuucgcuacagcaaacgccgacacucugugcauuggcuaucacgcgaauaacagcacggauaccguugacacaguguuggagaaaaauguaacugugacccauuccgucaacuuacuggaagauaagcacaaugggaaacuauguaagcucagaggaguggcuccccugcaucuugguaaaugcaacauagccggcuggauccuggggaauccugagugugaaucuuugucaacagcaaguagcugguccuacauuguugagaccucuucgucagacaacggaacuugcuauccaggcgauuuuaucgacuacgaggagcucagggagcagcugagcaguguguccucuuucgaacgguuugagauuuucccgaagacaagcuccuggcccaaucacgauucaaacaagggugucaccgccgcuuguccucaugcaggggccaaaaguuuuuauaagaaucugaucuggcucgugaaaaagggaaacagcuacccaaaauuaucuaaguccuauauaaaugacaagggcaaagaaguacugguucuuuggggcauccaccaccccucaacgagcgcugaucaacagaguuuguaccagaacgccgacgcguacguguucgucgggacuucucgcuauuccaagaaauuuaagccugagauugcaauccgaccaaaagugcgugaucaggagggaagaaugaauuacuauuggacccugguggaacccggugacaagauuacauucgaggccacuggcaaccuagucguuccuagguacgcuuuuaccauggaacggaacgccgggagcggaaucauaauuucggauacaccagugcaugacugcaauaccacgugucaaacuccgaaaggcgcaaucaacacaucucuccccuuccagaauauucacccuaucaccaucgguaagugcccaaaguauguaaaauccacuaagcugcgccuugcuacagggcugagaaacgugcccucaauucagaguaggggauuguuuggcgccauagcgggcuucaucgaagggggauggaccgguauggucgacggcugguacggguaucaucaccagaaugaacaaggaagcggcuacgccgcagaucucaaauccacgcagaacgcuauugacgagaucaccaauaaggugaacucuguuauagagaaaaugaauacacaguuuacugccguggguaaggaguucaaccaccuggaaaagcggauugaaaauuuaaacaaaaaggucgaugacggguuccuggauaucuggaccuacaaugcugagcuccuugugcuguuggaaaacgagcgcacacuagacuaucaugauagcaauguaaagaaccuguacgagaagguucgaaaccagcucaaaaauaacgccaaggaaaucggcaauggauguuuugaguucuaucacaagugcgacaacacuuguauggaaucagugaaaaauggcaccuacgauuauccuaaguacagugaggaagcaaaacugaacagagaggagauugacggggucaaacuugaauccacaaggaucuaucaaauucuggccauauacagcaccguggcuucuucauugguccucgcggugagucugggagcaaucagcuuuuggaugugcuccaaugguucuuuacagugccggauuuguaucuga

SEQ ID NO: 133329 - RNA, 1701 nt, Artificial Sequence
  derived and/or modified CDS sequence (opt3) from hemagglutinin__InfluenzaA__ADK33831
augaaggccauccuggugguccuccuuuacaccuucgcuacagcaaacgccgacacucugugcauuggcuaucacgcgaauaacagcacggauaccguugacacaguguuggagaaaaauguaacugugacccauuccgucaacuuacuggaagauaagcacaaugggaaacuauguaagcucagaggaauagcuccccugcaucuugguaaaugcaacaucgccggcuggauucuggggaauccugagugugaaucuuugucaacagcaaguagcugguccuacaucguggagaccucuucgucagacaacggaacuugcuauccaggcgauuuuauugacuacgaggagcucagggagcagcugagcaguguuuccucuuucgaacgguuugagaucuucccgaauacaagcuccuggcccaaccacgauucaaauaagggugugaccgccgcuuguccucaugcaggggccaagaguuuuuauaaaaaccugauauggcucgucaagaaaggaaauagcuacccaaaguuaucuaaauccuauaucaacgacaagggcaaggaagugcugguacuuuggggcauucaccaccccucaacgagcgcugaucaacagaguuuguaccagaaugccgacgcguacguuuucguggggacuucucgcuauuccaaaaaguuuaaaccugagaucgcaauucgaccaaagguccgugaucaggagggaagaaugaacuacuauuggacccugguggaacccggugacaaaaucacauucgaggccacuggcaaccuaguggucccuagguacgcuuuugccauggaacggaaugcagggagcggaauaauuaucucggauaccccaguucaugacugcaacacaaccugucaaacgccgaagggcgcuauuaauacuucucuccccuuccagaacauccacccuaucacaauugguaaaugcccaaaguaugugaaguccaccaaacugcgccuugccacugggcugagaaauguacccucaauacagaguaggggauuguuuggcgcgaucgccggcuucauugaagggggauggacagguaugguggacggcugguacggguaucaucaccagaacgaacaaggaagcggcuacgcagcugaucucaaguccacccagaaugccaucgacgagauaacgaacaaagucaauucugugauugagaagaugaacacccaguuuacagcuguugguaaagaguucaaucaccuggaaaagcggaucgaaaacuuaaauaagaaaguggaugacggguuccuggauaucuggacuuacaacgccgagcuccuuguccuguuggaaaaugagcgcacccuagacuaucaugauagcaacgugaagaaccuguacgagaaaguacgaucacagcucaagaauaacgcaaaagaaauuggcaauggauguuuugaguucuaucacaagugcgacaacacauguauggaaaguguuaagaauggcacuuacgauuauccuaaauacuccgaggaagccaagcugaacagagaggagaucgacggggugaaacuugaaagcaccaggauuuaucaaauacuggcuaucuacucuacagucgcgucaaguuuggugcucgucgugagccugggagcaauuuccuuuuggaugugcucuaaugguucguuacagugccggaucuguaucuga

SEQ ID NO: 133330 - RNA, 1701 nt, Artificial Sequence; identical to SEQ ID NO: 132137
  derived and/or modified CDS sequence (opt3) from hemagglutinin__InfluenzaA__ADK33841

SEQ ID NO: 133331 - RNA, 1701 nt, Artificial Sequence; identical to SEQ ID NO: 132884
  derived and/or modified CDS sequence (opt3) from hemagglutinin__InfluenzaA__ADK33851

SEQ ID NO: 133332 - RNA, 1701 nt, Artificial Sequence; identical to SEQ ID NO: 130717
  derived and/or modified CDS sequence (opt3) from hemagglutinin__InfluenzaA__ADK33861

SEQ ID NO: 133333 - RNA, 1701 nt, Artificial Sequence
  derived and/or modified CDS sequence (opt3) from hemagglutinin__InfluenzaA__ADK33871
augaaggccauccuggugguccuccuuuacaccuucgcuacagcaaacgccgacacucugugcauuggcuaucacgcgaauaacagcacggauaccguugacacaguguuggagaaaaauguaacugugacccauuccgucaacuuacuggaagauaagcacaaugggaaacuauguaagcucagaggaguggcuccccugcaucuugguaaaugcaacauagccggcuggauccuggggaauccugagugugaaucuuugucaacagcaaguagcugguccuacauuguugagaccucuucgucagacaacggaacuugcuauccaggcgauuuuaucgacuacgaagaacucagggagcagcugagcaguguguccucuuucgaacgguuugagauuuucccgaagacaagcuccuggcccaaucacgauucaaacaagggugucaccgccgcuuguccucaugcaggggccaaaaguuuuuauaagaaucugaucuggcucgugaaaaagggaaacagcuacccaaaauuaucuaaguccuauauaaaugacaagggcaaagaaguacugguucuuuggggcauccaccaccccucaacgagcgcugaucaacagaguuuguaccagaacgccgacgcguacguguucgucgggacuucucgcuauuccaagaaauuuaagccugagauugcaauccgaccaaaagugcgugagcaggaaggaagaaugaauuacuauuggacccugguggagcccggugauaagauuacauucgaagccacuggcaaccuagucaucccuagguacgcuuuugccauggagcggaacgcagggagcggaauaauuaucucggacaccccaguucaugauugcaauacaaccugucaaacgccgaaaggcgcuauuaacacuucucuccccuuccagaauauccacccuaucacaauugguaagugcccaaaguaugugaaauccaccaagcugcgccuugccacugggcugagaaacguacccucaauacagaguaggggauuguuuggcgcgaucgccggcuucauugaagggggauggacagguaugguggacggcugguacggguaucaucaccagaaugagcaaggaagcggcuacgcagcugaccucaaauccacccagaacgccaucgaugagauaacgaauaaggucaacucugugauugaaaagaugaauacccaguuuacagcuguugguaaggaguucaaccaccuggaaaagcggaucgagaauuuaaacaaaaagguggacgauggguuccuggacaucuggacuuacaaugccgaacuccuuguccuguuggagaacgagcgcacccuagauuaucaugacagcaaugugaaaaaccuguacgaaaagguacgaucacagcucaaaaacaaugcaaaggagauuggcaacggauguuuugaguucuaucacaagugcgauaauacauguauggagaguguuaaaaacggcacuuacgacuauccuaaguacuccgaagaggccaaacugaauagagaggaaaucgauggggugaaacuugagagcaccaggauuuaucaaauacuggcuaucuacucuacagucgcgucaaguuuggugcuccuggucagcuuaggagcaauuuccuuuuggaugugcucuaacgguucgcugcagugccggaucuguaucuga

SEQ ID NO: 133334 - RNA, 1701 nt, Artificial Sequence
  derived and/or modified CDS sequence (opt3) from hemagglutinin__InfluenzaA__ADK33881
augaaggccauccuggugguccuccuuuacaccuucgcuacagcaaacgccgacacucugugcauuggcuaucacgcgaauaacagcacggauaccguugacacaguguuggagaaaaauguaacugugacccauuccgucaacauauuagaagauaagcacaaugggaaacuguguaagcuaagaggaguggcuccccuccaucuggguaaaugcaacaucgccggcuggauucuugggaauccugagugugaaucucugucaacagcaaguagcugguccuacaucguugagaccucuucgucagacaacggaacuugcuauccaggcgauuuuauugacuacgaagaguugagggagcagcucagcaguguguccucuuucgaacgguuugagaucuucccgaagacaagcuccuggcccaaucacgauucaaacaagggugucaccgccgcuuguccucaugcaggggccaaaaguuuuuauaagaaucugauauggcuggugaaaaagggaaacagcuacccaaaacucucuaaguccuauaucaaugacaagggcaaagaaguauuaguucuguggggcauucaccaccccucaacgagcgcugaucaacagagucuuuaccagaacgccgacgcguacguguucgucgggacuucucgcuauuccaagaaauuuaagccugagaucgcaauucgaccaaaagugcgugaucaggagggaagaaugaauuacuauuggaccuugguggaacccggugacaagaucacauucgaggccacuggcaaccuggucguuccuagguacgcuuuugccauggaacggaacgcagggagcggaauaauuaucucggauaccccagugcaugacugcaauacaaccugucaaacgccgaaaggcgcuauuaacacuucucuacccuuccagaauauccacccuaucacaauugguaagugcccaaaguauguaaaauccaccaagcuccgccuggccacugggcuuagaaacgugcccucaauacagaguaggggacuguuuggcgcgaucgccggcuucauugaagggggauggacagguauggucgacggcugguacggguaucaucaccagaaugaacaaggaagcggcuacgcagcugauuugaaauccacccagaacgccaucgacgagauaacgaauaaggugaacucuguuauugagaaaaugaauacccaguuuacagcuguggguaaggaguucaaccaccucgagaagcggaucgaaaaucugaacaaaaaggucgaugacggguucuuagauaucuggacuuacaaugccgagcugcucgugcuucuggaaaacgagcgcaccuuggacuaucaugauagcaauguuaaaaaccuauacgagaagguacgaucacagcugaaaaacaaugcaaaggaaauuggcaacggauguuuugaguucuaucacaagugcgacaauacauguauggaaagugugaaaaacggcacuuacgauuauccuaaguacuccgaggaagccaaacucaauagagaggagaucgacggggucaagcuggaaagcaccaaaauuuaucaaauacuugcuaucuacucuacaguggcgucaagucuggucuuggugguuagccucggagcaauuuccuuuuggaugugcucuaacgguucgcugcagugcaggaucuguaucuga

SEQ ID NO: 133335 - RNA, 1701 nt, Artificial Sequence
  derived and/or modified CDS sequence (opt3) from hemagglutinin__InfluenzaA__ADK33891
augaaggccauccuggugguccuccuuuacaccuucgcuacagcaaacgccgacacucugugcauuggcuaucacgcgaauaacagcacggauaccguugacacaguguuggagaagaauguaacugugacccauuccgucaacuuacuggaagauaagcacaaugggaaacuauguaagcucagaggaauagcuccccugcaucuugguaaaugcaacaucgccggcuggauucuggggaauccugagugugaaucuuugucaacagcaaguagcugguccuacaucguggagaccucuucgucagacaacggaacuugcuauccaggcgauuuuauugacuacgaggagcucagggagcagcugagcaguguuuccucuuucgaacgguuugagaucuucccgaagacaagcuccuggcccaaucacgauucaaacaagggugugaccgccgcuuguccucaugcaggggccaaaaguuuuuauaagaaucugauauggcucgucaaaaagggaaacagcuacccaaaauuaucuaaguccuauaucaaugacaagggcaaagaagugcugguacuuuggggcauucaccaccccucaacgagcgcugaucaacagaguuuguaccagaacgccgacgcguacguuuucguggggacuucucgcuauuccaagaaauuuaagccugagaucgcaauucgaccaaaaguccgugaucaggagggaagaaugaauuacuauuggacccugguggaacccggugacaagaucacauucgaggccacuggcaaccuaguggucccuagguacgcuuuugccauggaacggaacgcagggagcggaauaauuaucucggauaccccaguucaugacugcaauacaaccugucaaacgccgaaaggcgcuauuaacacuucucuccccuuccagaauauccacccuaucacaauugguaagugcccaaaguaugugaaauccaccaagcugcgccuugccacugggcugagaaacguacccucaauacagaguaggggauuguuuggcgcgaucgccggcuucauugaagggggauggacagguaugguggacggcugguacggguaucaucaccagaaugaacaaggaagcggcuacgcagcugaucucaaauccacccagaacgccaucgacgagauaacgaauaaggucaacucugugauugagaaaaugaauacccaguuuacagcuguugguaaggaguucaaccaccuggaaaagcggaucgaaaauuuaaacaaaaagguggaugacggguuccuggauaucuggacuuacaaugccgagcuccuuguccuguuggaaaacgagcgcacccuagacuaucaugauagcaaugugaaaaaccuguacgagaagguacgaaaccagcucaaaaauaacgcaaaggaaauuggcaauggauguuuugaguucuaucacaagugcgacaacacauguauggaaucaguuaaaaauggcacuuacgauuauccuaaguacagugaggaagccaaacugaacagagaggagaucgacggggugaaacuugaauccaccaggauuuaucaaauacuggcuaucuacagcacagucgcgucuucauuggugcucgucgugagucugggagcaauuagcuuuuggaugugcuccaaugguucuuuacagugccggaucuguaucuga

SEQ ID NO: 133336 - RNA, 1701 nt, Artificial Sequence; identical to SEQ ID NO: 132884
  derived and/or modified CDS sequence (opt3) from hemagglutinin__InfluenzaA__ADK33901

SEQ ID NO: 133337 - RNA, 1701 nt, Artificial Sequence
  derived and/or modified CDS sequence (opt3) from hemagglutinin__InfluenzaA__ADK33911
augaaggccauccuggugguccuccuuuacaccuucgcuacagcaaacgccgacacucugugcauuggcuaucacgcgaauaacagcacggauaccguugacacaguguuggagaaaaauguaacugugacccauuccgucaacuuacuggaagggaagcacaauggaaaacuauguaagcucagagguguggcuccccugcaucuuggcaaaugcaacauagccggguggauccugggaaauccugagugugaaucuuugucaacagcaaguagcugguccuacauuguugagaccucuucgucagauaacggcacuugcuauccaggugacuuuaucgauuacgaagaacucagggagcagcugagcaguguguccucuuucgaacgguuugagauuuucccgaagacaagcuccuggcccaaucacgacucaaacaagggggucaccgccgcuuguccucaugcaggagccaaaaguuuuuauaagaaucugaucuggcucauaaagaagggcaacagcuacccaaaauuaucuaaguccuauaucaaugauaagggcaaagaagugcugguacuuugggggauucaccaccccucaacgagcgcugaccaacagaguuuguaccagaacgccgaugcguacguuuucgugggaacuucucgcuauuccaagaaauuuaagccugagaucgcaauucgaccaaaaguccgugaccaggaggguagaaugaauuacuauuggacccugguggaacccggcgauaagaucacauucgaggccacugggaaccuaguggucccuagguacgcuuuugccauggaacggaacgcaggaagcggcauaauuaucucggacaccccaguucaugauugcaauacaaccugucaaacgccgaaaggugcuauuaacacuucucuccccuuccagaauauccacccuaucacaauugggaagugcccaaaguaugugaaauccaccaagcugcgccuugccacuggacugagaaacauacccucaauccagaguaggggcuuguuuggcgcgauugccggguucaucgagggagguuggacaggcaugguagacgggugguacggauaucaucaccagaaugaacaaggcagcgguuacgcagcugaccucaaauccacccagaacgccauagaugagauuacgaauaaggugaacucugucaucgagaaaaugaauacccaguuuacagcuguggggaaggaguucaaccaccuggagaagcggaucgaaaauuuaaacaaaaagguugacgauggcuuccuggacauuuggacuuacaaugccgagcuccuugugcuguuggaaaacgagcgcacccuagauuaucaugacagcaaugucaaaaaccuguacgagaaggugcgaucacagcucaaaaacaaugcaaaggaaaucggaaacggcuguuuugaguucuaucacaagugcgauaauacauguauggaaaguguuaaaaacgggacuuacgacuauccuaaguacuccgaggaagccaaacugaauagagaggagauugauggaguaaaacuugaaagcaccaggauauaucaaauccuggcuauuuacucuacaguggcgucaaguuugguccucguggucagccugggugcaaucuccuuuuggaugugcucuaacggcucguuacagugccggaucuguauuuga

SEQ ID NO: 133338 - RNA, 1701 nt, Artificial Sequence
  derived and/or modified CDS sequence (opt3) from hemagglutinin__InfluenzaA__ADK33931
augaaggccauccuggugguccuccuuuacaccuucgcuacagcaaacgccgacacucugugcauuggcuaucacgcgaauaacagcacggauaccguugacacaguguuggagaaaaauguaacugugacccauuccgucaacuuacuggaagauaagcacaaugggaaacuauguaagcucagaggaguggcuccccugcaucuugguaaaugcaacauagccggcuggauccuggggaauccugagugugaaucuuugucaacagcaaguagcugguccuacauuguugagaccucuucgucagacaacggaacuugcuauccaggcgauuuuaucgacuacgaagaacucagggagcagcugagcaguguguccucuuucgaacgguuugagauuuucccgaagacaagcuccuggcccaaucacgauucaaacaagggugucaccgccgcuuguccucaugcaggggccaaaaguuuuuauaagaaucugaucuggcucgugaaaaagggaaacagcuacccaaaauuaucuaaguccuauauaaaugacaagggcaaagaaguacugguucuuuggggcauccaccaccccucaacgagcgcugaucaacagaguuuguaccagaacgccgacgcguacguguucgucgggacuucucgcuauuccaagaaauuuaagccugagauugcaauccgaccaaaagugcgugagcaggaaggaagaaugaauuacuauuggacccugguggagcccggugauaagauuacauucgaagccacuggcaaccuagucguuccuagguacgcuuuugccauggagcggaacgcagggagcggaaucauaauuucggacaccccagugcaugauugcaauacaaccugucaaacgccgaaaggcgcuaucaacacuucucuccccuuccagaauauucacccuaucacaaucgguaagugcccaaaguauguaaaauccaccaagcugcgccuugccacugggcugagaaacgugcccucaauucagaguaggggauuguuuggcgcgauagccggcuucaucgaagggggauggacagguauggucgacggcugguacggguaucaucaccagaaugagcaaggaagcggcuacgcagcugaccucaaauccacccagaacgccauugaugagaucacgaauaaggugaacucuguuauagaaaagaugaauacccaguuuacagcuguggguaaggaguucaaccaccuggaaaagcggauugagaauuuaaacaaaaaggucgacgauggguuccuggacaucuggacuuacaaugccgaacuccuugugcuguuggagaacgagcgcacccuagauuaucaugacagcaauguuaaaaaccuguacgaaaagguacgaucacagcucaaaaacaaugcaaaggagaucggcaacggauguuuugaguucuaucacaagugcgauaauacauguauggagagugugaaaaacggcacuuacgacuauccuaaguacuccgaagaggccaaacugaauagagaggaaauugauggggucaaacuugagagcaccaggaucuaucaaauucuggcuauauacucuacaguggcgucaaguuugguccuccuggugagcuuaggagcaaucuccuuuuggaugugcucuaacgguucgcugcagugccggauuuguaucuga

SEQ ID NO: 133339 - RNA, 1701 nt, Artificial Sequence
  derived and/or modified CDS sequence (opt3) from hemagglutinin__InfluenzaA__ADK33941
augaaggccauccuggugguccuccuuuacaccuucgcuacagcaaacgccgacacucugugcauuggcuaucacgcgaauaacagcacggauaccguugacacaguguuggagaaaaauguaacugugacccauuccgucaacuuacuggaagauaagcacaaugggaaacuauguaagcucagaggaguggcuccccugcaucuugguaaaugcaacauagccggcuggauccuggggaauccugagugugaaucuuugucaacagcaaguagcugguccuacauuguugagaccucuucgucagacaacggaacuugcuauccaggcgauuuuaucgacuacgaggagcucagggagcagcugagcaguguguccucuuucgaacgguuugagauuuucccgaagacaagcuccuggcccaaucacgauucaaacaagggugucaccgccgcuuguccucaugcaggggccaaaaguuuuuauaagaaucugaucuggcucgugaaaaagggaaacagcuacccaaaauuaucuaaguccuauauaaaugacaagggcaaagaaguacugguucuuuggggcauccaccaccccucaacgagcgcugaucaacagaguuuguaccagaacgccgacgcguacguguucgucgggacuucucgcuauuccaagaaauuuaagccugagauugcaauccgaccaaaagugcgugaucaggagggaagaaugaauuacuauuggacccugguggaacccggugacaagauuacauucgaggccacuggcaaccuagucguuccuagguacgcuuuugccauggaacggaacgcagggagcggaaucgugauaucggauaccccaguacaugacugcaauacaaccugucaaacgccgaaaggcgcuauuaacacuucucuccccuuccagaauauccacccuauuacaaucgguaagugcccaaaguaugugaaauccaccaagcugcgccuugccacugggcugagaaacauccccucaauucagaguaggggauuguuuggcgcgauagccggcuucaucgaagggggauggacagguauggucgacggcugguacggguaucaucaccagaaugaacaaggaagcggcuacgcagcugaucucaaauccacccagaacgccauugacaagaucacgaauaaagugaacucuguuauagagaagaugaauacccaguuuacagcuguggguaaggaguucaaccaccuggaaaaacggauugagaauuuaaacaagaaagucgaugacggguuccuggauaucuggacuuacaaugccgaacuccuugugcuguuggagaacgaacgcacccuagacuaucaugauagcaauguaaagaaccuguacgagaaaguucgaucacagcucaagaacaaugcaaaggagaucggcaacggauguuuugaguucuaucacaaaugcgacaauacauguauggaaagugugaagaacggcacuuacgauuauccuaaauacuccgaagaggccaagcugaauagagaagagauugacggggucaaacuugagagcaccaggaucuaucaaauucuggcuauauacucuacaguggcgucaaguuugguccucgugguuagccugggagcaaucuccuuuuggaugugcucuaacgguucguuacagugccggauuuguaucuga

SEQ ID NO: 133340 - RNA, 1701 nt, Artificial Sequence; identical to SEQ ID NO: 133337
  derived and/or modified CDS sequence (opt3) from hemagglutinin__InfluenzaA__ADK33951

SEQ ID NO: 133341 - RNA, 1701 nt, Artificial Sequence; identical to SEQ ID NO: 131881
  derived and/or modified CDS sequence (opt3) from hemagglutinin__InfluenzaA__ADK33961

SEQ ID NO: 133342 - RNA, 1701 nt, Artificial Sequence; identical to SEQ ID NO: 131661
  derived and/or modified CDS sequence (opt3) from hemagglutinin__InfluenzaA__ADK45312

SEQ ID NO: 133343 - RNA, 1701 nt, Artificial Sequence
  derived and/or modified CDS sequence (opt3) from hemagglutinin__InfluenzaA__ADK45410
augaagaccaucauugcccugagcuacauacucugccuuguguucgcucagaaacugcccggcaacgacaauuccacagcaacuuuguguuuagggcaccaugccgucccuaacggaacgaucguuaagaccauuacaaaugaucaaaucgaggugacuaacgcgaccgaacugguacagucuucaaguacaggugagauuugcgacagcccacaccagauccuagauggcgaaaauuguacccucauagacgcucugcuuggggauccgcagugcgacggauuucaaaacaaaaagugggaucuguucguggagagauccaaagcccauucuaauuguuaucccuacgacgucccugauuaugcaucguugaggucacucguggccagcaguggcacucuggaauuuaacaaugaguccuucaacuggacagguguuacccagaaugggacgucuagcgcuugcauccggcgcuccaacaauucauuuuucagucgacugaacuggcucacucacuuaaaguuuaaguacccagcacugaaugugaccaugcccaacaacgagcaguucgacaaacuuuauauuuggggaguccaucacccuggcacagauaaugaccagaucuuuuuguacgcccaagcuagcggccguauuacugugucuaccaagagaucccagcagacaguaaucccaaacauagggucaaggccccggguucgcaauauuccuagcagaaucaguauuuauuggaccaucgugaaaccaggagauauccugcuaauuaacucuacggguaaucucauagccccgaggggcuacuucaagauccgguccgggaaaagcucgauuaugcgcucugacgcgcccaucggaaaguguaacuccgaaugcauaacuccuaauggcucaauuccaaacgacaagcccuuucagaaugucaaccgaaucacauacggugcauguccuagauaugugaaacaaaauacccugaagcuggccacugggaugaggaacgugccagagaaacagacacggggaaucuucggcgcuauugccggcuuuaucgaaaaugggugggagggaauggucgaugguugguacggcuuccgucaccagaacagugaggggcgcggacaagcagcugaccuuaagagcacccaggccgcgauugaucagauaaauggcaaauugaacagacucaucgguaagacgaacgaaaaauuccaucagauugagaaggaauuuuccgagguugaagggaggauccaagaccuggagaaguauguggaggauaccaaaaucgacuuauggucuuacaaugccgaacugcucguagcacuugagaaccagcacacaauugaucugacugacagcgaaaugaauaaguuguucgagaaaaccaagaaacagcuacgggaaaacgcugaggauaugggcaauggaugcuuuaagauauaucauaagugugacaacacaugcaucggcucaauucgaaaugggacuuacgaucacgacguguaucgcgacgaggcccugaacaauagauuccagaucaaaggagucgaacucaagagugguuacaaagauuggauucuguggaucuccuuugcuauaagcugcuuccuucuguguguggccuugcucggcuuuaucaugugggcaugccaaaaggggaacauuagguguaauaucugcauuuga

SEQ ID NO: 133344 - RNA, 1701 nt, Artificial Sequence
  derived and/or modified CDS sequence (opt3) from hemagglutinin__InfluenzaA__ADK45421
augaagaccaucauugcccugagcuacauacucugccuuguguucgcucagaaacugcccggcaacgacaauuccacagcaacuuuguguuuagggcaccaugccgucccuaacggaacgaucguuaagaccauuacaaaugaucaaaucgaggugacuaacgcgaccgaacugguacagucuucaaguacaggugagauuugcgacagcccacaccagauccuagauggcaaaaauuguacccucauagacgcucugcuuggggauccgcagugcgacggauuucaaaacaagaaaugggaucuguucguggaaagauccaaggccuauucuaauuguuaccccuaugacgucccugauuacgcaucguugaggucacucguggccagcaguggcacucuggaguuuaacaaugaauccuucaacuggacagguguuacccagaaugggacgucuagcgcuugcauccggcgcuccaagaacucauuuuucagucgacugaauuggcucacucauuuaaacuuuaaauauccagcacugaaugugaccaugcccaacaacgagcaguucgacaaacuuuacauuuggggaguccaccauccuggcacagauaaagaccagaucuuuuuguaugcccaagcuagcggccguauuacugugucuaccaagagaucccagcagacaguaaucccaaauauagggucaaggccccggauucgcaacaucccuagcagaauuaguaucuacuggaccaucguuaaaccaggagauauucugcuaauaaauucuacggguaaccucaucgccccgaggggcuacuucaagauucgguccggaaagagcucgaucaugcgcucugacgcgcccauagggaaauguaauuccgagugcauuacuccuaacggcucaaucccaaaugacaagcccuuucagaacgugaaucgaaucacauauggugcauguccuagauacgucaaacaaaguacccugaaacuugccacugggaugaggaacgugccagaaaagcagacacggggaauuuucggcgcuaucgccggcuuuauugagaaugggugggaaggaaugguggaugguugguauggcuuccgucaccagaacagcgaggggcgcggacaagcagcugaccugaaguccacccaggccgcgauagaucagaucaauggcaaauugaacagacucauugguaagacgaaugagaaguuccaccagaucgaaaaagaguuuucugaagucgaggggaggauccaagaccuggaaaaguacguugaggauaccaaaauugacuuauggagcuauaacgccgagcugcucguggcacuugaaaaccagcauacaauagaucugacugacucagagaugaauaaguuguucgaaaagaccaagaagcagcuacgggagaacgcugaagauaugggcaauggaugcuuuaaaaucuaccacaagugugacaacgccugcauuggcaguauccgaaaugggacauaugaucaugacguauaccgcgacgaggcucugaacaauagauuccagauuaaaggaguggagcucaaguccgguuacaaagauuggauccuguggaucagcuuugccauaucuugcuuccuucugugugucgcauugcucggcuuuauuaugugggccugccaaaaggggaacaucagguguaauauuugcaucuga

SEQ ID NO: 133345 - RNA, 1701 nt, Artificial Sequence
  derived and/or modified CDS sequence (opt3) from hemagglutinin__InfluenzaA__ADK45432
augaagaccaucauugcccugagcuacacacucugccuuguguucgcucagaaacugcccagaaacgacaauuccacugcaacguuguguuuaggccaccaugccgucccuaacgggaccauaguuaagacaaucacuaaugaucaaauugaggugaccaacgcgacagaacugguacagucuucaaguaccggagagaucugcgacaauccacaccagauucuagauggugaaaacuguacucucaucgacgcucugcuuggcgauccgcagugcgacggguuucaaaauaaaaagugggaucuguucguggagaggagcaaagccuauuccaacuguuaccccuaugacgucccugauuacgcaucuuugcggucgcucguggccucaagcggaacacuggaauuuaauaacgagaguuucaauuggaccggcguuacgcagaacgguacuuccucugcuugcauacgccgaagcaauaacuccuuuuucucacgucugaauuggcucacccauuuaaaguuuaaguauccagcacugaacgugacaaugcccaacaaugagcaguucgacaaacuuuacaucuggggaguccaccauccugggacugauaacgaccagauuuuucuuuaugcccaagcuaguggcagaaucaccgugagcacaaagaggucucagcagaccguaauuccaaauaucggcucccggccccgcguuagaaacauaccuucaaggauuagcaucuacuggacgauugugaaaccaggggauauccugcuaaucaauaguacuggaaaccucauugccccgcgggguuacuucaagauacgcucuggcaaauccagcaucaugcgaucggacgcgcccauugggaaguguaauucugaaugcaucacaccuaacggauccauaccaaaugacaagcccuuucagaacgucaauagaauuaccuauggcgcauguccuagguacgugaaacaaaacacucugaaguuggccacagguaugcggaaugugccagagaaacagacccgugggaucuucggagcuaucgccggcuuuauugaaaacggcugggaggggauggucgauggaugguaugguuuccgccaccaaaauucagagggcagagggcaggcagcugaccugaagaguacgcaggccgcgaucgaucagauuaacggaaaauugaacaggcucauaggcaagaccaaugaaaaauuccaccagaucgagaaggaauuuagcgagguugaaggucggauucaagaccuggagaaguacguggaggauacaaaaaucgacuuaugguccuauaacgccgaacugcucguagcacuugagaaucagcauacuaucgaucugaccgacucugaaaugaacaaguuguucgagaaaacaaagaaacagcuacgagaaaaugcugaggauauggggaacggcugcuuuaagauuuaccacaagugugacaaugccugcauaggaagcauccgcaacggcacuuaugaucaugacguguacagagacgaggcucugaauaacagguuccagauuaaaggggucgaacucaagucaggauacaaagauuggauccuguggauuaguuuugccaucuccugcuuccuucuguguguggcauugcucgguuuuauaaugugggccugccaaaagggcaauauccgguguaacauuugcaucuga

SEQ ID NO: 133346 - RNA, 1701 nt, Artificial Sequence; identical to SEQ ID NO: 130482
  derived and/or modified CDS sequence (opt3) from hemagglutinin__InfluenzaA__ADK45443

SEQ ID NO: 133347 - RNA, 1701 nt, Artificial Sequence; identical to SEQ ID NO: 132881
  derived and/or modified CDS sequence (opt3) from hemagglutinin__InfluenzaA__ADK48798

SEQ ID NO: 133348 - RNA, 1701 nt, Artificial Sequence; identical to SEQ ID NO: 131881
  derived and/or modified CDS sequence (opt3) from hemagglutinin__InfluenzaA__ADK62683

SEQ ID NO: 133349 - RNA, 1701 nt, Artificial Sequence
  derived and/or modified CDS sequence (opt3) from hemagglutinin__InfluenzaA__ADK62693
augaaggccauccuggugguccuccuuuacaccuucgcuacagcaaacgccgacacucugugcauuggcuaucacgcgaauaacagcacggauaccguugacacaguguuggagaagaauguaacugugacccauuccgucaacuuacuggaagauaagcacaaugggaaacuauguaagcucagaggaguggcuccccugcaucuugguaaaugcaacauagccggcuggauccuggggaauccugaguguggaucuuugucaacagcaaguagcugguccuacauuguugaaaccucuucgucagacaacggcacuugcuauccaggugauuuuaucgacuacgaggaacucagggagcagcugagcaguguguccucuuucgagcgguuugaaauuuucccgaagacaagcuccuggcccaaucacgauucaaacaagggggucaccgccgcuuguccucaugcaggagccaaaaguuuuuauaagaaucugaucuggcucgugaaaaagggcaacagcuacccaaaauuaucuaaguccuauauaaaugacaagggcaaagagguacugguucuuugggggauccaccaccccucaacgagcgcugaucaacagaguuuguaccagaacgccgacgcguacguguucgucggaacuucucgcuauuccaagaaauuuaagccugaaauugcaauccgaccaaaagugcgugagcaggaggguagaaugaauuacuauuggacccugguggaacccggcgauaagauuacauucgaggccacugggaaccuagucguuccuagguacgcuuuugccauggaacggaacgcaggaagcggcaucauaauuucggacaccccagugcaugauugcaauacaaccugucaaacgccgaaaggugcuaucaacacuucucuccccuuccagaauguacacccuauuacaaucgggaagugcccaaaguaugugaaauccaccaagcugcgccuugccacuggacugagaaacguccccucaauccagaguaggggcuuguuuggcgcgauugccggguucauagagggagguuggacaggcaugguggacgggugguacggauaucaucaccagaaugaacaaggcagcgguuacgcagcugaccucaaauccacccagaacgccaucgaugagauuacgaauaagguuaacucugugaucgagaaaaugaauacccaguuuacagcugucgggaaggaguucaaccaccuggaaaagcggauagaaaauuuaaacaaaaagguggacgauggcuuccuggacauuuggacuuacaaugccgagcuccuuguacuguuggaaaacgagcgcacccuagauuaucaugacagcaauguuaaaaaccuguacgagaaggugcgaucacagcucaaaaacaaugcaaaggaaaucggaaacggcuguuuugaguucuaucacaagugcgauaauacauguauggaaagugucaaaaacgggacuuacgacuauccuaaguacuccgaggaagccaaacugaauagagaggagaucgauggagugaaacuugaaagcaccaggauuuaucaaauccuggcuauuuacucuacagucgcgucaaguuuggugcucguugugagccugggugcaauauccuuuuggaugugcucuaacggcucguuacagugccggaucuguauuuga

SEQ ID NO: 133350 - RNA, 1701 nt, Artificial Sequence; identical to SEQ ID NO: 131818
  derived and/or modified CDS sequence (opt3) from hemagglutinin__InfluenzaA__ADK62703

SEQ ID NO: 133351 - RNA, 1701 nt, Artificial Sequence
  derived and/or modified CDS sequence (opt3) from hemagglutinin__InfluenzaA__ADK64992
augaaggccauccuggugguccuccuuuacaccuucgcuacagcaaacgccgacacucugugcauuggcuaucacgcgaauaacagcacggauaccguugacacaguguuggagaaaaauguaacugugacccauuccgucaacuuacuggaagauaagcacaaugggaaacuauguaagcucagaggaguggcuccccugcaucuugguaaaugcaacauagccggcuggauccuggggaauccugagugugaaucuuugucaacagcaaguagcugguccuacauuguugagaccucuucgucagacaacggaacuugcuauccaggcgauuuuaucgacuacgaggagcucagggagcagcugagcaguguguccucuuucgaacgguuugagauuuucccgaagacaagcuccuggcccaaucacgauucaaacaagggugucaccgccgcuuguccucaugcaggggccaaaaguuuuuauaagaaucugaucuggcucgugaaaaagggaaacagcuacccaaaauuaucuaaguccuauauaaaugacaagggcaaagaaguacugguucuuuggggcauccaccaccccucaacgagcgcugaucaacagaguuuguaccagaacgccgacgcguacguguucgucgggacuucucgcuauuccaagaaauuuaagccugagauugcaauccgaccaaaagugcgugaucaggagggaagaaugaauuacuauuggacccugguggaacccggugacaagauuacauucgaggccacuggcaaccuagucguuccuagguacgcuuuugccauggaacggaacgcagggagcggaaucauaauuucggauaccccagugcaugacugcaauacaaccugucaaacgccgaaaggcgcuaucaacacuucucuccccuuccagaauauucacccuaucacaaucgguaagugcccaaaguauguaaaauccaccaagcugcgccuugccacugggcugagaaacgugcccucaauucagaguaggggauuguuuggcgcgauagccggcuucaucgaagggggauggacagguauggucgacggcugguacggguaucaucaccagaaugaacaaggaagcggcuacgcagcugaucucaaauccacccagaacgccauugacgagaucacgaauaaggugaacucuguuauagagaaaaugaauacccaguuuacagcuguggguaaggaguucaaccaccuggaaaagcggauugaaaauuuaaacaaaaaggucgaugacggguuccuggauaucuggacuuacaaugccgagcuccuugugcuguuggaaaacgagcgcacccuagacuaucaugauagcaauguaaagaaccuguacgagaagguucgaucacagcucaaaaacaaugcaaaggaaaucggcaacggauguuuugaguucuaucacaagugcgacaauacauguauggaaagugugaaaaacggcacuuacgauuauccuaaguacuccgaggaagccaaacugaauagagaggagauugacgggaucaaacuugaaagcaccaggauuuaucaaauacuggcuaucuacucuacagucgcgucaaguuuggugcucgucgugagccugggagcaauuuccuuuuggaugugcucuaacgguucguuacaguaccggaucugcaucuga

SEQ ID NO: 133352 - RNA, 1701 nt, Artificial Sequence
  derived and/or modified CDS sequence (opt3) from hemagglutinin__InfluenzaA__ADK65001
augaaggccauccuggugguccuccuuuacaccuucgcuacagcaaacgccgacacucugugcauuggcuaucacgcgaauaacagcacggauaccguugacacaguguuggagaaaaauguaacugugacccauuccgucaacuuacuggaagauaagcacaaugggaaacuauguaagcucggagguguggcuccccugcaucuuggcaaaugcaacauagccggguggauccugggaaauccugagugugaaucuuugucaacagcaaguagcugguccuacauuguugagaccucuucgucagacaacggcacuugcuauccaggugauuuuaucgacuacgaagaacucagagagcagcugagcaguguguccucuuucgaaagguuugagauuuucccgaagacaagcuccuggcccaaucacgauucaaacaagggggucaccgccgcuuguccucaugcaggagccaaaaguuuuuauaagaaucugaucuggcucgugaaaaagggcaacagcuacccaaaauuaucuaaguccuauauaaaugacaagggcaaagaaguacugguucuuugggggauccaccaccccucaacgagcgcugaucaacagaguuuguaccagaacgccgacgcguacguguucgucggaacuucucgguauuccaagaaauuuaagccugagauugcaauccgcccaaaagugcgagaucaggagggucguaugaauuacuauuggacccugguggaacccggcgacaagauuacauucgaggccacugggaaccuagucguuccuagauacgcuuuugccauggaaaggaacgcaggaagcggcaucauaauuucggauaccccagugcaugacugcaauacaaccugucaaacgccgaaaggugcuaucaacacuucucuccccuuccagaauauucacccuaucacaaucgggaagugcccaaaguauguaaaauccaccaagcugcggcuugccacuggacugcgcaacgugcccucaauucagaguagaggcuuguuuggcgcgauagccggguucaucgagggagguuggacaggcauggucgacgggugguacggauaucaucaccagaaugaacaaggcagcgguuacgcagcugaucucaaauccacccagaacgccauugacgagaucacgaauaaggugaacucuguuauagagaaaaugaauacccaguuuacagcuguggggaaggaguucaaccaccuggagaagaggauugaaaauuuaaacaaaaaggucgaugacggcuuccuggauaucuggacuuacaaugccgagcuccuugugcuguuggaaaacgagcggacccuagacuaucaugauagcaauguuaaaaaccuguacgagaagguacgcucacagcucaaaaacaaugcaaaggaaaucggaaacggcuguuuugaguucuaucacaagugcgacaauacaugucuggaaagugugaaaaacgggacuuacgauuauccuaaguacuccgaggaagccaaacuuaaucgagaggagauugacggagucaagcuggaaagcaccagaaucuaucaaauuuuggcuauauacucuacaguggcgucaagucucguccuggugguuagcuuaggugcaaucuccuuuuggaugugcucuaacggcucgcugcagugcaggauuuguaucuga

SEQ ID NO: 133353 - RNA, 1701 nt, Artificial Sequence
  derived and/or modified CDS sequence (opt3) from hemagglutinin__InfluenzaA__ADK65009
augaaggccauccuggugguccuccuuuacaccuucgcuacagcaaacgccgacacucugugcauuggcuaucacgcgaauaacagcacggauaccguugacacaguguuggagaaaaauguaacugugacccauuccgucaacuuacuggaagauaagcacaaugggaaacuauguaagcucagaggaguggcuccccugcaucuugguaaaugcaacauagccggcuggauccuggggaauccugagugugaaucuuugucaacagcaaguagcugguccuacauuguugagaccucuucgucagacaacggaacuugcuauccaggcgauuuuaucgacuacgaagaacucagggagcagcugagcaguguguccucuuucgaacgguuugagauuuucccgaagacaagcuccuggcccaaucacgauccuaacaagggugucaccgccgcuuguccacaugcaggggccaaaucauuuuauaagaaucugaucuggcucgugaaaaagggaaacaguuaccccaaauuaagcaagucuuauauaaaugacaagggcaaagaaguacugguucuuuggggcauccaccacccuuccacgucagcugaucaacagagcuuguaccagaacgccgacgcguacguguucgucgggaccagucgcuauucuaagaaauuuaagccagagauugcaauccgacccaaagugcgugaucaggagggaagaaugaauuacuauuggacucugguggaaccuggugacaagauuacauucggcgccacugggaaccuagucguuccaagguacgcuuuugccauggagcggaacgcaggauccggcaucauaauuagcgauaccccggugcaugacugcaauacaaccugucaaacgcccaaaggugcuaucaacacuucgcucccuuuccagaauauucacccaaucacaaucgggaagugccccaaguauguaaaaucuaccaagcugcgccuugccacuggacugagaaacgugccuuccauucagucaaggggcuuguuuggcgcgauagccggguucaucgaaggagguuggacaggcauggucgacgggugguacggauaucaucaccagaaugagcaaggcagugguuacgcagcugaucucaaaagcacccagaacgccauugacgaaaucacgaauaaggugaacuccguuauagagaaaaugaauacccaguuuacagcuguggggaaggaguucaaccaccuggaaaagcggauugagaauuuaaacaaaaaggucgaugacggcuuccuggauaucuggacuuacaaugccgaacuccuugugcuguuggagaacgaacgcacccuagacuaucaugauucuaauguaaagaaccuguacgagaagguucgaagccagcucaaaaacaaugcaaaggagaucggaaacggcuguuuugaguucuaucacaagugcgacaauacauguauggagucagugaaaaacgggacuuacgauuauccaaaguacagugaagaggccaaacugaauagagaagagauugacggagucaaacuugaguccaccaggaucuaucaaauucuggcuauauacagcacaguggcgucuucauugguccucgugguuagucugggugcaaucagcuuuuggaugugcuccaacggcucuuuacagugccggauuuguaucuga

SEQ ID NO: 133354 - RNA, 1701 nt, Artificial Sequence
  derived and/or modified CDS sequence (opt3) from hemagglutinin__InfluenzaA__ADK87287
augaagaccaucauugcccugagcuacauacucugccuuguguucgcucagaaacugcccggcaacgacaauuccacagcaacuuuguguuuagggcaccaugccgucccuaacggaacgaucguuaagaccauuacaaaugaucaaaucgaggugacuaacgcgaccgaacugguacagucuucaaguacaggugagauuugcgacagcccacaccagauccuagauggcaaaaauuguacccucauagacgcucugcuuggggauccgcagugcgacggauuucaaaacaagaaaugggaucuguucguggaaagauccaaggccuauucuaauuguuaccccuaugacgucccugauuacgcaucguugaggucacucguggccagcaguggcacucuggaguuuaacaaugaauccuucaacuggacagguguuacccagaaugggacgucuagcgcuugcauccggcgcuccaagaacucauuuuucagucgacugaauuggcucacucauuuaaacuuuaaauauccagcacugaaugugaccaugcccaacaacgagcaguucgacaaguuguacauuuggggaguccaccauccuggcacagauaaagaccagaucuuuuuguaugcccaagcuagcggccguauuacugugucuaccaagagaucccagcagacagccaucccaaauauagggucaaggccccggguacgcaacauuccuagcagaaucaguauuuacuggaccaucguuaaaccaggagauauccugcuaauuaauucuacggguaaccucauagcgccgaggggcuacuucaagauccgguccgggaaaagcucgauuaugcgcucugacgcacugaucggaaaauguaauuccgagugcauaacucccaacggcucaauuccuaaugacaagccauuucagaacgugaaucgaaucacauauggugccugucccagauacgucaaacaaaacacccuuaagcuggcuacugggaugaggaaugugccugaaaaacagacacggggaaucuucggcgccauugcaggcuuuaucgagaacgggugggaaggaaugguggaugguugguauggcuuccgucaccagaauagugaggggcgcggacaagcugccgaccuuaagagcacccaggcggccauugaucagauaaacggcaaacucaauagacugaucgguaagacgaacgagaaguuccaccagauugaaaaagaguuuuccgaagucgaggggaggauccaagacuuagaaaaguacguugaggauaccaaaaucgaccuguggucuuauaacgcagagcuccuuguggcucuggaaaaucagcauacaauugauuugacugacagcgagaugaacaagcuauucgaaaagaccaagaagcagcugcgggagaaugccgaagauaugggcaacggaugcuuuaaaauauaccacaagugugacaaugcuugcaucggcucaauucgaaacgggacauaugaucaugacguauaccgcgacgaggcccucaauaacagauuccagaucaaaggaguggagcugaagagugguuacaaagauuggauucuuuggaucuccuuugcaauaagcugcuuccuguugugugucgcccuccugggcuuuaucaugugggcuugccaaaaggggaauauuagguguaacaucugcauuuga

SEQ ID NO: 133355 - RNA, 1701 nt, Artificial Sequence
  derived and/or modified CDS sequence (opt3) from hemagglutinin__InfluenzaA__ADK87288
augaagaccaucauugcccugagcuacauacucugccuuguguucgcucagaaacugcccggcaacgacaauuccacagcaacuuuguguuuagggcaccaugccgucccuaacggaacgaucguuaagaccauuacaaaugaucaaaucgaggugacuaacgcgaccgaacugguacagucuucaaguacaggugagauuugcgacagcccacaccagauccuagauggcaaaaauuguacccucauagacgcucugcuuggggauccgcagugcgacggauuucaaaacaagaaaugggaucuguucguggaaagauccaaggccuauucuaauuguuaccccuaugacgucccugauuacgcaucguugaggucacucguggccagcaguggcacucuggaguuuaacaaugaauccuucaacuggacagguguuacccagaaugggacgucuagcgcuugcauccggcgcuccaagaacucauuuuucagucgacugaauuggcucacucauuuaaacuuuaaauauccagcacugaaugugaccaugcccaacaacgagcaguucgacaaacuuuacauuuggggaguccaccauccuggcacagauaaagaccagaucuuuuuguaugcccaagcuacuggccguauuaccgugagcacaaagagaucucagcagaccgccaucccaaauauaggguccaggccccggguacgcaacauuccuucaagaaucagcauuuacuggacgaucguuaaaccaggagauauccugcuaauuaauaguacugguaaccucauagcgccgaggggcuacuucaagauccggucugggaaguccagcauuaugcgcucggacgcacccaucggaaaauguaauucugagugcauaacaccuaacggcuccauuccaaaugacaagcccuuucagaacgugaaucgaaucaccuauggugccuguccuagauacgucaaacaaaacacucugaaacuugcuacagggaugaggaaugugccagaaaagcagacccggggaaucuucggcgccauugcaggcuuuaucgagaacgggugggaaggaaugguggaugguugguauggcuuccgucaccaaaauucagaggggcgcggacaggcugccgaccugaagaguacgcaggcggccauugaucagauaaacggcaaauugaauagacucaucgguaagaccaacgagaaguuccaccagauugaaaaagaguuuagcgaagucgaggggaggauccaagaccuggaaaaguacguugaggauacaaaaaucgacuuaugguccuauaacgcagagcugcucguggcucuugaaaaucagcauacuauugaucugaccgacucugagaugaacaaguuguucgaaaagacaaagaagcagcuacgggagaaugccgaagauaugggcaacggaugcuuuaaaauauaccacaagugugacaaugcuugcaucggcagcauucgaaacgggacuuaugaucaugacguauaccgcgacgaggcccugaauaacagauuccagaucaaaggaguggagcucaagucagguuacaaagauuggauucuguggaucaguuuugcaauauccugcuuccuucugugugucgccuugcucggcuuuaucaugugggcuugccaaaaggggaauauuagguguaacaucugcauuuga

SEQ ID NO: 133356 - RNA, 1701 nt, Artificial Sequence
  derived and/or modified CDS sequence (opt3) from hemagglutinin__InfluenzaA__ADK87289
augaagaccaucauugcccugagcuacauacucugccuuguguucgcucagaaacugcccggcaacgacaauuccacagcaacuuuguguuuagggcaccaugccgucccuaacggaacgaucguuaagaccauuacaaaugaucaaaucgaggugacuaacgcgaccgaacugguacagucuucaaguacaggugagauuugcgacagcccacaccagauccuagauggcaaaaauuguacccucauagacgcucugcuuggggauccgcagugcgacggauuucaaaacaagaaaugggaucuguucguggaaagauccaaggccuauucuaauuguuaccccuaugacgucccugauuacgcaucguugaggucacucguggccagcaguggcacucuggguuuuaacaaugaguccuucaacuggacagggguuacccagaauggaacgucuagcgcuugcauccggcgcuccaagaacucauuuuucagucgacugaauuggcucacucauuuaaacuuuaaauauccagcacugaaugugaccaugcccaacaacgaacaguucgacaagcuguacauuuggggcguccaccauccuggcacagauaaagaccagaucuuuuuguaugcccaagcuagcgggcguauuacugugucuaccaagagaucccagcagacagccaucccaaauauaggaucaaggccccggguacgcaacauuccuagcagaaucaguauuuacuggaccaucguuaaaccaggugauauccugcuaauuaauucuacgggcaaccucauagcgccgaggggguacuucaagauccgguccggaaagagcucgauuaugcgcucugacgcacccaucggcaaauguaauuccgagugcauaacuccuaacgguucaauuccaaaugacaagcccuuucagaacgugaaucgaaucacauauggggccuguccuagauacgucaaacaaaacacccugaaacuugcuacuggaaugaggaaugugccagagaaacagacacggggcaucuucggcgccauugcaggguuuaucgaaaacggaugggaggguaugguggauggcugguauggguuccgucaccagaauagugaaggacgcggccaagcugccgaccuuaagagcacccaggcggccauugaucagauaaacgguaaauugaauagacucaucgggaagacgaacgagaaguuccaccagauugagaaagaauuuuccgaggucgaaggcaggauccaagaccugggaaaguacguugaggauaccaaaaucgacuuauggucuuauaacgcagaacugcucguggcucuugagaaucagcauacaauugaucugacugacagcgagaugaacaaguuguucgaaaagaccaagaagcagcuacgggagaaugccgaagauaugggcaacgggugcuuuaaaauauaccacaagugugacaaugcuugcaucggaucaauucgaaacgguacauaugaucaugacguauaccgcgacgaggcccugaauaacagauuccagaucaaaggcguggaacucaagaguggguacaaagauuggauucuguggaucuccuuugcaauaagcugcuuccuucugugugucgccuugcucggauuuaucaugugggcuugccaaaagggcaauauuagguguaacaucugcauuuga

SEQ ID NO: 133357 - RNA, 1701 nt, Artificial Sequence
  derived and/or modified CDS sequence (opt3) from hemagglutinin__InfluenzaA__ADK87291
augaagaccaucauugcccugagcuacauacagugccucguguucgcucaaaaacuucccggcaacgacaauuccacagcaacucuguguuuggggcaccaugccgucccuaacggaacgaucguuaagaccauuacaaaugaucagaucgaggugacuaacgcgaccgaauuaguacagucuucaaguacaggugagauuugcgacagcccacaccagauccuggauggcaaaaauuguacccuaauagacgcucuccugggggauccgcaaugcgacggauuucagaacaagaaaugggaucuuuucguggaaagauccaaggccuauucuaauuguuaccccuaugacgucccugauuacgcaucgcugaggucauugguggccagcaguggcacucucgaguuuaacaaugaauccuucaacuggacagguguuacccagaaugggacgucuagcgcuugcauccggcgcuccaagaacucauuuuucagucgacugaauuggcugacucaucucaacuuuaaauauccagcauuaaaugugaccaugcccaacaacgagcaguucgacaagcuguacauuuggggaguccaccauccuggcacagauaaagaccaaaucagccuuuaugcccaggcuucuggccguauuacuguguccaccaagagaucacagcagacagccaucccaaauauagggagcaggccccggguacgcaacauuccuaguagaaucucuauuuacuggaccaucguuaaaccaggagauaucuugcugauuaauuccacggguaaccuaauagcgccgaggggcuacuuuaagauccggagcgggaagucgucuauuaugcgcuccgacgcacccaucggaaaauguaauucagagugcauaacuccuaacggcaguauuccaaaugacaagcccuuccaaaacgugaaucgaaucacauauggugccuguccuagauacgucaaacagaacacccucaagcuggcuacugggaugaggaaugugccagaaaaacagacacggggaaucuuuggcgccauugcaggcuucaucgagaacgggugggaaggaaugguggaugguugguauggcuuucgucaccaaaauagcgaggggcgcggacaggcugccgaccuuaaguccacccaggcggccauugaucagauaaacggcaaacugaauagauugaucgguaagacgaacgagaaguuccaccaaauugaaaaagaguucucugaagucgaggggaggauccaggaccucggcaaguacguugaagauaccaaaaucgaccuguggagcuauaacgcagaguuacugguggcucucgagaaucagcauacaauugaucuuacugacucagaaaugaacaagcuguuugagaaaaccaagaagcaguugcgggaaaaugccgaggauaugggaaacggcugcuucaaaauauaccacaagugugacaaugcuugcaucgggaguauucgaaacggaacauaugaucaugacguauaccgcgacgaagcccuaaauaacagauuucaaaucaaagguguggagcugaaguccggcuacaaagauuggauucucuggaucagcuucgcaauaucuugcuuucugcuuugugucgcccuguugggguucaucaugugggcuugccagaagggaaauauuagguguaacaucugcauuuga

SEQ ID NO: 133358 - RNA, 1701 nt, Artificial Sequence
  derived and/or modified CDS sequence (opt3) from hemagglutinin__InfluenzaA__ADK87293
augaagaccaucauugcccugagcuacauacucugccuuguguucgcucagaaacugcccggcaacgacaauuccacagcaacuuuguguuuagggcaccaugccgucccuaacggaacgaucguuaagaccauuacaaaugaucaaaucgaggugacuaacgcgaccgaacugguacagucuucaaguacaggugagauuugcgacagcccacaccagauccuagauggcaaaaauuguacccucauagacgcucugcuuggggauccgcagugcgacggauuucaaaacaagaaaugggaucuguucguggaaagauccaaggccuauucuaauuguuaccccuaugacgucccugauuacgcaucguugaggucacucguggccagcaguggcacucuggaguuuaacaaugaauccuucaacuggacagguguuacccaggacgggacgucuagcgcuugcauccggcgcuccaaaaauucauuuuucaguaagcugaacuggcucacucauuuaaauuuuaaguauccagcacugaacgugaccaugcccaauaacgagcaguucgauaaacuuuacauuuggggaguccaccauccuggcacagacaaggaucagaccuuuuuguaugcccaagcuagcggccgaaucacugugucuacaaaacguucccagcagaccgccauuccaaacaucgggucaagacccaggguacggaauauaccuagccgcauuaguaucuacuggacgauuguuaagccaggagacauccugcuaaucaacucuacugguaaucucauugcgccgagaggcuacuucaagauaagguccgggaaaagcucgaucaugcggucugacgcacccauuggaaaguguaacuccgagugcaucacaccuaauggcucaauaccaaacgauaaacccuuucagaaugugaaccgcauuaccuauggugccuguccucgauacgucaagcaaaauacucugaaacuugcuacagggaugagaaacgugccagaaaagcagaccaggggaaucuucggcgccaucgcaggcuuuauugagaaugggugggaaggaaugguggacgguugguauggcuuccggcaccagaacagugaggggcguggacaagcugccgaucugaaaagcacgcaggcggccaucgaccagauuaauggcaaguugaaccgccucauagguaagaccaaugagaaauuccaccagaucgaaaaggaguuuuccgaagucgaggggaggauucaagaucuggaaaaauacguugaggacacaaagaucgauuuauggucuuauaacgcagagcugcucguggcucuugaaaaccagcauacuaucgaccugaccgauagcgagaugucaaaauuguucgaaaagacaaagaaacagcuaagagagaaugccgaagacaugggcaacggaugcuuuaagauuuaccacaaaugugauaaugcuugcauaggcaguauccggaacgggacuuaugaccaugacguauaccgagaugaggcccugaauaaccgcuuccagauuaagggaguggagcucaaauccgguuacaaggacuggauccuguggauuagcuuugcaaucucuugcuuccuucugugugucgccuugcucggcuuuauaaugugggcuugccaaaaggggaauaucagauguaacauuugcaucuga

SEQ ID NO: 133359 - RNA, 1701 nt, Artificial Sequence
  derived and/or modified CDS sequence (opt3) from hemagglutinin__InfluenzaA__ADK87295
augaagaccaucauugcccugagcuacauacucugccuuguguucgcucagaaacugcccggcaacgacaauuccacagcaacuuuguguuuagggcaccaugccgucccuaacggaacgaucguuaagaccauuacaaaugaucaaaucgaggugacuaacgcgaccgaacugguacagucuucaaguacaggugagauuugcgacagcccacaccagauccuagauggcaaaaauuguacccucauagacgcucugcuuggggauccgcagugcgacggauuucaaaacaagaaaugggaucuguucguggaaagauccaaggccuauucuaauuguuaccccuaugacgucccugauuacgcaucguugaggucacucguggccagcaguggcucccuggaguuuaacaaugaaucuuucaacuggacugguguuacacagaaugggaccagcuccgcuugcauccggcgcucaaagaacagcuuuuucagucgacugaauuggcucacgcauuuaaacuuuaaauauccagcacugaaugugacuaugcccaacaacgagcaguucgacaaacuuuacauuuggggaguccaccauccuggcaccgauaaagaccagaucuuuuuguaugcccaggcuucuggccguauuacaguguccacuaagagaucacaacagaccgccaucccaaauauagggagcaggccccggguacgcaacauuccuaguagaaucucuauuuacuggacaaucguuaaaccaggagauauccugcuaauuaauuccaccgguaaccucauagcgccgaggggcuacuucaagauccggagcgggaagucgucuauuaugcgcuccgacgcacccaucggaaaauguaauucagagugcauaacgccuaacggcaguauuccaaaugacaagcccuuucagaacgugaaucgaaucacuuauggugccuguccuagauacgucaaacaaaacacacugaaacuugcuaccgggaugaggaaugugccagaaaagcagacucggggaaucuucggcgccauugcaggcuuuaucgagaacgggugggaaggaaugguggaugguugguauggcuuccgucaccagaauagcgaggggcgcggacaagcugccgaccugaaguccacacaggcggccauugaucagauaaacggcaaauugaauagacucaucgguaagaccaacgagaaguuccaccagauugaaaaagaguuuucugaagucgaggggaggauccaagaccuggaaaaguacguugaggauacgaaaaucgacuuauggagcuauaacgcagagcugcucguggcucuugaaaaucagcauaccauugaucugacagacucagagaugaacaaguuguucgaaaagacuaagaagcagcuacgggagaaugccgaagauaugggcaacggaugcuuuaaaauauaccacaagugugacaaugcuugcaucggcaguauucgaaacgggaccuaugaucaugacguauaccgcgacgaggcccugaauaacagauuccagaucaaaggaguggagcucaaguccgguuacaaagauuggauucuguggaucagcuuugcaauaucuugcuuccuucugugugucgccuugcucggcuuuaucaugugggcuugccaaaaggggaauauuaggcggaacaucuguauuuga

SEQ ID NO: 133360 - RNA, 1701 nt, Artificial Sequence
  derived and/or modified CDS sequence (opt3) from hemagglutinin__InfluenzaA__ADK87296
augaaggccauccuggugguccuccuuuacaccuucgcuacagcaaacgccgacacucugugcauuggcuaucacgcgaauaacagcacggauaccguugacacaguguuggagaaaaauguaacugugacccauuccgucaacuuacuggaagauaagcacaaugggaaacuauguaagcucagaggaguggcuccccugcaucuugguaaaugcaacauagccggcuggauccuggggaauccugagugugaaucuuugucaacagcaaguagcugguccuacauuguugagaccucuucgucagacaacggaacuugcuauccaggcgauuuuaucgacuacgaggagcucagggagcagcugagcaguguguccucuuucgaacgguuugagauuuucccgaagacaagcuccuggcccaaucacgauccuaacaagggugucaccgccgcuuguccacaugcaggggccaaaucauuuuauaagaaucugaucuggcucgugaaaaagggaaacaguuaccccaaauuaagcaagucuuauauaaaugacaagggcaaagaaguacugguucuuuggggcauccaccacccuuccacgucagcugaucaacagagcuuguaccagaacgccgacgcguacguguucgucgggaccagucgcuauucuaagaaauuuaagccagagauugcaauccgacccaaagugcgugaucaggagggaagaaugaauuacuauuggacucugguggaaccuggugacaagauuacauucgaggccacuggcaaccuagucguuccaaggugcgcuuuugccauggaacggaacgcaggguccggaaucauaauuagcgauaccccggugcaugacuguaauacaaccugccaaacgcccaaaggcgcuaucaacacuucgcucccuuuccagaauauucacccaaucacaaucgguaagugucccaaguacguaaaaucuaccaagcugcgccuugccacugggcugagaaacgugccuuccauucagucaaggggauuguuuggcgcgauagccggcuucaucgaagggggauggacagguauggucgacggcugguauggguaccaucaccagaaugaacaaggaaguggcuaugcagcugaucucaaaagcacccagaacgccauugacgagaucacgaauaaggugaacuccguuauagagaaaaugaauacccaguuuacagcuguggguaaggaguucaaccaccuggaaaagcggauugaaaauuuaaacaaaaaggucgaugacggguuccuggauaucuggacuuacaaugccgagcuccuugugcuguuggaaaacgagcgcacccuagacuaccaugauucuaauguaaagaaccuguaugagaagguucgaagccagcucaaaaacaaugcaaaggaaaucggcaacggaugcuuugaguucuaccacaagugugacaauacaugcauggaaucagugaaaaacggcacuuaugauuacccaaaguauagugaggaagccaaacugaauagagaggagauugacggggucaaacuugaauccaccaggaucuaccaaauucuggcuauauauagcacaguggcgucuucauugguccucgugguuagucugggagcaaucagcuuuuggaugugcuccaacgguucuuuacagugucggauuugcaucuga

SEQ ID NO: 133361 - RNA, 1701 nt, Artificial Sequence
  derived and/or modified CDS sequence (opt3) from hemagglutinin__InfluenzaA__ADK87298
augaaggccauccuggugguccuccuuuacaccuucgcuacagcaaacgccgacacucugugcauuggcuaucacgcgaauaacagcacggauaccguugacacaguguuggagaaaaauguaacugugacccauuccgucaacuuacuggaagauaagcacaaugggaaacuauguaagcucagaggaguggcuccccugcaucuugguaaaugcaacauagccggcuggauccuggggaauccugagugugaaucuuugucaacagcaaguagcugguccuacauuguugagaccucuucgucagacagcggaacuugcuauccaggcgauuuuaucgacuacgaggagcucagggagcagcugaguuccgugucuagcuucgaacgguuugagauuuucccgaagacauccucauggcccaaccacgauccuaauaagggugucaccgccgcuuguccacaugcaggggccaaaaguuuuuauaagaaccugaucuggcucgugaaaaagggaaauagcuaccccaaauuaucuaaguccuauauaaacgacaagggcaaagaaguacugguucuuuggggcauccaccacccuucaacgagcgcugaucaacagaguuuguaccagaaugccgacgcguacguguucgucgggacuucucgcuauuccaagaaauuuaagccagagauugcaauccgacccaaagugcgugaucaggagggaagaaugaacuacuauuggacccugguggaaccuggugacaagauuacauucgaggccacuggcaaucuagucguuccaagguacgcuuuugccauggaacggaacgcagggagcggaaacaucauaucggauaccccggugcaugacugcaauacaaccugucaaacgcccaaaggcgcuauuaacacuucucucccuuuccagaauauccacccaauuacaaucgguaagugccccaaguauguaaaauccaccaagcugcgccuugccacugggcugagaaacgugccuucaauccagaguaggggauuguuuggcgcgauugccggcuucauagaagggggauggacagguauggucgacggcugguacggguaucaucaccagaaugaacaaggaagcggcuacgcagcugaucucaaauccacccagaacgccaucgacgagauuacgaauaaggugaacccaguuaucgagaaaaugaauacccaguuuacagcuguggguaaggaguucaaccaccuggaaaagcggauagaaaauuuaaacaaaaaggucgaugacggguuccuggauauuuggacuuacaaugccgagcuccuugugcuguuggaaaacgagcgcacccuagacuaucaugauucuaauguaaagaaccuguacgagaagguucgaagccagcucaaaaacaaugcaaaggaaaucggcaacggauguuuugaguucuaucacaagugcgacaauacauguauggaaucagugaaaaacggcacuuacgauuaucccaaguacagugaggaagccaaacugaauagagaggagaucgacggggucaaacuugaauccaccaggauuuaucaaauccuggcuauuuacagcacaguggcgucuucauugguccucgugguuagucugggagcaaucagcuuuuggaugugcuccaacgguucuuuacagugccggauauguauuuga

SEQ ID NO: 133362 - RNA, 1701 nt, Artificial Sequence
  derived and/or modified CDS sequence (opt3) from hemagglutinin__InfluenzaA__ADK87300
augaagaccaucauugcccugagcuacauacucugcaugguguucgcucagaaacuucccggcaacgacaauuccacagcaacucuguguuuggggcaccaugccgucccuaacggaacgaucguuaagaccauuacaaaugaucaaaucgaggugacuaacgcgaccgaauuaguacagucuucaaguacaggugagauuugcgacagcccacaccagauccuggauggcaaaaauuguacccuaauagacgcucuccugggggauccgcagugcgacggauuucaaaacaagaaaugggaucuuuucguggaaagauccaaggccuauucuaauuguuaccccuaugacgucccugauuacgcaucgcugaggucauugguggccagcaguggcacucucgaguuuaacaaugaauccuucaacuggacagguguuacccagaaugggacgucuagcgcuugcauccggcgcuccaagaacucacuguuuagucgacugaauuggcucacucauuuaaacuucaaauauccagcacugaaugugaccaugcccaacaacgagcaguuugacaaacuuuacauuuggggaguccaccauccuggcacagauaaagaccagaucuucuuguaugcccaagcuagcggccguauuacugugucuaccaagagaucccagcagacagccaucccaaauauagggucaaggccccggguacgcaacauuccuagcagaaucaguauuuacuggaccaucguuaaaccaggagauauccugcuaauuaauucuacggguaaccucauagcgccgaggggcuacuuuaagauccgguccggaaagagcucgauuaugcgcucugacgcacccaucgggaaauguaauuccgagugcauagccccuaacggcucaauuccaaaugacaagaguuuccagaacgugaaucgaaucacuuauggugcuugucccagauacgucaaacaaaacacacugaaacuugccaccgggaugaggaaugugccugaaaagcagacucggggaaucuuuggcgcaauugcuggcuucaucgagaacgggugggaaggaaugguggaugguugguauggcuuucgucaccagaauagcgaggggcgcggacaagccgcggaccugaaguccacacaggccgcaauugaucagauaaacggcaaauugaauagacucaucgguaagaccaacgagaaguuccaccagauugaaaaagaguucucugaagucgaggggaggauccaagaccuggaaaaguacguugaggauacgaaaaucgacuuauggagcuauaacgcugagcugcucguggcccuugaaaaucagcauaccauugaucugacagacucagagaugaacaaguuguuugaaaagacuaagaagcagcuacgggagaaugcugaagauaugggcaacggaugcuucaaaauauaccacaagugugacaaugccugcaucggcaguauucgaaacgggaccuaugaucaugacguauaccgcgacgaggcacugaauaacagauuucagaucaaaggaguggagcucaaguccgguuacaaagauuggauucuguggaucagcuucgccauaucuugcuuucuucugugugucgcuuugcucggcuucaucaugugggcgugccaaaaggggaauauuagguguaacaucugcauuuga

SEQ ID NO: 133363 - RNA, 1701 nt, Artificial Sequence
  derived and/or modified CDS sequence (opt3) from hemagglutinin__InfluenzaA__ADK87302
augaagaccaucauugcccugagcuacauacucugcaugguguucgcucagaaacuucccggcaacgacaauuccacagcaacucuguguuuggggcaccaugccgucccuaacggaacgaucguuaagaccauuacaaaugaucaaaucgaggugacuaacgcgaccgaauuaguacagucuucaaguacaggugagauuugcgacagcccacaccagauccuggauggcaaaaauuguacccuaauagacgcucuccugggggauccgcagugcgacggauuucaaaacaagaaaugggaucuuuucguggaaagauccaaggccuauucuaauuguuaccccuaugacgucccugauuacgcaucgcugaggucauugguggccagcaguggcacucucgaguuuaacaaugaauccuucaacuggacagguguuacccagaaugggacgucuagcgcuugcauccggcgcuccaagaacucauuuuucagucgacugaauuggcugacucaucucaacuuuaaauauccagcauuaaaugugaccaugcccaacaacgagcaguucgacaagcuguacauuuggggaguccaccauccuggcacagauaaagaccagaucuuucuuuaugcccaagcuagcggccguauuacugugucuaccaagagaucccagcagacagccaucccaaauauagggucaaggccccggguacgcaacauuccuagcagaaucaguauuuacuggaccaucguuaaaccaggagauaucuugcugauuaauucuacggguaaccuaauagcgccgaggggcuacuucaagauccgguccgggaaaagcucgauuaugcgcucugacgcacccaucggaaaauguaauuccgagugcauaacuccuaacggcucaauuccaaaugacaagcccuuucagaacgugaaucgaaucacauauggugccuguccuagauacgucaaacaaaacacccucaagcuggcuacugggaugaggaaugugccagaaaaacagacacggggaaucuucggcgccauugcaggcuuuaucgagaacgggugggaaggaaugguggaugguugguauggcuuccgucaccagaauagugaggggcgcggacaagcugccgaccuuaagagcacccaggcggccauugaucagauaaacggcaaacugaauagauugaucgguaagacgaacgagaaguuccaccagauugaaaaagaguuuuccgaagucgaggggaggauccaagaccucgaaaaguacguugaggauaccaaaaucgaccuguggucuuauaacgcagaguuacugguggcucucgaaaaucagcauacaauugaucuuacugacagcgagaugaacaagcuguucgaaaagaccaagaagcaguugcgggagaaugccgaagauaugggcaacggaugcuuuaaaauauaccacaagugugacaaugcuugcaucggcucaauucgaaacgggacauaugaucaugacguauaccgcgacgaggcccuaaauaacagauuccagaucaaaggaguggagcugaagagugguuacaaagauuggauucucuggaucuccuuugcaauaagcugcuuccugcuuugugucgcccuguugggcuuuaucaugugggcuugccaaaaggggaauauuaggugugacaucugcauuuga

SEQ ID NO: 133364 - RNA, 1701 nt, Artificial Sequence
  derived and/or modified CDS sequence (opt3) from hemagglutinin__InfluenzaA__ADK87304
augaagaccaucauugcccugagcuacauacucugccuuguguucgcucagaaaauccccggcaacgacaauuccacagcaacucuguguuuggggcaccaugccgucccuaacggaacgauuguuaagaccaucacaaaugaucaaauugaggugacuaacgcgaccgaauuaguacagucuucaaguacaggugagaucugcgacagcccacaccagauacuggauggcaaaaauuguacccuaaucgacgcucuccugggggauccgcagugcgacggauuucaaaacaagaaaugggaucuuuucguggaaagauccaaggccuauucuaauuguuaccccuaugacgucccugauuacgcaucgcugaggucauugguggccagcaguggcacucucgaguuuaacaaugaauccuucaacuggacagguguuacccagaaugggacgucuagcgcuugcauucggcgcuccaagaacucauuuuucagucgacugaauuggcugacucaucucaacuuuaaauauccagcauuaaaugugaccaugcccaacaacgagcaguucgacaagcuguacaucuggggaguccaccauccuggcacagauaaagaccagauuuuucuuuaugcccaagcuagcggccguaucacugugucuaccaagagaucccagcagacagccauaccaaauauugggucaaggccccggguacgcaacaucccuagcagaauuaguaucuacuggaccaucguuaaaccaggagauauuuugcugauaaauucuacggguaaccuaaucgcgccgaggggcuacuucaagauucgguccggaaagagcucgaucaugcgcucugacgcacccauagggaaauguaauuccggcugcauuacuccuaacgguucaaucccaaaugacaagcccuuucagaacgugaaucgaaucacauauggggccuguccuagauacgucaaacaaaacacccucaagcuggcuacuggaaugaggaaugugccagagaaacagacacggggcauuuucggcgccaucgcaggguuuauugaaaacggaugggaggguaugguggauggcugguauggguuccgucaccagaauagugaaggacgcggccaagcugccgaccuuaagagcacccaggcggccauagaucagaucaacgguaaacugaauagauugauugggaagacgaacgagaaguuccaccagaucgagaaagaauuuuccgaggucgaaggcaggauccaagaccucgagaaguacguugaagauaccaaaauugaccuguggucuuauaacgcagaguuacugguggcucucgagaaucagcauacaauagaucuuacugacagcgaaaugaacaagcuguucgagaaaaccaagaagcaguugcgggaaaaugccgaggauaugggaaacggcugcuuuaaaaucuaccacaagugugacaaugcuugcauugggucaauccgaaacggaacauauggucaugauguauaccgcgacgaagcccuaaauaacagauuccagauuaaaggcguggagcugaagaguggguacaaagacugguuucucuggaucuccuucgcaauaagcugcuuucugcuuugugucgcccuguugggauucaucaugugggcuugccaaaagggcaauauuagguguaacaucugcauuuga

SEQ ID NO: 133365 - RNA, 1701 nt, Artificial Sequence
  derived and/or modified CDS sequence (opt3) from hemagglutinin__InfluenzaA__ADK87306
augaagaccaucauugcccugagcuacauacucugccuuguguucgcucagaaacugcccggcaacgacaauuccacagcaacuuuguguuuagggcaccaugccgucccuaacggaacgaucguuaagaccauuacaaaugaucaaaucgaggugacuaacgcggcugaacugguacagucuucaaguaccggugagauuugcgacagcccacaccagauccuagauggcaaaaauuguacacucauagacgcccugcuuggggauccgcagugcgacggauuucaaaacaagaaaugggaucuguucgugggcagauccaaggcauauucuaauuguuaccccuaugacgucccugauuacgccucguugaggucacucguggcuagcagugguacccuggaauuuaacaaugaguccuucaacuggacugggguuacacagaauggaaccucuagcgcaugcauccggcgcuccaagaacucauuuuucagucgacugaauuggcucacgcauuuaaacuuuaaauauccagcccugaaugugacuaugcccaacaacgaacaguucgacaagcuguacauuuggggcguccaccauccuggcaccgauaaagaccagaucuuuuuguaugcucaagccagcgggcguauuacagugucuacuaagagaucccagcagaccgcgaucccaaauauaggaucaaggccccggguacgcaacauuccuagcagaaucaguauuuacuggacaaucguuaaaccaggugauauccugcuaauuaauucuaccggcaaccucauagcaccgaggggguacuucaagauccgguccggaaagagcucgauuaugcgcucugacgcccccaucggcaaauguaauuccgagugcauaacgccuaacgguucaauuccaaaugacaagcccuuucagaacgugaaucgaaucacuuauggggcuuguccuagauacgucaaacaaaacacacugaaacuugccaccggagugaggaaugugccagagaagcagacucggggcaucuucggcgcaauugcuggguuuaucgaaaacggaugggaggguauggucgauggcugguauggguuccgucaccagaauagugaaggacgcggccaagccgcggaccuuaagagcacacaggccgcaauggaucagauuaacgguaaauugaauagacucauagggaagaccaacgagaagcugcaccagacggagaaagaguucuccgaaguugaaggcaggauccaagacuuagagaaguacguggaagauaccaaaauugaccuguggucuuauaacgcugagcuccuuguagcccuggagagccagcauacaaucgauuugacugacucagaaaugaauaagcuauuugagaaaaccaagaagcagcugcgggaaaacgcugaggauaugggaaauggcugcuucaaaaucuaccacaagugugacaacgccugcauugggaguauacgaaauggaacauaugaucaugacguguaccgcgacgaagcacucaacaauagauuucagaucaaaggugucgagcugaaguccggcuacaaagauuggauucuuuggaucagcuucgccauuucuugcuuucuguuguguguggcucuccugggguucaucaugugggcgugccaaaagggaaacauaagguguaauaucugcauuuga

SEQ ID NO: 133366 - RNA, 1701 nt, Artificial Sequence
  derived and/or modified CDS sequence (opt3) from hemagglutinin__InfluenzaA__ADK87308
augaagaccaucauugcccugagcuacauacucugcaugguguucgcucagaaacuucccggcaacgacaauuccacagcaacucuguguuuggggcaccaugccgucccuaacggaacgaucguuaagaccauuacaaaugaucaaaucgaggugacuaacgcgaccgaauuaguacagucuucaaguacaggugagauuugcgacagcccacaccagauccuggauggcaaaaauuguacccuaauagacgcucuccugggggauccgcagugcgacggauuucaaaacaagaaaugggaucuuuucguggaaagauccaaggccuauucuaauuguuaccccuaugacgucccugauuacgcaucgcugaggucauugguggccagcaguggcacucucgaguuuaacaaugaauccuucaacuggacagguguuacccagaaugggacgucuagcgcuugcauccggcgcuccaagaacucauuuuucagucgacugaauuggcugacucaucucaacuuuaaauauccagcauuaaaugugaccaugcccaacaacgagcaguucgacaagcuguacauuuggggaguccaccauccuggcacagauaaagaccagaucuuucuuuaugcccaagcuagcggccguauuacugugucuaccaagagaucccagcagacagccaucccaaauauagggucaaggccccggguacgcaacauuccuagcagaaucaguauuuacuggaccaucguuaaaccaggagauaucuugcugauuaauucuacggguaaccuaauagcgccgaggggcuacuucaagauccgguccgggaaaagcucgauuaugcgcucugacgcacccaucggaaaauguaauuccgagugcauaacuccuaacggcucaauuccaaaugacaagcccuuucagaacgugaaucgaaucacauauggugccuguccuagauacgucaaacaaaacacccucaagcuggcuacugggaugaggaaugugccagaaaaacagacacggggaaucuucggcgccauugcaggcuuuaucgagaacgggugggaaggaaugguggaugguugguauggcuuccgucaccagaauagugaggggcgcggacaagcugccgaccuuaagagcacccaggcggccauugaucagauaaacggcaaacugaauagauugaucgguaagacgaacgagaaguuccaccagauugaaaaagaguuuuccgaagucgaggggaggauccaagaccucgaaaaguacguugaggauaccaaaaucgaccuguggucuuauaacgcagaguuacugguggcucucgaaaaucagcauacaauugaucuuacugacagcgagaugaacaagcuguucgaaaagaccaagaagcaguugcgggagaaugccgaagauaugggcaacggaugcuuuaaaauauaccacaagugugacaaugcuugcaucggcucaauucgaaacgggacauaugaucaugacguauaccgcgacgaggcccuaaauaacagauuccagaucaaaggaguggagcugaagagugguuacaaagauuggauucucuggaucuccuuugcaauaagcugcuuccugcuuagggucgcccuguugggcuuuaucaugugggcuugucaaaaggggaauauucggugcaacaucuguauuuga

SEQ ID NO: 133367 - RNA, 1701 nt, Artificial Sequence
  derived and/or modified CDS sequence (opt3) from hemagglutinin__InfluenzaA__ADK87309
augaagaccaucauugcccugagcuacauacucugccuuguguucgcucagaaacugcccggcaacgacaauuccacagcaacuuuguguuuagggcaccaugccgucccuaacggaacgaucguuaagaccauuacaaaugaucaaaucgaggugacuaacgcgaccgaacugguacagucuucaaguacaggugagauuugcgacagcccacaccagauccuagauggcaaaaauuguacccucauagacgcucugcuuggggauccgcagugcgacggauuucaaaacaagaaaugggaucuguucguggaaagauccaaggccuauucuaauuguuaccccuaugacgucccugauuacgcaucguugaggucacucguggccagcaguggcacucuggaguuuaacaaugaauccuucaacuggacagguguuacccagaaugggacgucuagcgcuugcauccggcgcuccaagaacucauuuuucagucgacugaauuggcucacucauuuaaacuuuaaauauccagcacugaaugugaccaugcccaacaacgagcaguucgacaagcuguacauuuggggaguccaccauccuggcacagauaaagaccagaucuuuuuguaugcccaagcuagcggccguauuacugugucuaccaagagaucccagcagacagccaucccaaauauagggucaaggccccggguacgcaacauuccuagcagaaucaguauuuacuggaccaucguuaaaccaggagauauccugcuaauuaauucuacggguaaccucauagcgccgaggggcuacuucaagauccgguccggaaagagcucgauuaugcgcucugacgcacccaucgggaaauguaauuccgagugcauaacuccuaacggcucaauuccaaaugacaagcccuuucagaacgugaaucgaaucacauauggugccuguccuagauacgucaaacaaaacacccugaaacuugcuacugggaugaggaaugugccagaaaaacagacacggggaaucuucggcgccauugcaggcuuuaucgagaacgggugggaaggaaugguggaugguugguauggcuuccgucaccagaauagugaggggcgcggacaagcugccgaccuuaagagcacccaggcggccauugaucagauaaacggcaaauugaauagacucaucgguaagacgaacgagaaguuccaccagauugaaaaagaguuuuccgaagucgaggggaggauccaagaccuggaaaaguacguugaggauaccaaaaucgacuuauggucuuauaacgcagagcugcucguggcucuugaaaaucagcauacaauugaucugacugacagcgagaugaacaaguuguucgaaaagaccaagaagcagcuacgggagaaugccgaagauaugggcaacggaugcuuuaaaauauaccacaagugugacaaugcuugcaucggcucaauucgaaacgggacauaugaucaugacguauaccgcgacgaggcccugaauaacagauuccagaucaaaggaguggagcucaagagugguuacaaagauuggauucuguggaucuccuuugcaauaagcugcuuccuucugugugucgccuugucuggcuuuaucaugugggcuugccaaaaggggaauauuagguguaacaucugcauuuga

SEQ ID NO: 133368 - RNA, 1701 nt, Artificial Sequence
  derived and/or modified CDS sequence (opt3) from hemagglutinin__InfluenzaA__ADK87310
augaaggccauccuggugguccuccuuuacaccuucgcuacagcaaacgccgacacucugugcauuggcuaucacgcgaauaacagcacggauaccguugacacaguguuggagaaaaauguaacugugacccauuccgucaacuuacuggaagauaagcacaaugggaaacuauguaagcucagaggaguggcuccccugcaucuugguaaaugcaacauagccggcuggauccuggggaauccugagugugaaucuuugucaacagcaaguagcugguccuacauuguugagaccucuucgucagacaacggaacuugcuauccaggcgauuuuaucgacuacgaagaacucagggagcagcugagcaguguguccucuuucgaacgguuugagauuuucccgaagacagguagcuggcccaaucacgauccuaacaagggggucaccgccgcuuguccacaugcaggagccaaauccuuuuauaagaaucugaucuggcucgugaaaaagggcaacucauaccccaaauuaaguaagagcuauauaaaugacaagggcaaagaaguacugguucuuugggggauccaccacccuucuacguccgcugaucaacagucauuguaccagaacgccgacgcguacguguucgucggaacuagccgcuauaguaagaaauuuaagccagagauugcaauccgacccaaagugcgugaucaggaggguagaaugaauuacuauuggacccugguggaaccuggcgacaagauuacauucgaggccacugggaaccuagucguuccaagguacgcuuuugccauggaacggaacgcaggaucuggcaucauaauuuccgauaccccggugcaugacugcaauacaaccugucaaacgcccaaaggugcuaucaacacuagccucccuuuccagaauauucacccaaucacaaucgggaagugccccaaguauguaaaaucgaccaagcugcgccuugccacuggacugagaaacgugccuucuauucaguccaggggcuuguuuggcgcgauagccggguucaucgagggagguuggacaggcauggucgacgggugguacggauaucaucaccagaaugaacaaggcucagguuacgcagcugaucucaaaaguacccagaacgccauugacgagaucacgaauaaggugaacagcguuauagagaaaaugaauacccaguuuacagcuguggggaaggaguucaaccaccuggagaagcggauugaaaauuuaaacaaaaaggucgaugacggcuuccuggauaucuggacuuacaaugccgagcuccuugugcuguuggaaaacgagcgcacccuagacuaucaugauuccaauguaaagaaccuguacgagaagguucgaucucagcucaaaaacaaugcaaaggaaaucggaaacggcuguuuugaguucuaucacaagugcgacaauacauguauggaaagcgugaaaaacgggacuuacgauuauccaaaguacucagaggaagccaaacugaauagagaggagauugacggagucaaacuugaaaguaccaggaucuaucaaauucuggcuauauacuccacaguggcgagcucuuugguccucgugguuucacugggugcaaucaguuuuuggaugugcagcaacggcuccuuacagugccggauuuguaucuga

SEQ ID NO: 133369 - RNA, 1701 nt, Artificial Sequence
  derived and/or modified CDS sequence (opt3) from hemagglutinin__InfluenzaA__ADK87311
augaaggccauccuggugguccuccuuuacaccuucgcuacagcaaacgccgacacucugugcauuggcuaucacgcggauaauagcacggacaccguugauacaguguuggagagaaacguaacugugacccauuccgucaauuuacuggaagacaaacacaacgggaagcuauguaaacucaggggaguggcuccccugcaucuugguaagugcaauauagccggcuggauccuggggaacccugagugugaaucuuugucaacagcaaguagcugguccuacauuguugagaccucuucgucagauaauggaacuugcuauccaggcgacuuuaucgauuacgaagaacuccgggagcagcugagcaguguguccucuuucgaacgcuuugagauuuucccgaaaacaagcuccuggcccaaccacgacucaaauaagggugucaccgccgcuuguccucaugcaggggccaagaguuuuuauaaaaaccugaucuggcucgugaagaaaggaaauagcuacccaaaguuaucuaaauccuauauaaacgauaagggcaaggaaguacugguucuuuggggcauccaccaccccucaacgagcgcugggcaacagaguuuguaccagaaugccgacgcguacguguucgucggaacuucucgauauuccaaaaaguuuaaaccugagauugcaauccguccaaaggugagagaucaggaggguaggaugaacuacuauuggacccugguggaacccggcgacaaaauuacauucgaggccacugggaaucuagucguuccucgguacgcuuuugccauggaacgcaacgcaggaagcggcaucauaauuucggauaccccagugcaugacugcaacacaaccugucaaacgccgaagggugcuaucaauacuucucccccuuuccagaacauucacccaaucacaaucgggaaaugccccaaguauguaaaguccaccaaacucagacuggccacuggacuuaggaaugugccuucaauucagagucggggccuguuuggcgcgauagccggguucaucgagggagguuggacaggcauggucgacgggugguacggauaucaucaccagaacgaacaaggcagcgguuacgcagcugauuugaaguccacccagaaugccauugacgagaucacgaacaaaguuaauucugugauagagaagaugaacacccaguuuacagcuguggggaaagaguucaaucaccucgagaagcgcauugaaaaccugaauaagaaagucgaugacggcuucuuagauaucuggacuuacaacgccgagcugcucgugcuucuggaaaaugagcgaaccuuggacuaucaugauagcaacguaaagaaucuauacgagaaaguuagaucacagcugaagaacaacgcaaaagaaaucggaaauggcuguuuugaguucuaucacaagugcgacaacacauguauggaaagugugaagaaugggacuuacgauuauccaaaauacuccgaggaagccaagcucaacagggaggagauugacggagucaaacuggaaagcacccggaucuaucaaauucuugcuauauacucuacaguggcgucaagucuggucuuggugguuagccucggugcaaucuccuuuuggaugugcucuaauggcucgcugcagugccguauuuguaucuga

SEQ ID NO: 133370 - RNA, 1701 nt, Artificial Sequence
  derived and/or modified CDS sequence (opt3) from hemagglutinin__InfluenzaA__ADK87313
augaagaccaucauugcccugagcuacauacucugccuuguguucgcucagaaaauccccggcaacgacaauuccacagcaacucuguguuuggggcaccaugccgucccuaacggaacgauuguuaagaccaucacaaaugaucaaauugaggugacuaacgcgaccgaauuaguacagucuucaaguacaggugagaucugcgacagcccacaccagauacuggauggcaaaaauuguacccuaaucgacgcucuccugggggauccgcagugcgacggauuucaaaacaagaaaugggaucuuuucguggaaagauccaaggccuauucuaauuguuaccccuaugacgucccugauuacgcaucgcugaggucauugguggccagcaguggcacucucgaguuuaacaaugaauccuucaacuggacagguguuacccagaaugggacgucuagcgcuugcauucggcgcuccaagaacucauuuuucagucgacugaauuggcugacucaucucaacuuuaaauauccagcauuaaaugugaccaugcccaacaacgagcaguucgacaagcuguacaucuggggaguccaccauccuggcacagauaaagaccagauuuuucuuuaugcccaagcuagcggccguaucgccgugucuacuaagagaucccagcagaccgcgauaccaaauauugggucaaggccccggguacgcaacaucccuagcagaauuaguaucuacuggacaaucguuaaaccaggagauauuuugcugauaaauucuaccgguaaccuaaucgcaccgaggggcuacuucaagauucgguccggaaagagcucgaucaugcgcucugacgcccccauagggaaauguaauuccggcugcauuacgccuaacgguucaaucccaaaugacaagcccuuucagaacgugaaucgaaucacuuauggggcuuguccuagauacgucaaacaaaacacacucaagcuggccaccggaaugaggaaugugccagagaaacagacucggggcauuuucggcgcaaucgcuggguuuauugaaaacggaugggaggguaugguggauggcugguauggguuccgucaccagaauagugaaggacgcggccaagccgcggaccuuaagagcacacaggccgcaauagaucagaucaacgguaaacugaauagauugauugggaagaccaacgagaaguuccaccagaucgagaaagaauuuuccgaggucgaaggcaggauccaagaccucgagaaguacguugaagauacgaaaauugaccuguggucuuauaacgcugaguuacugguggcccucgagaaucagcauaccauagaucuuacagacagcgaaaugaacaagcuguucgagaaaacuaagaagcaguugcgggaaaaugcugaggauaugggaaacggcugcuuuaaaaucuaccacaagugugacaaugccugcauugggucaauccgaaacggaaccuaugaucaugacguauaccgcgacgaagcacuaaauaacagauuccagauuaaagguguggagcugaagaguggcuacaaagauugguuucucuggaucuccuucgccauaagcugcuuucugcuuugugucgcucuguugggguucaucaugugggcgugccaaaagggaaauauuagguguaacaucugcauuuga

SEQ ID NO: 133371 - RNA, 1701 nt, Artificial Sequence
  derived and/or modified CDS sequence (opt3) from hemagglutinin__InfluenzaA__ADK87315
augaaggccauccuggugguccuccuuuacaccuucgcuacagcaaacgccgacacucugugcauuggcuaucacgcgaauaacagcacggauaccguugacacaguguuggagaaaaauguaacugugacccauuccgucaacuuacuggaagauaagcacaaugggaaacuauguaagcucagaggaguggcuccccugcaucuugguaaaugcaacauagccggcuggauccuggggaauccugagugugaaucuuugucaacagcaaguagcugguccuacauuguugagaccucuucgucagacaacggaacuugcuauccaggcgauuuuaucgacuacgaggagcucagggagcagcugagcaguguguccucuuucgaacgguuugagauuuucccgaagacaagccccuggccuaaucacgauccaaacaagggugucaccgccgcuuguccccaugcaggggccaaauccuuuuauaagaaucugaucuggcucgugaaaaagggaaacucauacccuaaauuaaguaagagcuauauaaaugacaagggcaaagaaguacugguucuuuggggcauccaccacccaucuacguccgcugaucaacagucauuguaccagaacgccgacgcguacguguucgucgggacuagccgcuauaguaagaaauuuaagcccgagauugcaauccgaccuaaagugcgugaucaggagggaagaaugaauuacuauuggacccugguggaaccaggugacaagauuacauucgaggccacuggcaaccuagucguuccgagguacgcuuuugccauggaacggaacgcagggucuggaaucauaauuuccgauacccccgugcaugacugcaauacaaccugucaaacgccuaaaggcgcuaucaacacuagccucccauuccagaauauucaccccaucacaaucgguaagugcccuaaguauguaaaaucgaccaagcugcgccuugccacugggcugagaaacgugccaucuauucaguccaggggauuguuuggcgcgauagccggcuucaucgaagggggauggacagguauggucgacggcugguacggguaucaucaccagaaugaacaaggaucaggcuacgcagcugaucucaaaaguacccagaacgccauugacgagaucacgaauaaggugaacagcguuauagagaaaaugaauacccaguuuacagcuguggguaaggaauccaaccaccuggagacucggauugaaaauuuaaacaagaaagucgaugacggguuccuggauaucuggaccuacaaugccgagcuccuugugcuguuggaaaacgagcgcacacuagacuaucaugauucuaauguaaagaaccuguacgagaaaguucgaagccagcucaagaacaaugcaaaagaaaucggcaacggauguuucgaguuuuaucacaagugcgacucaacuuguauggaaagugugaagaauggcaccuacgauuaucccaaauacuccgaggaagccaagcugaacagagaggagauugacggggucaaacuugaaagcacaaggaucuaucaaauucuggcuauauacucuaccguggcgucaaguuugguccucgugguuagccugggagcaaucuccuucuggaugugcucuaaugguucguuacagugccggauuuguaucuga

SEQ ID NO: 133372 - RNA, 1701 nt, Artificial Sequence; identical to SEQ ID NO: 131515
  derived and/or modified CDS sequence (opt3) from hemagglutinin__InfluenzaA__ADK87317

SEQ ID NO: 133373 - RNA, 1701 nt, Artificial Sequence
  derived and/or modified CDS sequence (opt3) from hemagglutinin__InfluenzaA__ADK87319
augaaggccauccuggugguccuccuuuacaccuucgcuacagcaaacgccgacacucugugcauuggcuaucacgcgaauaacagcacggauaccguugacacaguguuggagaaaaauguaacugugacccauuccgucaacuuacuggaagauaagcacaaugggaaacuauguaagcucagaggaguggcuccccugcaucuugguaaaugcaacauagccggcuggauccuggggaauccugagugugaaucuuugucaacagcaaguagcugguccuacauuguugagaccucuucgucagacaacggaacuugcuauccaggcgauuuuaucgacuacgaagaacucagggagcagcugagcaguguguccucuuucgaacgguuugagauuuucccgaagacaagcuccuggcccaaucacgauccuaacaagggugucaccgccgcuuguccacaugcaggggccaaaucauuuuauaagaaucugaucuggcucgugaaaaagggaaacaguuaccccaaauuaagcaagucuuauauaaaugacaagggcaaagaaguacugguucuuuggggcauccaccacccuuccacgucagcugaucaacagagcuuguaccagaacgccgacgcguacguguucgucgggaccagucgcuauucuaagaaauuuaagccagagauugcaauccgacccaaagugcgugaucaggagggaagaaugaauuacuauuggacucugguggaaccuggugacaagauuacauucgaggccacuggcaaccuagucguuccaagguacgcuuuugccauggaacggaacgcaggguccggaaucauaauuagcgauaccccggugcaugacugcaauacaaccugucaaacgcccaaaggcgcuaucaacacuucgcucccuuuccagaauauucacccaaucacaaucgguaagugccccaaguauguaaaaucuaccgagcugcgccuugccacugggcugagaaacgugccuuccauucagucaaggggauuguuuggcgcgauagccggcuucaucgaagggggauggacagguauggucgacggcugguacggguaucaucaccagaaugagcaaggaaguggcuacgcagcugaucucaagagcacccagaacgccauugacgagaucacgaauaaagugaacuccguuauagaaaagaugaauacccaguuuacagcuguggguaaagaguucaaccaccuggaaaagcggauugagaauuuaaacaagaaagucgaugacggguuccuggauaucuggacuuacaaugccgaacuccuugugcuguuggagaacgagcgcacccuagacuaucaugauucuaauguaaagaaccuguacgaaaaaguucgaagccagcucaagaacaaugcaaaagagaucggcaacggauguuuugaguucuaucacaagugcgacaauacauguauggagucagugaagaacggcacuuacgauuauccaaaauacagugaagaggccaagcugaauagagaggaaauugacggggucaaacuugaguccaccaggaucuaucggauucuggcuauauacagcacaguggcgucuucauugguccucgugguuagucugggagcaaucagcuuuuggaugugcuccaacgguucuuuacaaugccguauuuguaucuga

SEQ ID NO: 133374 - RNA, 1701 nt, Artificial Sequence
  derived and/or modified CDS sequence (opt3) from hemagglutinin__InfluenzaA__ADK87321
augaagaccaucauugcccugagcuacauacucugccuuguguucgcucagaaaauccccggcaacgacaauuccacagcaacucuguguuuggggcaccaugccgucccuaacggaacgauuguuaagaccaucacaaaugaucaaauugaggugacuaacgcgaccgaauuaguacagucuucaaguacaggugagaucugcgacagcccacaccagauacuggauggcaaaaauuguacccuaaucgacgcucuccugggggauccgcagugcgacggauuucaaaacaagaaaugggaucuuuucguggaaagauccaaggccuauucuaauuguuaccccuaugacgucccugauuacgcaucgcugaggucauugguggccagcaguggcacucucgaguuuaacaaugaauccuucaacuggacagguguuacccagaaugggacgucuagcgcuugcaugcggcgcuccaagaacucauuuuucagucgacugaauuggcugacucaucucaacuuuaaauauccagcauuaaaugugaccaugcccaacaacgagcaguucgacaagcuguacauuuggggaguccaccauccuggcacagauaaagaccagaucuuucuuuaugcccaagcuagcggccguauuacugugucuaccaagagaucccagcagacagccaucccaaauauagggucaaggccccggguacgcaacauuccuagcagaaucaguguuuacuggaccauugugaaaccaggagauaucuugcugaucaauucuacggguaaccuaauugcgccgaggggcuacuucaagauacgguccggaaagagcucgaucaugcgcucugacgcauccauugggaaauguaauucaggcugcaucacucccaacgguaguauaccuaaugacaagccauuucagaacgucaaucgaauuacauauggggccugucccagauacgugaaacaaaacacccucaagcuggcuacuggaaugaggaaugugccugagaaacagacacggggcaucuucggcgccaucgcaggguuuauugaaaacggaugggaggguauggucgauggcugguauggguuccgucaccagaauagcgaaggacgcggccaagcugccgaccuuaaguccacccaggcggccaucgaucagauuaacgguaaacugaauagauugauagggaagacgaacgagaaguuccaccagaucgagaaagaauuuccagagguugaaggcaggauucaagaccucgagaaguacguggaagauaccaaaaucgaccuguggucuuauaacgcagagcccuuaguagcucuggagaaucagcauacaaucgaucucacugacagcgaaaugaacaaacuuuucgagaagaccaagaagcagcugcgggaaaaugccgaggauaugggaaacggcugcuuuaaaauuuaccacaagugugacaaugcuugcauagggucaauccgaaacggaacauaugaucaugacguguaccgcgacgaagccuugaauaacagauuccagauuaaaggugucgagcuaaagaguggcuacaaagauugguuucuguggaucuccuucgcaauuagcugcuuucuccuguguguggcccuucugggguucaucaugugggcuugccaaaagggaaauauaagguguaacaucugcauuuga

SEQ ID NO: 133375 - RNA, 1701 nt, Artificial Sequence
  derived and/or modified CDS sequence (opt3) from hemagglutinin__InfluenzaA__ADK87323
augaagaccaucauugcccugagcuacauacucugccuuguguucgcucagaaacugcccggcaacgacaauuccacagcaacuuuguguuuagggcaccaugccgucccuaacggaacgaucguuaagaccauuacaaaugaucaaaucgaggugacuaacgcgaccgaacugguacagucuucaaguacaggugagauuugcgacagcccacaccagauccuagauggcaaaaauuguacccucauagacgcucugcuuggggauccgcagugcgacggauuucaaaacaagaaaugggaucuguucguggaaagauccaaggccuauucuaauuguuaccccuaugacgucccugauuacgcaucguugaggucacucguggccagcaguggcacucuggaguuuaacaaugaauccuucaacuggacagguguuacccagaaugggacgucuagcgcuugcauccggcgcuccaagaacucauuuuucagucgacugaauuggcucacucauuuaaacuuuaaauauccagcacugaaugugaccaugcccaacaacgagcaguucgacaagcuguacauuuggggaguccaccauccuggcacagauaaagaccagaucuuuuuguaugcccaagcuagcggccguauuacugugucuaccaagagaucccagcagacagccaucccaaauauagggucaaggccccggguaggaaacauuccuagccgcaucaguauuuacuggaccaucguuaaaccaggugauauccugcuaauuaauucuacgggcaaccucauagcgccgagaggguacuucaagaucagguccggaaagagcucgauuaugcggucugacgcacccaucggcaaauguaauuccgagugcauaacuccuaacgguucaauuccaaaugacaagcccuuucagaacgugaaucgcaucacauauggggccuguccucgauacgucaaacaaaacacccugaaacuugcuacuggaaugagaaaugugccagaaaaacagacaaggggcaucuucggcgccauugcaggguuuaucgagaacggaugggaagguaugguggauggcugguauggguuccggcaccagaauagugagggacguggccaagcugccgaccuuaagagcacccaggcggccauugaucagauaaacgguaaauugaaucgccucaucgggaagacgaacgagaaguuccaccagauugaaaaagaguuuuccgaagucgagggcagaauccaagaccuggaaaaguacguugaggauaccaaaaucgacuuauggucuuauaacgcagagcugcucguggcucuugaaaaucagcauacaauugaucugacugacagcgagaugaacaaguuguucgaaaagaccaagaagcagcuaagggagaaugccgaagauaugggaaacggcugcuuuaaaauauaccacaagugugacaaugcuugcaucgggucaauucggaacggaacauaugaucaugacguauaccgagacgaggcccugaauaaccgcuuccagaucaaagguguggagcucaagaguggcuacaaagauuggauucuguggaucuccuuugcaauaagcugcuuccuucugugugucgccuugcucggguuuaucaugugggcuugccaaaagggaaauauuagauguaacaucugcauuuga

SEQ ID NO: 133376 - RNA, 1701 nt, Artificial Sequence
  derived and/or modified CDS sequence (opt3) from hemagglutinin__InfluenzaA__ADK87325
augaagaccaucauugcccugagcuacauacucugccuuguguucgcucagaaacugcccggcaacgacaauuccacagcaacuuuguguuuagggcaccaugccgucccuaacggaacgaucguuaagaccauuacaaaugaucaaaucgaggugacuaacgcgaccgaacugguacagucuucaaguacaggugagauuugcgacagcccacaccagauccuagauggcaaaaauuguacccucauagacgcucugcuuggggauccgcagugcgacggauuucaaaacaagaaaugggaucuguucguggaaagauccaaggccuauucuaauuguuaccccuaugacgucccugauuacgcaucguugaggucacucguggccagcaguggcacucuggaguuuaacaaugaauccuucaacuggacagguguuacccagaaugggacgucuagcgcuugcauccggcgcuccaagaacucauuuuucagucgacugaauuggcucacucauuuaaacuuuaaauauccagcacugaaugugaccaugcccaacaacgagcaguucgacaagcuguacauuuggggaguccaccauccuggcacagauaaagaccagaucuuuuuguaugcccaagcuagcggccguauuacugugucuaccaagagaucccagcagacagccaucccaaauauagggucaaggccccggguacgcaacauuccuagcagaaucaguauuuacuggaccaucguuaaaccaggagauauccugcuaauuaauucuacggguaaccucauagcgccgaggggcuacuucaagauccgguccggaaagagcucgauuaugcgcucugacgcacccaucgggaaauguaauuccgagugcauaacuccuaacggcucaauuccaaaugacaagcccuuucagaacgugaaucgaaucacauauggugccuguccuagacacgucaaacaaaacacccugaaacuugcuacugggaugaggaaugugccagaaaaacagacacggggaaucuucggcgccauugcaggcuuuaucgagaacgggugggaaggaaugguggaugguugguacggcuuccgucaccagaauagugaggggcgcggacaagcugccgaccuuaagagcacccaggcggccauugaucagauaaacggcaaauugaauagacucaucgguaagacgaacgagaaguuccaucagauugaaaaagaguuuuccgaagucgaggggaggauccaagaccuggaaaaguauguugaggauaccaaaaucgacuuauggucuuacaacgcagagcugcucguggcucuugaaaaucagcacacaauugaucugacugacagcgagaugaacaaguuguucgaaaagaccaagaagcagcuacgggagaaugccgaagauaugggcaacggaugcuuuaaaauauaucauaagugugacaaugcuugcaucggcucaauucgaaacgggacauacgaucacgacguauaucgcgacgaggcccugaauaacagauuccagaucaaaggaguggagcucaagagugguuacaaagauuggauucuguggaucuccuuugcaauaagcugcuuccuucugugugucgccuugcucggcuuuaucaugugggcuugccaaaaggggaauauuagguguaacaucugcauuuga

SEQ ID NO: 133377 - RNA, 1701 nt, Artificial Sequence
  derived and/or modified CDS sequence (opt3) from hemagglutinin__InfluenzaA__ADK87326
augaagaccaucauugcccugagcuacauacucugccuuguguucgcucagaaacugcccggcaacgacaauuccacagcaacuuuguguuuagggcaccaugccgucccuaacggaacgaucguuaagaccauuacaaaugaucaaaucgaggugacuaacgcgaccgaacugguacagucuucaaguacaggugagauuugcgacagcccacaccagauccuagauggcaaaaauuguacccucauagacgcucugcuuggggauccgcagugcgacggauuucaaaacaagaaaugggaucuguucguggaaagauccaaggccuauucuaauuguuaccccuaugacgucccugauuacgcaucguugaggucacucguggccagcaguggcacucuggaguuuaacaaugaauccuucaacuggacagguguuacccagaaugggacgucuagcgcuugcauccggcgcuccaagaacucauuuuucagucgacugaauuggcucacucauuuaaacuuuaaauauccagcacugaaugugaccaugcccaacaacgagcaguucgacaagcuguacauuuggggaguccaccauccuggcacagauaaagaccagaucuuuuuguaugcccaagcuagcggccguauuacugugucuaccaagagaucccagcagacagccaucccaaauauagggucaaggccccggguacgcaacauuccuagcagaaucaguauuuacuggaccaucguuaaaccaggagauauccugcuaauuaauucuacggguaaccucauagcgccgaggggcuacuucaagauccgguccggaaagagcucgauuaugcgcucugacgcacccaucgggaaauguaauuccgagugcauaacuccuaacggcucaauuccaaaugacaagcccuuucagaacgugaaucgaaucacauauggugccuguccuagauacgucaaacaaaacacccugaaacuugcuacugggaugaggaaugugccagaaaaacagacacggggaaucuucggcgccauugcaggcuuuaucgagaacgggugggaaggaaugguggaugguugguauggcuuccgucaccagaauagugaggggcgcggacaagcugccgaccuuaagagcacccaggcggccauugaucagauaaacggcaaauugaauagacucaucgguaagacgaacgagaaguuccaccagauugaaaaagaguuuuccgaagucgaggggaggauccaagaccuggaaaaguacguugaggauaccaaaaucgacuuauggucuuauaacgcagagcugcucguggcucuugaaaaucagcauacaauugaucugacugacagcgagaugaacaaguuguucgaaaagaccaagaagcagcuacgggagaaugccgaagauaugggcaacggaugcuuuaaaauauaccacaagugugacaaugcuugcaucggcucaauucgaaacgggacauaugaucaugacguauaccgcgacgaggcccugaauaacagauuccagaucaaaggaguggagcucaagagugguugcaaagauuggauucuguggaucuccuuugcaauaagcuguuuccuucugugcgucgccuugcucggcuuuacuaugugggcuugucaaaaggggaauaucaggugcaacauuuguaucuga

SEQ ID NO: 133378 - RNA, 1701 nt, Artificial Sequence
  derived and/or modified CDS sequence (opt3) from hemagglutinin__InfluenzaA__ADK87328
augaaggccauccuggugguccuccuuuacaccuucgcuacagcaaacgccgacacucugugcauuggcuaucacgcgaauaacagcacggauaccguugacacaguguuggagaaaaauguaacugugacccauuccgucaacuuacuggaagauaagcacaaugggaaacuauguaagcucagaggaguggcuccccugcaucuugguaaaugcaacauagccggcuggauccuggggaauccugagugugaaucuuugucaacagcaaguagcugguccuacauuguugagaccucuucgucagacaacggaacuugcuauccaggcgauuuuaucgacuacgaagaacucagggagcagcugagcaguguguccucuuucgaacgguuugagauuuucccgaagacaagcuccuggcccaaucacgauccuaacaagggugucaccgccgcuuguccacaugcaggggccaaaucauuuuauaagaaucugaucuggcucgugaaaaagggaaacaguuaccccaaauuaagcaagucuuauauaaaugacaagggcaaagaaguacugguucuuuggggcauccaccacccuuccacgucagcugaucaacagagcuuguaccagaacgccgacgcguacguguucgucgggaccagucgcuauucuaagaaauuuaagccagagauugcaauccgacccaaagugcgugaucaggagggaagaaugaauuacuauuggacucugguggaaccuggugacaagauuacauucgaggccacuggcaaccuagucguuccaagguacgcuuuugccauggaacggaacgcaggguccggaaucauaauuagcgauaccccggugcaugacugcaauacaaccugucaaacgcccaaaucggcuaucaacacuucucucccuuuccagaauauucacccaaucacaaucggcaagugccccaaguauguaaaauccaccaagcugcgccuugccacuggucugagaaacgugccuucaauucagaguaggggguuguuuggagcgauagccggcuucaucgagggcggguggacaggaauggucgacgguugguacggcuaucaucaccagaaugaacaagggagcggauacgcagcugaucucaaauccacccagaacgccauugacgagaucacgaauaaggugaacucuguuauagagaaaaugaauacccaguuuacagcugugggcaaggaguucaaccaccuggagaagcggauugaaaauuuaaacaaaaaggucgaugacgguuuccuggauaucuggacuuacaaugccgagcuccuugugcuguuggaaaacgagcgcacccuagacuaucaugauagcaauguaaagaaccuguacgagaagguucgaucacagcucaaaaacaaugcaaaggaaaucgggaacggcuguuuugaguucuaucacaagugcgacaauacauguauggaaagugugaaaaacggaacuuacgauuauccaaaguacuccgaggaagccaaacugaauagagaggagauugacggcgucaaacuugaaagcaccaggaucuaucaaauucuggcuauauacucuacaguggcgucaaguuugguccucgugguuagccugggggcaaucuccuuuuggaugugcucuaacggaucguuacagugccggauuuguaucuga

SEQ ID NO: 133379 - RNA, 1701 nt, Artificial Sequence
  derived and/or modified CDS sequence (opt3) from hemagglutinin__InfluenzaA__ADK87334
augaagaccaucauugcccugagcuacauacucugccuuguguucgcucagaaacugcccggcaacgacaauuccacagcaacuuuguguuuagggcaccaugccgucccuaacggaacgaucguuaagaccauuacaucugaucaaaucgaggugacuaaugcgaccgaacugguacagucaaguagcacaggugagauuugcgacuccccacaccagauccuagauggcaaaaacuguacccucauagacgcucugcuuggggauccgcagugcgacggauuucaaaauaagaaaugggaucuguucguggaaagaucuaaggccuauucgaacuguuaccccuaugacgucccugauuacgcaucauugaggagccucguggccaguuccggcacucuggaguuuaauaacgaaucuuucaauuggacagguguuacccagaacgggacgagcuccgcuugcauccggcgcucaaagaauagcuuuuucaguaaacugaacuggcucacucauuuaaauuuuaaguauccagcacugaacgugaccaugcccaauaacgagcaguucgacaaacuuuacauuuggggaguccgacacccuggcacagauaaggaccagaucuuuuuguaugcccaggcuucuggccguauuacuguguccaccaaaagaucacaacagacaguaaucccaaacauagggagcaggccccggguucgcaauauuccuaguagaaucucuaccuacuggacgauugugaagccaggagauauccugcuaaucaacuccacugguaaucucauugccccgaggggcuacuucaagauacggagcgggaaaucgucuaucaugcgcuccgacacacccauuggaaaguguaacucagagugcaucaccccuaauggcaguauaccaaacgacaaacccuuucagaaugucaaccgaauuacuuauggugcguguccuagauacgugaagcaaaauacacugaaacuugcaaccgggaugaggaacgugccagaaaagcagacgcggggaaucuucggcgccaucgcuggcuuuauugagaaugggugggaaggaauggucgaugguugguauggcuuccgucaucagaacagcgaggggcgcggacaagccgcagaccugaaauccacccaggcugccaucgaucagauuaauggcaaguugaacagacucauagguaagacaaaugagaaauuccaccagaucgaaaaggaguuuucugaaguugaggggaggauucaagaccuggaaaaauacguggaggauacuaagaucgacuuauggagcuauaacgcggagcugcucguagcccuugaaaaccagcacaccaucgaucugacagacucagagaugaauaaauuguucgaaaagacuaagaaacagcuacgggagaacgcagaagauaugggcaauggaugcuuuaagauuuaccauaaaugugacaacgcuugcauaggcaguauccgaaaugggaccuaugaucacgacguguaccgcgacgaggcccugaacaauagauuccagauuaagggagucgagcucaaauccgguuacaaggauuggauccuguggauuagcuuugcuaucucuugcuuccuucuguguguggccuugcucggcuuuauaaugugggcaugccaaaaggggaacaucagguguaauauuugcaucuga

SEQ ID NO: 133380 - RNA, 1701 nt, Artificial Sequence
  derived and/or modified CDS sequence (opt3) from hemagglutinin__InfluenzaA__ADK87336
augaagaccaucauugcccugagcuacauacucugccuuguguucgcucagaaacugcccggcaacgacaauuccacagcaacuuuguguuuagggcaccaugccgucccuaacggaacgaucguuaagaccauuacaaaugaucaaaucgaggugacuaacgcgaccgaacugguacagucuucaaguacaggugagauuugcgacagcccacaccagauccuagauggcaaaaauuguacccucauagacgcucugcuuggggauccgcagugcgacggauuucaaaacaagaaaugggaucuguucguggaaagauccaaggccuauucuaauuguuaccccuaugacgucccugauuacgcaucguugaggucacucguggccagcaguggcacucuggaguuuaacaaugaauccuucaacuggacagguguuacccagaaugggacgucuagcgcuugcauccggcgcuccaagaacucauuuuucaguaaacugaauuggcucacucauuuaaacuuuaaguauccagcacugaaugugaccaugcccaacaacgagcaguucgacaaacuuuacauuuggggaguccaccauccuggcacagaucgagaccagaucuuuuuguaugcccaagcuagcggccguauuacugugucuaccaagagaucccagcagacaguaaucccaaauauagggucaaggccccggguucgcaacauuccuagcagaaucaguauuuacuggaccaucgugaaaccaggagauauccugcuaauuaauucuacggguaaccucauagccccgaggggcuacuucaagauccgguccggaaagagcucgauuaugcgcucugacacucccaucgggaaauccaauucagaguguauaacaccuaacggcaguauuccaaaugacaagcccuuucagaacgucaaucgaaucaccuauggugcgugcccuagauacgugaaacaaaacacucugaaacuugcaacagggaugaggaaugugccagaaaaacagacccggggaaucuucggcgccauugcuggcuuuaucgagaacgggugggaaggaauggucgaugguugguauggcuuccgucaccagaauagcgaggggcgcggacaagccgcagaccugaaguccacgcaggcugccauugaucagauaaacggcaaauugaauagacucaucgguaagaccaacgagaaguuccaccagauugaaaaagaguuuucugaaguugaggggaggauccaagaccuggaaaaguacguggaggauacaaaaaucgacuuauggagcuauaacgcggagcugcucguagcccuugaaaaucagcauacuauugaucugaccgacucagagaugaacaaguuguucgaaaagacaaagaagcagcuacgggaggaugcagaagacaugggcaauggauguuuuaaaauauaccacaagugcgauaacgcuuguaucggcaguauucgaaaugggacuuaugaccaugacguguaccgcgaugaggcccugaacaauagauuccagaucaaaggagucgagcucaaguccgguuacaaagacuggauucuguggaucagcuuugcuauaucuugcuuccuucugugcguggccuugcucggcuuuaucaugugggcaugucaaaaggggaacauuaggugcaauaucuguauuuga

SEQ ID NO: 133381 - RNA, 1701 nt, Artificial Sequence; identical to SEQ ID NO: 130717
  derived and/or modified CDS sequence (opt3) from hemagglutinin__InfluenzaA__ADK87338

SEQ ID NO: 133382 - RNA, 1701 nt, Artificial Sequence
  derived and/or modified CDS sequence (opt3) from hemagglutinin__InfluenzaA__ADK90193
augaaggccauccuggugguccuccuuuacaccuucgcuacagcaaacgccgacacucugugcauuggcuaucacgcgaauaacagcacggauaccguugacacaguguuggagaagaauguaacugugacccauuccgucaacuuacuggaagauaagcacaaugggaaacuauguaagcucagaggaguggcuccccugcaucuugguaaaugcaacauagccggcuggauccuggggaauccugagugugaaucuuugucaacagcaaguagcugguccuacauuguugagaccucuucgucagacaacggaacuugcuauccaggcgauuuuaucgacuacgaagaacucagggagcagcugagcaguguguccucuuucgaacgguuugagauuuucccgaagacaagcuccuggcccaaucacgauucaaacaagggugucaccgccgcuuguccucaugcaggggccaaaaguuuuuauaagaaucugaucuggcucgugaaaaagggaaacagcuacccaaaauuaucuaaguccuauauaaaugacaagggcaaaguaguucuggugcuuuggggcauccaccaccccucaacgagcgcugaucaacagaguuuguaccagaacgccgacgcguacgucuucguggggacuucucgcuauuccaagaaauuuaagccugaaauugcaauccgaccaaaagugcgugaucaggagggaagaaugaauuacuauuggacccuggucgagcccggugacaagauuacauucgaagccacuggcaaccuaguugugccuagguacgcuuuugccauggagcggaacgcagggagcggaaucauaauuucggauaccccaguacaugacugcaauacaaccugucaaacgccgaaaggcgcuaucaacacuucucuccccuuccagaauauucacccuaucacaaucgguaagugcccaaaguaugugaaauccaccaagcugcgccuugccacugggcugagaaacguccccucaauucagaguaggggauuguuuggcgcgauagccggcuucaucgaagggggauggacagguaugguggacggcugguacggguaucaucaccagaaugagcaaggaagcggcuacgcagcugaucucaaauccacccagaacgccauugacgaaaucacgaauaagguuaacucugugauagagaaaaugaauacccaguuuacagcugucgguaaggaguucaaccaccuggaaaagcggauugagaauuuaaacaaaaagguggaugacggguuccuggauaucuggacuuacaaugccgaacuccuuguacuguuggagaacgaacgcacccuagacuaucaugauagcaauguuaaaaaccuguacgagaaggugcgaucacagcucaaaaacaaugcaaaggagaucggcaacggauguuuugaguucuaucacaagugcgacaauacauguauggagagugucaaaaacggcacuuacgauuauccuaaguacuccgaagaggccaaacugaauagagaagagauugacggggugaaacuugagagcaccaggaucuaucaaauucuggcuauauacucuacagucgcgucaaguuuggugcucguugugagccugggagcaaucuccuuuuggaugugcucuaacgguucguuacagugccggauuuguaucuga

SEQ ID NO: 133383 - RNA, 1701 nt, Artificial Sequence
  derived and/or modified CDS sequence (opt3) from hemagglutinin__InfluenzaA__ADK90194
augaaggccauccuggugguccuccuuuacaccuucgcuacagcaaacgccgacacucugugcauuggcuaucacgcgaauaacagcacggauaccguugacacaguguuggagaaaaauguaacugugacccauuccgucaacuuacuggaagauaagcacaaugggaaacuauguaagcucagaggaguggcuccccugcaucuugguaaaugcaacauagccggcuggauccuggggaauccugagugugaaucuuugucaacagcaaguagcugguccuacauuguugagaccucuucgucagacaacggaacuugcuauccaggcgauuuuaucgacuacgaggagcucagggagcagcugagcaguguguccucuuucgaacgguuugagauuuucccgaagacaagcuccuggcccaaucacgauucaaacaagggugucaccgccgcuuguccucaugcaggggccaaaaguuuuuauaagaaucugaucuggcucgugaaaaagggaaacagcuacccaaaauuaucuaaguccuauauaaaugacaagggcaaagaaguacugguucuuuggggcauccaccaccccucaacgagcgcugaucaacagaguuuguaccagaacgccgacgcguacguguucgucgggacuucuaaguauuccaaaaaguuuaaaccugagauugcaauccgcccaaaggugcgagaucaggagggacguaugaauuacuauuggacccugguggaacccggugacaaaauuacauucgaggccacuggcaaccuagucguuccuagauacgcuuuugccauggaaaggaacgcagggagcggaaucauaauuucggauaccccagugcaugacugcaauacaaccugucaaacgccgaagggcgcuaucaacacuucucuccccuuccagaauauucacccuaucacaaucgguaagugcccaaaauauguaaaguccaccaaacugcggcuugccacugggcugcgcaacgugcccucaauucagaguagaggauuguuuggcgcgauagccggcuucaucgaagggggauggacagguauggucgacggcugguacggguaucaucaccagaaugaacaaggaagcggcuacgcagcugaucucaaguccacccagaacgccauugacgagaucacgaauaaagugaacucuguuauagagaagaugaauacccaguuuacagcuguggguaaggaauuuaaccaccuggagaaaaggauugaaaauuuaaacaagaaaaucgaugacggguuccuggauaucuggacuuacaaugccgagcuccuuguccuguuggaaaacgagcggacccuagacuaucaugauagcaaugugaagaaccuguacgagaaaguacgcucacagcucaagaacaaugcaaaggaaauuggcaacggauguuucgaguucuaucacaaaugcgacaauacauguauggaaaguguuaagaacggcacuuacgauuauccuaaauacuccgaggaagccaagcugaaucgagaggagaucgacggggugaaacuugaaagcaccagaauuuaucaaauacuggcuaucuacucuacagucgcgucaaguuuggugcucgucgugagccugggagcaauuuccuuuuggaugugcucuaacgguucguuacagugcaggaucuguaucuga

SEQ ID NO: 133384 - RNA, 1701 nt, Artificial Sequence
  derived and/or modified CDS sequence (opt3) from hemagglutinin__InfluenzaA__ADK90195
augaaggccauccuggugguccuccuuuacaccuucgcuacagcaaacgccgacacucugugcauuggcuaucacgcgaauaacagcacggauaccguugacacaguguuggagaaaaauguaacugugacccauuccgucaacuuacuggaagauaagcacaaugggaaacuauguaagcucagaggaguggcuccccugcaucuugguaaaugcaacauagccggcuggauccuggggaauccugagugugaaucuuugucaacagcaaguagcugguccuacauuguugagaccucuucgucagacaacggaacuugcuauccaggcgauuuuaucgacuacgaggagcucagggagcagcugagcaguguguccucuuucgaacgguuugagauuuucccgaagacaagcuccuggcccaaucacgauucaaacaagggugucaccgccgcuuguccucaugcaggggccaaaaguuuuuauaagaaucugaucuggcucgugaaaaagggaaacagcuacccaaaauuaucuaaguccuauauaaaugacaagggcaaagaaguacugguucuuuggggcauccaccaccccucaacgagcgcugaucaacagaguuuguaccagaacgccgacgcguacguguucgucgggacuucucgcuauuccaagaaauuuaagccugagauugcaauccgaccaaaagugcgugaucaggagggaagaaugaauuacuauuggacccugguggaacccggugacaagauuacauucgaggccacuggcaaccuagucguuccuagguacgcuuuugccauggaacggaacgcagggagcggaaucgugauaucggauaccccaguacaugacugcaauacaaccugucaaacgccgaaaggcgcuauuaacacuucucuccccuuccagaauauccacccuauuacaaucgguaagugcccaaaguaugugaaauccaccaagcugcgccuugccacugggcugagaaacguccccucaauccagaguaggggauuguuuggcgcgauugccggcuucauagaagggggauggacagguaugguggacggcugguacggguaucaucaccagaaugaacaaggaagcggcuacgcagcugaucucaaauccacccagaacgccaucgacgagauuacgaauaagguuaacucugugaucgagaaaaugaauacccaguuuacagcugucgguaaggaguucaaccaccuggaaaagcggauagaaaauuuaaacaaaaagauugaugacggguuccuggauaucuggacuuacaaugccgagcuccuugugcuguuggaaaacgagcgcacccuagacuaucaugauagcaauguaaagaaccuguacgagaagguucgaucacagcucaaaaacaaugcaaaggaaaucggcaacggauguuuugaguucuaucacaagugcgacaauacauguauggaaagugugaaaaacggcacuuacgauuauccuaaguacuccgaggaagccaaacugaauagagaggagauugacggggucaaacuugaaagcaccaggaucuaucaaauucuggcuauauacucuacaguggcgucaaguuugguccucgugguuagccugggagcaaucuccuuuuggaugugcucuaacgguucguuacagugccggauuuguaucuga

SEQ ID NO: 133385 - RNA, 1701 nt, Artificial Sequence; identical to SEQ ID NO: 130704
  derived and/or modified CDS sequence (opt3) from hemagglutinin__InfluenzaA__ADK90196

SEQ ID NO: 133386 - RNA, 1701 nt, Artificial Sequence
  derived and/or modified CDS sequence (opt3) from hemagglutinin__InfluenzaA__ADK90197
augagagccauccugggcgugcuccuuuacaccuucgcuacagcaaacgccgacacucugugcauuggguaucacgcgaauaacagcacggauaccgucgacacaguuuuggagaagaaugugacuguaacccauuccgugaacuuacuggaagauaaacacaauggaaagcuauguaaacucaggggugucgcuccccugcaucuuggcaagugcaacauagccggguggauccugggaaauccugagugugaaucuuugucaacagcaaguagcugguccuacauuguggagaccucuucgucagacaacggcacuugcuauccaggugauuuuaucgacuacgaagaacuccgggagcagcugagcaguguuuccucuuucgaacgcuuugagauuuucccgaaaacaagcuccuggcccaaucacgauucaaacaagggggugaccgccgcuuguccucaugcaggagccaagaguuuuuauaaaaaucugaucuggcucgucaagaaaggcaacagcuacccaaaguuaucuaaauccuauauaaaugacaagggcaaggaagugcugguacuuugggggauccaccaccccucaacgagcgcugaucaacagaguuuguaccagaacgccgacgcguacguuuucgugggaacuucucgauauuccaaaaaguuuaaaccugagauugcaauccguccaaaggucagagaucaggaggguaggaugaauuacuauuggacccugguggaacccggcgacaaaauuacauucgaggccacugggaaccuaguggucccucgguacgcuuuugccauggaacgcaacgcaggaagcggcaucauaauuucggauaccccaguucaugacugcaauacaaccugucaaacgccgaagggugcuaucaacacuucucuccccuuccagaauauucacccuaucacaaucgggaaaugcccaaaguaugugaaguccaccaaacugagacuugccacuggacugaggaacguacccucaauucagagucggggcuuguuuggcgcgauagccggguucaucgagggagguuggacaggcaugguggacgggugguacggauaucaucaccagaaugaacaaggcagcgguuacgcagcugaucucaaguccacccagaacgccauugacgagaucacgaauaaagucaacucugugauagagaagaugaauacccaguuuacagcuguugggaaagaguucaaccaccuggagaagcgcauugaaaauuuaaacaagaaaguggaugacggcuuccuggauaucuggacuuacaaugccgagcuccuuguccuguuggaaaacgagcgaacccuagacuaucaugauagcaaugugaagaaccuguacgagaaaguaagaucacagcucaagaacaaugcaaaagaaaucggaaacggcuguuuugaguucuaucacaagugcgacaauacauguauggaaaguguuaagaacgggacuuacgauuauccuaaauacuccgaggaagccaagcugaauagggaggagauugacggagugaaacuugaaagcacccggaucuaucaaauucuggcuauauacucuacagucgcgucaaguuuggugcucgucgugagccugggugcaaucuccuuuuggaugugcucuaacggcucguuacagugccguauuuguaucuga

SEQ ID NO: 133387 - RNA, 1701 nt, Artificial Sequence
  derived and/or modified CDS sequence (opt3) from hemagglutinin__InfluenzaA__ADK90198
augaaggccauccugggcgugcuccuuuacaccuucgcuacagcaaacgccgacacucugugcauuggguaucacgcgaauaacagcacggauaccgucgacacaguuuuggagaagaaugugacuguaacccauuccgugaacuuacuggaagauaagcacaauggaaaacuauguaagcucagaggugucgcuccccugcaucuuggcaaaugcaacauagccggguggauccugggaaauccugagugugaaucuuugucaacagcaaguagcugguccuacauuguggagaccucuucgucagacaacggcacuugcuauccaggugauuuuaucgacuacgaagaacucagggagcagcugagcaguguuuccucuuucgaacgguuugagauuuucccgaagacaagcuccuggcccaaucacgauucaaacaagggggugaccgccgcuuguccucaugcaggagccaaaaguuuuuauaagaaucugaucuggcucgucaaaaagggcaacagcuacccaaaauuaucuaaguccuauauaaaugacaagggcaaagaagugcugguacuuugggggauccaccaccccucaacgagcgcugaucaacagaguuuguaccagaacgccgacgcguacguuuucgugggaacuucucgcuauuccaagaaauuuaagccugagauugcaauccgaccaaaaguccgugaucaggaggguagaaugaauuacuauuggacccugguggaacccggcgacaagauuacauucgaggccacugggaaccuaguggucccuagguacgcuuuugccauggaacggaacgcaggaagcggcaucauaauuucggauaccccaguucaugacugcaauacaaccugucaaacgccgaaaggugcuaucaacacuucucuccccuuccagaauauucacccuaucacaaucgggaagugcccaaaguaugugaaauccaccaagcugcgccuugccacuggacugagaaacguacccucaauucagaguaggggcuuguuuggcgcgauagccggguucaucgagggagguuggacaggcaugguggacgggugguacggauaucaucaccagaaugaacaaggcagcgguuacgcagcugaucucaaauccacccagaacgccauugacgagaucacgaauaaggucaacucugugauagagaaaaugaauacccaguuuacagcuguugggaaggaguucaaccaccuggagaagcggauugaaaauuuaaacaaaaagguggaugacggcuuccuggauaucuggacuuacaaugccgagcuccuuguccuguuggaaaacgagcgcacccuagacuaucaugauagcaaugugaaaaaccuguacgagaagguacgaucacagcucaaaaacaaugcaaaggaaaucggaaacggcuguuuugaguucuaucacaagugcgacaauacauguauggaaaguguuaaaaacgggacuuacgauuauccuaaguacuccgaggaagccaaacugaauagagaggagauugacggagugaaacuugaaagcaccaggaucuaucaaauucuggcuauauacucuacagucgcgucaaguuuggugcucgucgugagccugggugcaaucuccuuuuggaugugcucuaacggcucguuacagugccggauuuguaucuga

SEQ ID NO: 133388 - RNA, 1701 nt, Artificial Sequence; identical to SEQ ID NO: 130717
  derived and/or modified CDS sequence (opt3) from hemagglutinin__InfluenzaA__ADK90199

SEQ ID NO: 133389 - RNA, 1701 nt, Artificial Sequence
  derived and/or modified CDS sequence (opt3) from hemagglutinin__InfluenzaA__ADK90200
augaaggccauccuggugguccuccuuuacaccuucgcuacagcaaacgccgacacucugugcauuggcuaucacgcgaauaacagcacggauaccguugacacaguguuggagaaaaauguaacugugacccauuccgucaacuuacuggaagauaagcacaaugggaaacuauguaagcucagaggaguggcuccccugcaucuugguaaaugcaacauagccggcuggauccuggggaauccugagugugaaucuuugucaacagcaaguagcugguccuacauuguugagaccucuucgucagacaacggaacuugcuauccaggcgauuuuaucgacuacgaggagcucagggagcagcugagcaguguguccucuuucgaacgguuugagauuuucccgaagacaagcuccuggcccaaucacgauucaaacaagggugucaccgccgcuuguccucaugcaggggccaaaaguuuuuauaagaaucugaucuggcucgugaaaaagggaaacagcuacccaaaauuaucuaaguccuauauaaaugacaagggcaaagaaguacugguucuuuggggcauccaccaccccucaacgagcgcugaucaacagaguuuguaccagaacgccgacgcguacguguucgucgggacuucucgcuauuccaagaaauuuaagccugagauugcaauccgaccaaaagugcgugaucaggagggaagaaugaauuacuauuggacccugguggaacccggugacaagauugccuucgaggcuacaggcaaccuagucguuccuagguacgccuuugcaauggaacggaacgcugggagcggaaucauaauuucggauacuccagugcaugacugcaauaccacaugucaaaccccgaaaggcgccaucaacacgucucuccccuuccagaauauucacccuaucacuaucgguaagugcccaaaguauguaaaauccacaaagcugcgccuugcgaccgggcugagaaacgugcccucaauucagaguaggggauuguuuggcgccauagcaggcuucaucgaagggggauggacugguauggucgacggcugguacggguaucaucaccagaaugaacaaggaagcggcuacgcugccgaucucaaauccacacagaacgcuauugacgagaucaccaauaaggugaacucuguuauagagaaaaugaauacgcaguuuaccgccguggguaaggaguucaaccaccuggaaaagcggauugaaaauuuaaacaaaaaggucgaugacggguuccuggauaucuggacauacaaugcagagcuccuugugcuguuggaaaacgagcgcacucuagacuaucaugauagcaauguaaagaaccuguacgagaagguucgaucacagcucaaaaacaaugccaaggaaaucggcaacggauguuuugaguucuaucacaagugcgacaauaccuguauggaaagugugaaaaacggcacauacgauuauccuaaguacuccgaggaagcuaaacugaauagagaggagauugacggggucaaacuugaaagcacuaggaucuaucaaauucuggcgguguacucuaccgucgcaucaaguuuggugcucguugugagccugggagccauauccuuuuggaugugcucuaacgguucguuacagugccggaucuguauuuga

SEQ ID NO: 133390 - RNA, 1701 nt, Artificial Sequence
  derived and/or modified CDS sequence (opt3) from hemagglutinin__InfluenzaA__ADK90201
augaaggccauccuggugguccuccuuuacaccuucgcuacagcaaacgccgacacucugugcauuggcuaucacgcgaauaacagcacggauaccguugacacaguguuggagaagaauguaacugugacccauuccgucaacuuacuggaagauaagcacaaugggaaacuauguaagcucagaggaguggcuccccugcaucuugguaaaugcaacauagccggcuggauccuggggaauccugagugugaaucuuugucaacagcaaguagcugguccuacauuguugagaccucuucgucagacaacggaacuugcuauccaggcgauuuuaucgacuacgaggagcucagggagcagcugagcaguguguccucuuucgaacgguuugagauuuucccgaagacaagcuccuggcccaaucacgauucaaacaagggugucaccgccgcuuguccucaugcaggggccaaaaguuuuuauaagaaucugaucuggcucgugaaaaagggaaacagcuacccaaaauuaucuaaguccuauauaaaugacaagggcaaagaaguacugguucuuuggggcauccaccaccccucaacgagcgcugaucaacagaguuuguaccagaacgccgacgcguacguguucgucgggacuucucgcuauuccaagaaauuuaagccugagauugcagugcgaccaaaagugcgugaucaggagggaagaaugaauuacuauuggacccuggucgaacccggugacaagaucacauucgaggccacuggcaaccuaguugugccuagguacgcuuuugccauggaacggaacgcagggagcggaauuaucauaucggauaccccaguacaugacugcaauacaaccugucaaacgccgaaaggcgcuauuaacacuucucuccccuuccagaauauccacccuauuacaaucgguaagugcccaaaguaugugaaauccaccaagcugcgccuugccacugggcugagaaacguccccucaauccagaguaggggauuguuuggcgcgauugccggcuucauagaagggggauggacagguaugguggacggcugguacggguaucaucaccagaaugaacaaggaagcggcuacgcagcugaucucaaauccacccagaacgccaucgacgagauuacgaauaagguuaacucugugaucgagaaaaugaauacccaguuuacagcugucgguaaggaguucaaccaccuggaaaagcggauagaaaauuuaaacaaaaagguggaugacggguuccuggauauuuggacuuacaaugccgagcuccuuguacuguuggaaaacgagcgcacccuagacuaucaugauagcaauguuaaaaaccuguacgagaaggugcgaucacagcucaaaaacaaugcaaaggaaaucggcaacggauguuuugaguucuaucacaagugcgacaauacauguauggaaagugucaaaaacggcacuuacgauuauccuaaguacuccgaggaagccaaacugaauagagaggagaucgacggggugaaacuugaaagcaccaggauuuaucaaauccuggcuauuuacucuacagucgcgucaaguuuggugcucguugugagccugggagcaauauccuuuuggaugugcucuaacgguucguuacagugccggaucuguauuuga

SEQ ID NO: 133391 - RNA, 1701 nt, Artificial Sequence
  derived and/or modified CDS sequence (opt3) from hemagglutinin__InfluenzaA__ADK90202
augaaggccauccuggugguccuccuuuacaccuucgcuacagcaaacgccgacacucugugcauuggcuaucacgcgaauaacagcacggauaccguugacacaguguuggagaaaaauguaacugugacccauuccgucaacuuacuggaagauaagcacaaugggaaacuauguaagcucagaggaguggcuccccugcaucuugguaaaugcaacauagccggcuggauccuggggaauccugagugugaaccauugucuacagcaucaaguuggagcuacauuguugagaccuccucuucggacaacggaacuugcuauccgggcgauuuuaucgacuacgaggagcucagggagcagcugucaagcgugaguuccuucgaacggcuggagauuuuucccaagacaucuagcuggccuaaucacgauuccaacaagggugucaccgccgcuuguccacaugcaggggccaaaucauucuauaagaaucucaucugguuagugaaaaagggaaacaguuaccccaaacugagcaagucuuauauaaaugacaagggcaaagaaguacuuguuuuguggggcauccaccacccuuccacgucagcugaucaacagagccuguaccagaacgccgacgcguacguguuugucgggacuucccgcuauucuaagaaauucaagccagagauugcaauccgacccaaagugcgugaucaggagggaagaaugaauuacuauuggacccuaguggaaccuggugacaagauuacauuugaggccacuggcaaccucgucguuccaagguacgcuuucgccauggaacggaacgcaggguccggaaucauaauuagcgauaccccggugcaugacugcaauacaaccugucaaacgcccaacggcgcuaucaauacuucgcugccuuuucagaacauucacccaaucacaaucgguaaaugccccaaguauguaaagucuaccaaacuucgccuggccacuggguugagaaaugugccuuccauucagucaaggggacucuucggcgcgauagccggcuuuaucgaagggggauggacagguauggucgacggcugguacggguaucaucaccagaacgaacaaggaaguggcuacgcagcugaucuuaagagcacccagaaugccauugacgagaucacgaacaaagugaauaguguuauagagaagaugaacacccaguucacagcuguggguaaagaauuuaaucacuuagagaagcggauugaaaaccugaauaagaaagucgaugacggguuccucgauaucuggacuuacaacgccgagcuucugguguugcuagaaaaugagcgcacccuggacuaucaugauucuaacguaaagaaccucuacgagaaaguucgaagccagcugaagaauaacgcaaaagaaaucggcaauggauguuucgaguuuuaucacaagugcgacaacacauguauggaaucagugaagaauggcacuuacgauuauccaaaauacagugaggaagccaagcugaacagagaggagauugacggggucaaacuggaauccaccaggaucuaucaaauuuuggcuauauacagcacaguggcgucuucacucguccuggugguuaguuuaggagcaaucagcuucuggaugugcuccaaugguucucugcagugccggauuuguaucuga

SEQ ID NO: 133392 - RNA, 1701 nt, Artificial Sequence; identical to SEQ ID NO: 130897
  derived and/or modified CDS sequence (opt3) from hemagglutinin__InfluenzaA__ADK90203

SEQ ID NO: 133393 - RNA, 1701 nt, Artificial Sequence; identical to SEQ ID NO: 131818
  derived and/or modified CDS sequence (opt3) from hemagglutinin__InfluenzaA__ADK90204

SEQ ID NO: 133394 - RNA, 1701 nt, Artificial Sequence
  derived and/or modified CDS sequence (opt3) from hemagglutinin__InfluenzaA__ADK94191
augaagaccaucauugcccugagcuacauacucugccuuguguucgcucagaaacugcccggcaacgacaauuccacagcaacuuuguguuuagggcaccaugccgucccuaacggaacgguugugaagaccaucacaaaugaucaaauugagguaacuaacgcgaccgaacuggugcagucuucaaguacaggugagaucugcgacagcccacaccagauucuagauggcaaaaauuguacccucaucgacgcucugcuuggggauccgcagugcgacggauuucaaaacaagaaaugggaucuguucgucgaaagauccaaggccuauucuaauuguuaccccuaugacgugccugauuacgcaucguugaggucacucguugccagcaguggcacucuggaguuuaacaaugaauccuucaacuggacaggugugacccagaaugggacgucuagcgcuugcauacggcgcuccaagaacucauuuuucagucgacugaauuggcucacucauuuaaacuuuaaauauccagcacugaaugucaccaugcccaacaacgagcaguucgacaagcuguacaucuggggagugcaccauccuggcacagauaaagaccagauuuuucuuuaugcccaagcuagcggccguaucacuguaucuaccaagagaucccagcagacaguuauuccaaauaucgggucaaggccccgggugcgcaacauaccuagcagagucaguauuuacuggaccaucgugaaaccaggagauauucugcuaaucaauucuacggguaaccucaucgccccgaggggcuacuucaagauucgguccgggaaaagcucgauaaugcgcucugacgcgcccaucggaaaauguaauuccgagugcauuacuccuaacggcucaaucccaaaugacaagcccuuucagaacgugaaucgaauaacauauggugcauguccuagauacgucaaacaaaacacccugaaguuggccacugggaugaggaauguuccagaaaaacagacacggggaauuuucggcgcuaucgccggcuuuaucgagaacgggugggaaggaaugguggaugguugguauggcuuccgucaccagaauagugaggggcgcggacaagcagcugaccuuaagagcacccaggccgcgauugaucagaucaacggcaaauugaauagacucauugguaagacgaacgagaaguuccaccagauagaaaaagaguuuuccgaaguagaggggaggauccaagaccuggaaaaguacguggaggauaccaaaauugacuuauggucuuauaacgccgagcugcucgucgcacuugaaaaucagcauacaaucgaucugacugacagcgagaugaacaaguuguucgaaaagaccaagaagcagcuacgggagaaugcugaagauaugggcaacggaugcuuuaaaaucuaccacaagugugacaaugccugcauuggcucaauacgaaacgggacauaugaucaugacguguaccgcgacgaggcucugaauaacagauuccagaucaaaggaguugagcucaagagugguuacaaagauuggauucuguggaucuccuuugccauuagcugcuuccuucuguguguggcauugcucggcuuuaucaugugggccugccaaaaggggaauauaagguguaacaucugcauuuga

SEQ ID NO: 133395 - RNA, 1701 nt, Artificial Sequence
  derived and/or modified CDS sequence (opt3) from hemagglutinin__InfluenzaA__ADK94202
augaagaccaucauugcccugagcuacauacucugccuuguguucgcucagaaacugcccggcaacgacaauuccacagcaacuuuguguuuagggcaccaugccgucccuaacggaacgaucguuaagaccauuacaaaugaucaaaucgaggugacuaacgcgaccgaacugguacagucuucaaguacaggugagauuugcgacagcccacaccagauccuagauggcgaaaauuguacccucauagacgcucugcuuggggauccgcagugcgacggauuucaaaacaaaaagugggaucuguucguggagagauccaaagccuauucuaauuguuaccccuaugacgucccugauuacgcaucguugaggucacucaucgccagcaguggcacucuggaauuuaacaaugaguccuucaacuggacaggugugacccagaaugggacgucuagcgcuugcauucggcgcuccaacaauucauuuuucagucgacugaacuggcucacucauuuaaaguuuaaguauccagcacugaauguuaccaugcccaacaacgagcaguucgacaaacuuuacaucuggggagugcaccauccuggcacagauaaugaccagaucuuuuuguaugcccaagcuagcggccguauuacugucucuaccaagagaucccagcagacagugauaccaaacauugggucaaggccccggguacgcaauaucccuagcagaauuaguaucuacuggaccaucguuaaaccaggagauauucugcuaauaaacucuacggguaaucucaucgccccgaggggcuacuucaagauucgguccgggaaaagcucgaucaugcgcucugacgcgcccauaggaaaguguaacuccgaaugcauuacuccuaauggcucaaucccaaacgacaagcccuuucagaaugugaaccgaaucacauauggugcauguccuagauacgucaaacaaaauacccugaagcuggccacugggaugaggaacgugccagagaaacagacacggggaauuuucggcgcuaucgccggcuuuauugaaaaugggugggagggaaugguggaugguugguauggcuuccgucaccagaacagugaggggcgcggacaagcagcugaccuuaagagcacccaggccgcgauagaucagaucaauggcaaauugaacagacucauugguaagacgaacgaaaaauuccaccagaucgagaaggaauuuuccgaggucgaagggaggauccaagaccuggagaaguacguugaggauaccaaaauugacuuauggucuuauaaugccgaacugcucguggcacuugagaaccagcauacaauagaucugacugacagcgaaaugaauaaguuguucgagaaaaccaagaaacagcuacgggaaaacgcugaggauaugggcaauggaugcuuuaagaucuaccacaagugugacaacgccugcauuggcucaauccgaaaugggacauaugaucaugacguauaccgcgacgaggcucugaacaauagauuccagauuaaaggaguggaacucaagagugguuacaaagauuggauccuguggauauccuuugccaucagcugcuuccuucugugugucgcauugcucggcuuuauuaugugggccugccaaaaggggaacaucagguguaauauuugcaucuga

SEQ ID NO: 133396 - RNA, 1701 nt, Artificial Sequence; identical to SEQ ID NO: 130482
  derived and/or modified CDS sequence (opt3) from hemagglutinin__InfluenzaA__ADK94213

SEQ ID NO: 133397 - RNA, 1701 nt, Artificial Sequence; identical to SEQ ID NO: 131661
  derived and/or modified CDS sequence (opt3) from hemagglutinin__InfluenzaA__ADK94224

SEQ ID NO: 133398 - RNA, 1701 nt, Artificial Sequence
  derived and/or modified CDS sequence (opt3) from hemagglutinin__InfluenzaA__ADK94257
auggagaccaucauugcccugagcuacauacucugccuuguguucgcucagaagcugcccggcaacgacaauuccacagcaacuuuguguuuagggcaccaugccgucccuaacggaacgaucguuaaaaccauuacaaaugaucaaaucgaagugacuaacgcgaccgagcugguacagucuucaaguacaggugaaauuugcgacagcccacaccagauccuagauggcaagaauuguacccucauagacgcucugcuuggggauccgcagugcgacggauuucaaaacaaaaagugggaucuguucguggagagauccaaagccuauucuaauuguuaccccuaugacgucccugauuacgcaucguugaggucacucguggccagcaguggcacucuggaauuuaacaaugaguccuucaacuggacagguguuacccagaaugggacgucuagcgcuugcauccggcgcuccaagaacucauuuuucagucgacugaauuggcucacucauuuaaacuuuaaguauccagcacugaaugugaccaugcccaacaacgagcaguucgacaaacuuuacauuuggggaguccaccauccuggcacagauaaggaccagaucuuuuuguaugcccaagcuagcggccguauuacugugucuaccaaaagaucccagcagacaguaaucccaaauauagggucaaggccccggguucgcaacauuccuagcagaaucaguauuuacuggaccaucgugaagccaggagauauccugcuaauuaauucuacggguaaccucauagccccgaggggcuacuucaaaauccgguccggaaagagcucgauuaugcgcucugacgcgcccaucgggaaguguaauuccgaaugcauaacuccuaacggcucaauuccaaaugacaaacccuuucagaacgucaaucgaaucacauauggugcauguccuagauacgugaagcaaaguacccugaaacuugccacugggaugaggaacgugccagagaagcagacacggggaaucuucggcgcuauugccggcuuuaucgaaaaugggugggagggaauggucgaugguugguauggcuuccgucaccagaacagcgaggggcgcggacaagcagcugaccugaaauccacccaggccgcgauugaucagauaaauggcaaguugaacagacucaucgguaaaacgaaugaaaaguuccaccagauugagaaggaauuuucugagguugaagggaggauccaagaccuggagaaauacguggaggauaccaagaucgacuuauggagcuauaacgccgaacugcucguagcacuugagaaccagcauacaauugaucugacugacucagaaaugaauaaauuguucgagaagaccaaaaagcagcuacgggaaaacgcugaggauaugggcaauggaugcuuuaagauauaccacaaaugugacaacgccugcaucggcaguauucgaaaugggacauaugaucaugacguguaccgcgacgaggcucugaacaauagauuccagaucaagggagucgaacucaaauccgguuacaaggauuggauucuguggaucagcuuugccauaucuugcuuccuucuguguguggcauugcucggcuuuaucaugugggccugccaaaaagggaacauuagguguaauaucugcauuuga

SEQ ID NO: 133399 - RNA, 1701 nt, Artificial Sequence
  derived and/or modified CDS sequence (opt3) from hemagglutinin__InfluenzaA__ADK94268
augaagaccaucauugcccugagcuacauacucugccuuguguucgcucagaaacugcccggcaacgacaauuccacagcaacuuuguguuuagggcaccaugccgucccuaacggaacgaucguuaagaccauuacaaaugaucaaaucgaggugacuaacgcgaccgaacugguacagucuucaaguacaggugagauuugcgacagcccacaccagauccuagauggcaaaaauuguacccucauagacgcucugcuuggggauccgcagugcgacggauuucaaaacaagaaaugggaucuguucguggaaagauccaaggccuauucuaauuguuaccccuaugacgucccugauuacgcaucguugaggucacucguggccagcaguggcacucuggaguuuaacaaugaauccuucaacuggacagguguuacccagaaugggacgucuagcgcuugcauccggcgcuccaagaacucauuuuucagucgacugaauuggcucacucauuuaaacuuuaaauauccagcacugaaugugaccaugcccaacaacgagcaguucgacaaacuuuacauuuggggaguccaccauccuggcacagauaaagaccagaucuuuuuguaugcccaagcuagcggccguauuacugugucuaccaagagaucccagcagacaguaaucccaaauauagggucaaggccccggguucgcaacauuccuagcagaaucaguauuuacuggaccaucgugaaaccaggagauauccugcuaauuaauucuacggguaaccucauagccccgaggggcuacuucaagauccgguccggaaagagcucgauuaugcgcucugacgcgcccaucgggaaauguaauuccgagugcauaacuccuaacggcucaauuccaaaugacaagcccuuucagaacgucaaucgaaucacauauggugcauguccuagauacgugaaacaaaguacccugaaacuugccacugggaugaggaacgugccagaaaagcagacacggggaaucuucggcgcuauugccggcuuuaucgagaaugggugggaaggaauggucgaugguugguauggcuuccgucaccagaacagcgaggggcgcggacaagcagcugaccugaaguccacccaggccgcgauugaucagauaaauggcaaauugaacagacucaucgguaagacgaaugagaaguuccaccagauugaaaaagaguuuucugaaguugaggggaggauccaagaccuggaaaaguacguggaggauaccaaaaucgacuuauggagcuauaacgccgagcugcucguagcacuugaaaaccagcauacaauugaucugacugacucagagaugaauaaguuguucgaaaagaccaagaagcagcuacgggagaacgcugaagauaugggcaauggaugcuuuaaaauauaccacaagugugacaacgccugcaucggcaguauucgaaaugggacauaugaucaugacguguaccgcgacgaggcucugaacaauagauuccagaucaaaggagucgagcucaaguccgguuacaaagauuggauucuguggaucagcuuugccauaucuugcuuccuucuguguguggcauugcucggcuuuaucaugugggccugccaaaaggggaacauuagguguaauaucugcauuuga

SEQ ID NO: 133400 - RNA, 1701 nt, Artificial Sequence
  derived and/or modified CDS sequence (opt3) from hemagglutinin__InfluenzaA__ADK94279
augaagaccaucauugcccugagcuacauacucugccuuguguucgcucagaaacugcccggcaacgacaauuccacagcaacuuuguguuuagggcaccaugccgucccuaacggaacgaucguuaagaccauuacaaaugaucaaaucgaggugacuaacgcgaccgaacugguacagucuucaaguacaggugagauuugcaauagcccacaccagauccuagacggcgaaaacuguacccucauagaugcucugcuuggggacccgcagugcgauggauuucaaaauaaaaagugggaccuguucguggagagauccaaagccuauucuaacuguuaccccuaugaugucccugacuacgcaucguugaggucacucguggccagcaguggcacucuggaauuuaauaacgaguccuucaauuggacagguguuacccagaacgggacgucuagcgcuugcauccggcgcuccaauaacucauuuuucagucgacugaauuggcucacucauuuaaaguuuaaguauccagcacugaacgugaccaugcccaacaaugagcaguucgauaaacuuuacauuuggggaguccaccauccuggcacagacaacgaucagaucuuuuuguaugcccaagcuagcggccguauuacugugucuaccaagagaucccagcagacaguaaucccaaauauagggucaaggccccggguucgcaacauuccuagcagaaucaguauuuacuggaccaucgugaaaccaggagacauccugcuaauuaauucuacggguaaccucauagccccgaggggcuacuucaagauccgguccgggaaaagcucgauuaugcgcucugaugcgcccaucggaaaguguaauuccgaaugcauaacuccuaacggcucaauuccaaaugacaagcccuuucagaacgucaaucgaaucacauauggugcauguccuagauacgugaaacaaaacacccugaagcuggccacugggaugaggaaugugccagagaaacagacacggggaaucuucggcgcuauugccggcuuuaucgaaaacgggugggagggaauggucgacgguugguauggcuuccgucaccagaauagugaggggcgcggacaagcagcugaucuuaagagcacccaggccgcgauugaccagauaaacggcaaauugaacagacucaucgguaagacgaaugaaaaauuccaccagauugagaaggaauuuuccgagguugaagggaggauccaagaucuggagaaguacguggaggacaccaaaaucgauuuauggucuuauaacgccgaacugcucguagcacuugagaaucagcauacaauugaccugacugauagcgaaaugaacaaguuguucgagaaaaccaagaaacagcuacgggaaaaugcugaggacaugggcaacggaugcuuuaagauauaccacaagugugauaaugccugcaucggcucaauucgaaacgggacauaugaccaugauguguaccgcgacgaggcucugaauaacagauuccagaucaaaggagucgaacucaagagugguuacaaagacuggauucuguggaucuccuuugccauaagcugcuuccuucuguguguggcauugcucggcuuuaucaugugggccugccaaaaggggaauauuagguguaacaucugcauuuga

SEQ ID NO: 133401 - RNA, 1701 nt, Artificial Sequence; identical to SEQ ID NO: 131661
  derived and/or modified CDS sequence (opt3) from hemagglutinin__InfluenzaA__ADK94290

SEQ ID NO: 133402 - RNA, 1701 nt, Artificial Sequence; identical to SEQ ID NO: 131661
  derived and/or modified CDS sequence (opt3) from hemagglutinin__InfluenzaA__ADK94301

SEQ ID NO: 133403 - RNA, 1701 nt, Artificial Sequence
  derived and/or modified CDS sequence (opt3) from hemagglutinin__InfluenzaA__ADK94323
augaagaccaucauugcccugagcuacauacucugccuuguguucgcucagaaacugcccggcaacgacaauuccacagcaacuuuguguuuagggcaccaugccgucccuaacggaacgaucguuaagaccauuacaaaugaucaaaucgaggugacuaacgcgaccgaacugguacagucuucaaguacaggugagauuugcgacagcccacaccagauccuagauggcaaaaauuguacccucauagacgcucugcuuggggauccgcagugcgacggauuucaaaacaagaaaugggaucuguucguggaaagauccaaggccuauucuaauuguuaccccuaugacgucccugauuacgcaucguugaggucacucguggccagcaguggcacucuggaguuuaacaaugaauccuucaacuggacagguguuacccagaaugggacgucuagcgcuugcauccggcgcuccaagaacucauuuuucagucgacugaauuggcucacucauuuaaacuuuaaauauccagcacugaaugugaccaugcccaacaacgagcaguucgacaagcuguacauuuggggaguccaccauccuggcacagauaaagaccagaucuuuuuguaugcccaagcuagcggccguauuacugugucuaccaagagaucccagcagacaguaaucccaaauauagggucaaggccccggauucgcaacaucccuagcagaauuaguaucuacuggaccaucguuaaaccaggagauauucugcuaauaaauucuacggguaaccucaucgccccgaggggcuacuucaagauucgguccggaaagagcucgaucaugcgcucugacgcgcccauagggaaauguaauuccgagugcauuacuccuaacggcucaaucccaaaugacaagcccuuucagaacgugaaucgaaucacauauggugcauguccuagauacgucaaacaaaacacccugaaacuugccacugggaugaggaaugugccagaaaaacagacacggggaauuuucggcgcuaucgccggcuuuauugagaacgggugggaaggaaugguggaugguugguauggcuuccgucaccagaauagugaggggcgcggacaagcagcugaccuuaagagcacccaggccgcgauagaucagaucaacggcaaauugaauagacucauugguaagacgaacgagaaguuccaccagaucgaaaaagaguuuuccgaagucgaggggaggauccaagaccuggaaaaguacguugaggauaccaaaauugacuuauggucuuauaacgccgagcugcucguggcacuugaaaaucagcauacaauagaucugacugacagcgagaugaacaaguuguucgaaaagaccaagaagcagcuacgggagaaugcugaagauaugggcaacggaugcuuuaaaaucuaccacaagugugacaaugccugcauuggcucaauccgaaacgggacauaugaucaugacguauaccgcgacgaggcucugaauaacagauuccagauuaaaggaguggagcucaagagugguuacaaagauuggauccuguggauauccuuugccaucagcugcuuccuucugugugucgcauugcucggcuuuauuaugugggccugccaaaaggggaauaucagguguaacauuugcaucuga

SEQ ID NO: 133404 - RNA, 1701 nt, Artificial Sequence; identical to SEQ ID NO: 133394
  derived and/or modified CDS sequence (opt3) from hemagglutinin__InfluenzaA__ADK94441

SEQ ID NO: 133405 - RNA, 1701 nt, Artificial Sequence
  derived and/or modified CDS sequence (opt3) from hemagglutinin__InfluenzaA__ADK94476
augaagaccaucauugcccugagcuacauacucugccuuguguucgcucagaaacugcccggcaacgacaauuccacagcaacuuuguguuuagggcaccaugccgucccuaacggaacgaucguuaagaccauuacaaaugaucaaaucgaggugacuaacgcgaccgaacugguacagucuucaaguacaggugagauuugcgacagcccacaccagauccuagauggcaaaaauuguacccucauagacgcucugcuuggggauccgcagugcgacggauuucaaaacaagaaaugggaucuguucguggaaagauccaaggcccauucuaauuguuaucccuacgacgucccugauuaugcaucguugaggucacucguggccagcaguggcacucuggaguuuaacaaugaauccuucaacuggacagguguuacccagaaugggacgucuagcgcuugcauccggcgcuccaagaacucauuuuucagucgacugaauuggcucacucacuuaaacuuuaaauacccagcacugaaugugaccaugcccaacaacgagcaguucgacaagcuguauauuuggggagcccaucacccuggcacagauaaagaccagaucuuuuuguacgcucaagccagcggccguauuacugucucuaccaagagaucccagcagacagugaucccaaauauagggucaaggccccggguacgcaacauuccuagcagaaucaguauuuauuggaccaucguuaaaccaggagauauccugcuaauuaauucuacggguaaccucauagcgccgaggggcuacuucaagauccgguccggaaagagcucgauuaugcgcucugacgcacccaucgggaaauguaauuccgagugcauaacuccuaacggcucaauuccaaaugacaagcccuuucagaacgugaaucgaaucacauacggugccuguccuagauaugucaaacaaaacacccugaaacuugcuacugggaugaggaaugugccagaaaaacagacacggggaaucuucggcgccauugcaggcuuuaucgagaacgggugggaaggaaugguggaugguugguacggcuuccgucaccagaauagugaggggcgcggacaagcugccgaccuuaagagcacccaggcggccauugaucagauaaacggcaaauugaauagacucaucgguaagacgaacgagaaguuccaucagauugaaaaagaguuuuccgaagucgaggggaggauccaagaccuggaaaaguauguugaggauaccaaaaucgacuuauggucuuacaacgcagagcugcucguggcucuugaaaaucagcacacaauugaucugacugacagcgagaugaacaaguuguucgaaaagaccaagaagcagcuacgggagaaugccgaagauaugggcaacggaugcuuuaaaauauaucauaagugugacaaugcuugcaucggcucaauucgaaacgggacauacgaucacgacguauaucgcgacgaggcccugaauaacagauuccagaucaaaggaguggagcucaagagugguuacaaagauuggauucuguggaucuccuuugcaauaagcugcuuccuucugugugucgccuugcucggcuuuaucaugugggcuugccaaaaggggaauauuagguguaacaucugcauuuga

SEQ ID NO: 133406 - RNA, 1701 nt, Artificial Sequence; identical to SEQ ID NO: 131661
  derived and/or modified CDS sequence (opt3) from hemagglutinin__InfluenzaA__ADK94487

SEQ ID NO: 133407 - RNA, 1701 nt, Artificial Sequence
  derived and/or modified CDS sequence (opt3) from hemagglutinin__InfluenzaA__ADK94498
augaagaccaucauugcccugagcuacauacucugccuuguguucgcucagaaacugcccggcaacgacaauuccacagcaacuuuguguuuagggcaccaugccgucccuaacggaacgguugugaagaccaucacaaaugaucaaauugagguaacuaacgcgaccgaacuggugcagucuucaaguacaggugagaucugcgacagcccacaccagauucuagauggcaaaaauuguacccucaucgacgcucugcuuggggauccgcagugcgacggauuucaaaacaagaaaugggaucuguucgucgaaagauccaaggccuauucuaauuguuaccccuaugacgugccugauuacgcaucguugaggucacucguugccagcaguggcacucuggaguuuaacaaugaauccuucaacuggacaggugugacccagaaugggacgucuagcgcuugcauacggcgcuccaagaacucauuuuucagucgacugaauuggcucacucauuuaaacuuuaaauauccagcacugaaugucaccaugcccaacaacgagcaguucgacaagcuguacaucuggggagugcaccauccuggcacagauaaagaccagauuuuucuuuaugcccaagcuagcggccguaucacuguaucuaccaagagaucccagcagacaguuauuccaaauaucgggucaaggccccgggugcgcaacauaccuagcagaauuaguaucuacuggaccauugucaaaccaggagauauccugcuaaucaauucuacggguaaccucauugccccgaggggcuacuucaagauacgguccgggaaaagcucgaucaugcgcucugacgcgcccauuggaaaauguaauuccgagugcaucacuccuaacggcucaauaccaaaugacaagcccuuucagaacgugaaucgaauuacauauggugcauguccuagauacgugaaacaaaacacccugaaguuggccacugggaugaggaaugucccagaaaaacagacacggggaaucuucggcgcuaucgccggcuuuauugagaacgggugggaaggaaugguugaugguugguauggcuuccgucaccagaauagugaggggcgcggacaagcagcugaccuuaagagcacccaggccgcgaucgaucagauuaacggcaaauugaauagacucauagguaagacgaacgagaaguuccaccagaucgaaaaagaguuuuccgaaguggaggggaggauucaagaccuggaaaaguacguagaggauaccaaaaucgacuuauggucuuauaacgccgagcugcucguggcacuugaaaaucagcauacaaucgaucugacugacagcgagaugaacaaguuguucgaaaagaccaagaagcagcuacgggagaaugcugaagauaugggcaacggaugcuuuaaaauuuaccacaagugugacaaugccugcauaggcucaauccgaaacgggacauauaaucaugaugucuaccgcgacgaggcucugaacaauagauuccagauuaaaggaguggagcucaagagugguuacaaagacuggauccuguggauuuccuuugccaucagcugcuuccuucuguguguugcauugcucggcuuuauaaugugggccugccaaaaggggaacaucagguguaauauuugcaucuga

SEQ ID NO: 133408 - RNA, 1701 nt, Artificial Sequence
  derived and/or modified CDS sequence (opt3) from hemagglutinin__InfluenzaA__ADK94509
augaagaccaucauugcccugagcuacauacucugccuuguguucgcucagaaacugcccggcaacgacaauuccacagcaacuuuguguuuagggcaccaugccgucccuaacggaacgaucguuaagaccauuacaaaugaucaaaucgaggugacuaacgcgaccgaacugguacagucuucaaguacaggugagauuugcgacagcccacaccagauccuagauggcaaaaauuguacccucauagacgcucugcuuggggauccgcagugcgacggauuucaaaacaagaaaugggaucuguucguggaaagauccaaggccuauucuaauuguuaccccuaugacgucccugauuacgcaucguugaggucacucguggccagcaguggcacucuggaguuuaacaaugaauccuucaacuggacagguguuacccagaaugggacgucuagcgcuugcauccggcgcuccaagaacucauuuuucagucgacugaauuggcucacucauuuaaacuuuaaauauccagcacugaaugugaccaugcccaacaacgagcaguucgacaagcuguacauuuggggaguccaccauccuggcacagauaaagaccagaucuuuuuguaugcccaagcuagcggccguauuacugugucuaccaagagaucccagcagacagccaucccaaauauagggucaaggccccggguacgcaacauuccuagcagaaucaguauuuacuggaccaucguuaaaccaggagauauccugcuaauuaauucuacggguaaccucauagcgccgaggggcuacuucaagauccgguccggaaagagcucgauuaugcgcucugacgcacccaucgggaaauguaauuccgagugcauaacuccuaacggcucaauuccaaaugacaagcccuuucagaacgugaaucgaaucacauauggugccuguccuagauacaucaaacaaaacacccugaaacuugcuacugggaugaggaaugucccagaaaaacagacacggggaauuuucggcgccaucgcaggcuuuauugagaacgggugggaaggaaugguggaugguugguauggcuuccgucaccagaauagugaggggcgcggacaagcugccgaccuuaagagcacccaggcggccauagaucagaucaacggcaaauugaauagacucauugguaagacgaacgagaaguuccaccagaucgaaaaagaguuuuccgaaguggaggggaggauccaagaccuggaaaaguacgucgaggauaccaaaauugacuuauggucuuauaacgcagagcugcucguugcucuugaaaaucagcauacaauagaucugacugacagcgagaugaacaaguuguucgaaaagaccaagaagcagcuacgggagaaugccgaagauaugggcaacggaugcuuuaaaaucuaccacaagugugacaaugcuugcauuggcucaauccgaaacgggacauaugaucaugacguguaccgcgacgaggcccugaauaacagauuccagauuaaaggaguagagcucaagagugguuacaaagauuggauccuguggauauccuuugcaaucagcugcuuccuucuguguguggccuugcucggcuuuauuaugugggcuugccaaaaggggaauaucagguguaacauuugcaucuga

SEQ ID NO: 133409 - RNA, 1701 nt, Artificial Sequence
  derived and/or modified CDS sequence (opt3) from hemagglutinin__InfluenzaA__ADK94520
augaagaccaucauugcccugagcuacauacucugccuuguguucgcucagaaacugcccggcaacgacaauuccacagcaacuuuguguuuagggcaccaugccgucccuaacggaacgaucguuaagaccauuacaaaugaucaaaucgaggugacuaacgcgaccgaacugguacagucuucaaguacaggugagauuugcgacagcccacaccagauccuagauggcgaaaauuguacccucauagacgcucugcuuggggauccgcagugcgacggauuucaaaacaaaaagugggaucuguucguggagagauccaaagccuauucuaauuguuaccccuaugacgucccugauuacgcaucguugaggucacucaucgccagcaguggcacucuggaauuuaacaaugaguccuucaacuggacaggugugacccagaaugggacgucuagcgcuugcauucggcgcuccaacaauucauuuuucagucgacugaacuggcucacucauuuacguuuuaaguauccagcacugaauguuaccaugcccaacaacgagcaguucgacaaguuguacaucuggggagugcaccauccuggcacagauaaugaccagauuuuucuuuaugcccaagcuagcggcagaaucacugucucuaccaaaaggucccagcagacagugauaccaaacauugggucacggccccgcguaagaaauaucccuagcaggauuaguaucuacuggaccaucguuaagccaggagauauucugcuaauaaacucuacggguaaucucaucgccccgcggggcuacuucaaaauucgcuccggaaagagcucgaucaugcgaucugacgcgcccauagggaaauguaacuccgaaugcauuacuccuaauggcucaaucccaaacgacaagcccuuucagaaugugaacagaaucacauauggugcauguccuagguacgucaagcaaaauacccugaaacuugccacugggaugcggaacgugccagagaagcagacacguggaauuuucggcgcuaucgccggcuuuauugaaaaugggugggagggaaugguggaugguugguauggcuuccgccaccagaacagugaggggagaggacaagcagcugaccugaaaagcacccaggccgcgauagaucagaucaauggcaaguugaacaggcucauugguaaaacgaacgaaaaguuccaccagaucgagaaagaauuuuccgaggucgaagggcggauccaagaccuggagaaguacguugaggauaccaagauugacuuauggucuuauaaugccgaacugcucguggcacuugagaaccagcauacaauagaucugacugacagcgaaaugaauaaauuguucgagaagaccaaaaagcagcuacgagaaaacgcugaggauaugggcaauggaugcuuuaaaaucuaccacaagugugacaacgccugcauuggcucaauccgcaaugggacauaugaucaugacguauacagagacgaggcucugaacaauagguuccagauuaagggaguggaacucaaaagugguuacaaggauuggauccuguggauauccuuugccaucagcugcuuccuucugugugucgcauugcucggcuuuauuaugugggccugccaaaaagggaacaucaaguguaauauuugcaucuga

SEQ ID NO: 133410 - RNA, 1701 nt, Artificial Sequence; identical to SEQ ID NO: 131661
  derived and/or modified CDS sequence (opt3) from hemagglutinin__InfluenzaA__ADK94531

SEQ ID NO: 133411 - RNA, 1701 nt, Artificial Sequence; identical to SEQ ID NO: 130482
  derived and/or modified CDS sequence (opt3) from hemagglutinin__InfluenzaA__ADK94542

SEQ ID NO: 133412 - RNA, 1701 nt, Artificial Sequence
  derived and/or modified CDS sequence (opt3) from hemagglutinin__InfluenzaA__ADK94553
augaagaccaucauugcccugagcuacauacucugccuuguguucgcucagaaacugcccggcaacgacaauuccacagcaacuuuguguuuagggcaccaugccgucccuaacggaacgaucguuaagaccauuacaaaugaucaaaucgaggugacuaacgcgaccgaacugguacagucuucaaguacaggugagauuugcgacagcccacaccagauccuagauggcaaaaauuguacccucauagacgcucugcuuggggauccgcagugcgacggauuucaaaacaagaaaugggaucuguucguggaaagauccaaggccuauucuaauuguuaccccuaugacgucccugauuacgcaucguugaggucacucguggccagcaguggcacucuggaguuuaacaaugaauccuucaacuggacagguguuacccagaaugggacgucuagcgcuugcauccggcgcuccaagaacucauuuuucagucgacugaauuggcucacucauuuaaacuuuaaauauccagcacugaaugugaccaugcccaacaacgagcaguucgacaaacuuuacauuuggggaguccaccauccuggcacagauaaagaccagaucuuuuuguaugcccaagcuagcggccguauuacugugucuaccaagagaucccagcagacaguaaucccaaauauagggucaaggccccggguucgcaacauuccuagcagaaucaguauuuacuggaccaucgugaaaccaggagauauccugcuaauuaauucuacggguaaccucauagccccgaggggcuacuucaagauccgguccggaaagagcucgauuaugcgcucugacgcgcccaucgggaaauguaauuccgagugcauaacuccuaacggcucaauuccaaaugacaagcccuuucagaacgucaaucgaaucacauauggugcauguccuagauacgugaaacaaaguacccugaaacuugccacugggaugaggaacgugccagaaaagcagacacggggaaucuucggcgcuauugccggcuuuaucgagaaugggugggaaggaauggucgaugguugguauggcuuccgucaccagaacagcgaggggcgcggacaagcagcugaccugaaguccacccaggccgcgauugaucagauaaauggcaaauugaacagacucaucgguaagacgaaugagaaguuccaccagauugaaaaagaguuuucugaaguugaggggaggauccaagaccuggaaaaguacguggaggauaccaaaaucgacuuauggagcuauaacgccgagcugcucguagcacuugaaaaccagcauacaauugaucugacugacucagagaugaauaaguuguucgaaaagaccaagaagcagcuacgggagaacgcugaagauaugggcaauggaugcuuuaaaauauaccacaaguguaacaaugccugcaucggcaguauucgaaacgggacauaugaccaugauguguaccgcgacgaggcucugaauaacagauuccagaucaaaggagucgagcucaaguccgguuacaaagacuggauucuguggaucagcuuugccauaucuugcuuccuucuguguguggcauugcucggcuuuaucaugugggccugccaaaaggggaauauuagguguaacaucugcauuuga

SEQ ID NO: 133413 - RNA, 1701 nt, Artificial Sequence; identical to SEQ ID NO: 131661
  derived and/or modified CDS sequence (opt3) from hemagglutinin__InfluenzaA__ADK94564

SEQ ID NO: 133414 - RNA, 1701 nt, Artificial Sequence
  derived and/or modified CDS sequence (opt3) from hemagglutinin__InfluenzaA__ADK98501
augaaggccauccuggugguccuccuuuacaccuucgcuacagcaaacgccgacacucugugcauuggcuaucacgcgaauaacagcacggauaccguugacacaguguuggagaaaaauguaacugugacccauuccgucaacuuacuggaagauaagcacaaugggaaacuauguaagcucagaggaguggcuccccugcaucuugguaaaugcaacauagccggcuggauccuggggaauccugagugugaaucuuugucaacagcaaguagcugguccuacauuguugagaccucuucgucaggaaacggcacuugcuauccaggugacuuuaucgauuacgaagaacucagggagcagcugagcaguguguccucuuucgaacgguuugagauuuucccgaagacaagcuccuggcccaaucacgacucaaacaagggggucaccgccgcuuguccucaugcaggagccaaaaguuuuuauaagaaucugaucuggcucgugaaaaagggcaacagcuacccaaaauuaucuaaguccuauauaaaugauaagggcaaagaaguacugguucuuugggggauccaccaccccucaacgagcgcugaccaacagaguuuguaccagaacgccgaugcguacguguucgucggaacuucucgcuauuccaagaaauuuaagccugagauugcaauccgaccaaaagugcgugaccaggaggguagaaugaauuacuauuggacccugguggaacccggcgauaagauuacauucgagacuaccgggaaccuagucguuccuagguacgccuuugcuauggaacggaacgccggaagcggcaucauaauuucggacacaccagugcaugauugcaauaccacgugucaaacuccgaaaggugcaaucaacacaucucuccccuuccagaauauucacccuaucaccaucgggaagugcccaaaguauguaaaauccacuaagcugcgccuugcuacaggacugagaaacgugcccucaauucagaguaggggcuuguuuggcgccauagcgggguucaucgagggagguuggaccggcauggucgacgggugguacggauaucaucaccagaaugaacaaggcagcgguuacgccgcagaccucaaauccacgcagaacgcuauugaugagaucaccaauaaggugaacucuguuauagagaaaaugaauacacaguuuacugccguggggaaggaguucaaccaccuggagaagcggauugaaaauuuaaacaaaaaggucgacgauggcuuccuggacaucuggaccuacaaugcugagcuccuugugcuguuggaaaacgagcgcacacuagauuaucaugacagcaauguaaagaaccuguacgagaagguucgaucacagcucaaaaacaaugccaaggaaaucggaaacggcuguuuugaguucuaucacaagugcgauaauacuuguauggaaagugugaaaaacgggaccuacgacuauccuaaguacuccgaggaagcaaaacugaauagagaggagauugauggagucaaacuugaaagcacaaggaucuaucaaauucuggccauauacucuaccguggcuucaaguuugguccucgugguuagccugggugcgaucuccuuuuggaugugcucuaacggcucguuacagugccggauuuguaucuga

SEQ ID NO: 133415 - RNA, 1701 nt, Artificial Sequence
  derived and/or modified CDS sequence (opt3) from hemagglutinin__InfluenzaA__ADK98503
augaaggccauccuggugguccuccuuuacaccuucgcuacagcaaacgccgacacucugugcauuggcuaucacgcgaauaacagcacggauaccguugacacaguguuggagaagaauguaacugugacccauuccgucaacuuacuggaagauaagcacaaugggaaacuauguaagcucagaggaguggcuccccugcaucuugguaaaugcaacauagccggcuggauccuggggaauccugagugugaaucuuugucaacagcaaguagcugguccuacauuguugagaccucuucgucagacaacggaacuugcuauccaggcgauuuuaucgacuacgaggagcucagggagcagcugagcaguguguccucuuucgaacgguuugagauuuucccgaagacaagcuccuggcccaaucacgauccuaacaagggugucaccgccgcuuguccacaugcaggggccaaaucauuuuauaagaaucugaucuggcucgugaaaaagggaaacaguuaccccaaauuaagcaagucuuauauaaaugacaagggcaaagaaguacugguucuuuggggcauccaccacccuuccacgucagcugaucaacagagcuuguaccagaacguggacgccuacgucuucguggggaccagucgcuauucuaagaaauuuaagccagagauugcgauccgacccaaagugcgugaucaggagggaagaaugaauuacuauuggacucuggucgaaccuggugacaagauuacauucgaggcaacuggcaaccuaguugugccaagguacgccuuugcuauggaacggaacgccggguccggaaucauaauuagcgauaccccgguacaugacugcaauacaaccugucaaacgcccaaaggcgcaaucaacacuucgcucccuuuccagaauauucacccaaucacaaucgguaagugccccaaguaugugaaaucuaccaagcugcgccuugcuacugggcugagaaacgucccuuccauucagucaaggggauuguuuggcgccauagcgggcuucaucgaagggggauggacagguaugguggacggcugguacggguaucaucaccagaaugaacaaggaaguggcuacgccgcagaucucaaaagcacccagaacgcuauugacgagaucacgaauaagguuaacuccgugauagagaaaaugaauacccaguuuacagccgucgguaaggaguucaaccaccuggaaaagcggauugaaaauuuaaacaaaaagguggaugacggguuccuggauaucuggacuuacaaugcugagcuccuuguacuguuggaaaacgagcgcacccuagacuaucaugauucuaauguuaaaaaccuguacgagaaggugcgaagccagcucaaaaacaaugccaaggaaaucggcaacggauguuuugaguucuaucacaagugcgacaauacauguauggaaucagucaaaaacggcacuuacgauuauccaaaguacagugaggaagcaaaacugaauagagaggagauugacggggugaaacuugaauccaccaggaucuaucaaauucuggccauauacagcacagucgcuucuucauuggugcucguugugagucugggagcgaucagcuuuuggaugugcuccaacgguucuuuacagugccggauuuguaucuga

SEQ ID NO: 133416 - RNA, 1701 nt, Artificial Sequence; identical to SEQ ID NO: 133399
  derived and/or modified CDS sequence (opt3) from hemagglutinin__InfluenzaA__ADK98623

SEQ ID NO: 133417 - RNA, 1701 nt, Artificial Sequence; identical to SEQ ID NO: 130482
  derived and/or modified CDS sequence (opt3) from hemagglutinin__InfluenzaA__ADK98634

SEQ ID NO: 133418 - RNA, 1701 nt, Artificial Sequence; identical to SEQ ID NO: 130482
  derived and/or modified CDS sequence (opt3) from hemagglutinin__InfluenzaA__ADK98645

SEQ ID NO: 133419 - RNA, 1701 nt, Artificial Sequence; identical to SEQ ID NO: 133345
  derived and/or modified CDS sequence (opt3) from hemagglutinin__InfluenzaA__ADK98656

SEQ ID NO: 133420 - RNA, 1701 nt, Artificial Sequence; identical to SEQ ID NO: 133412
  derived and/or modified CDS sequence (opt3) from hemagglutinin__InfluenzaA__ADK98667

SEQ ID NO: 133421 - RNA, 1701 nt, Artificial Sequence
  derived and/or modified CDS sequence (opt3) from hemagglutinin__InfluenzaA__ADK98678
augaagaccaucauugcccugagcuacauacucugccuuguguucgcucagaaacugcccggcaacgacaauuccacagcaacuuuguguuuagggcaccaugccgucccuaacggaacgaucguuaagaccauuacaaaugaucaaaucgaggugacuaacgcgaccgaacugguacagucuucaaguacaggugagauuugcgacagcccacaccagauccuagauggcgaaaauuguacccucauagacgcucugcuuggggauccgcagugcgacggauuucaaaacaaaaagugggaucuguucguggagagauccaaagccuauucuaauuguuaccccuaugacgucccugauuacgcaucguugaggucacucguggccagcaguggcacucuggaauuuaacaaugaguccuucaacuggacagguguuacccagaaugggacgucuagcgcuugcauccggcgcuccaacaauucauuuuucagucgacugaacuggcucacucauuuaaaguuuaaguauccagcacugaaugugaccaugcccaacaacgagcaguucgacaaacuuuacauuuggggaguccaccauccuggcacagauaaugaccagaucuuuuuguaugcccaagcuagcggccguauuacugugucuaccaagagaucccagcagacaguaaucccaaacauagggucaaggccccggguucgcaauauuccuagcagaaucaguauuuacuggaccaucgugaaaccaggagauauccugcuaauuaacucuacggguaaucucauagccccgaggggcuacuucaagauccgguccgggaaaagcucgauuaugcgcucugacgcgcccaucggaaaguguaacuccgaaugcauaacucagaauggcucaauuccuaacgacaagccauuucaaaaugucaaccgaaucacauauggugcaugucccagauacgugaaacagaauacccugaagcuggccacugggaugaggaacgugccugagaaacagacacggggaaucuucggcgcuauugccggcuuuaucgaaaaugggugggagggaauggucgaugguugguauggcuuccgucaccaaaacagugaggggcgcggacaggcagcugaccuuaagagcacccaggccgcgauugaucagauaaauggcaaauugaacagacucaucgguaagacgaacgaaaaauuccaccaaauugagaaggaauuuuccgagguugaagggaggauccaggaccuggagaaguacguggaggauaccaaaaucgacuuauggucuuauaaugccgaacugcucguagcacuugagaaccagcauacaauugaucugacugacagcgaaaugaauaaguuguucgagaaaaccaagaaacagcuacgggaaaacgcugaggauaugggcaauggaugcuuuaagauauaccacaagugugacaacgccugcaucggcucaauucgaaaugggacauaugaucaugacguguaccgcgacgaggcucugaacaauagauuccaaaucaaaggagucgaacucaagagugguuacaaagauuggauucuguggaucuccuuugccauaagcugcuuccuucuguguguggcauugcucggcuuuaucaugugggccugccagaaggggaacauuagguguaauaucugcauuuga

SEQ ID NO: 133422 - RNA, 1701 nt, Artificial Sequence; identical to SEQ ID NO: 130482
  derived and/or modified CDS sequence (opt3) from hemagglutinin__InfluenzaA__ADK98689

SEQ ID NO: 133423 - RNA, 1701 nt, Artificial Sequence; identical to SEQ ID NO: 130482
  derived and/or modified CDS sequence (opt3) from hemagglutinin__InfluenzaA__ADK98700

SEQ ID NO: 133424 - RNA, 1701 nt, Artificial Sequence; identical to SEQ ID NO: 130482
  derived and/or modified CDS sequence (opt3) from hemagglutinin__InfluenzaA__ADK98711

SEQ ID NO: 133425 - RNA, 1701 nt, Artificial Sequence
  derived and/or modified CDS sequence (opt3) from hemagglutinin__InfluenzaA__ADK98722
augaagaccaucauugcccugagcuacauacucugccuuguguucgcucagaaacugcccggcaacgacaauuccacagcaacuuuguguuuagggcaccaugccgucccuaacggaacgaucguuaagaccauuacaaaugaucaaaucgaggugacuaacgcgaccgaacugguacagucuucaaguacaggugagauuugcgacagcccacaccagauccuagauggcgaaaauuguacccucauagacgcucugcuuggggauccgcagugcgacggauuucaaaacaaaaagugggaucuguucguggagagauccaaagccuauucuaauuguuaccccuaugacgucccugauuacgcaucguugaggucacucguggccagcaguggcacucuggaauuuaacaaugaguccuucaacuggacagguguuacccagaaugggacgucuagcgcuugcauccggcgcuccaacaauucauuuuucagucgacugaacuggcucacucauuuaaaguuuaaguauccagcacugaaugugaccaugcccaacaacgagcaguucgacaaacuuuacauuuggggaguccaccauccuggcacagauaaugaccagaucuuuuuguaugcccaagcuagcggccguauuacugugucuaccaaggggucccagcagacaguaaucccaaacauaggaucaagacccaggguucggaauauuccuagccgcaucaguauuuacuggaccaucgugaaaccaggugauauccugcuaauuaacucuacgggcaaucucauagccccgagaggguacuucaagaucagguccggaaaaagcucgauuaugcggucugacgcgcccaucggcaaguguaacuccgaaugcauaacuccuaaugguucaauuccaaacgacaagcccuuucagaaugucaaccgcaucacauauggggcauguccucgauacgugaaacaaaauacccugaagcuggccacuggaaugagaaacgugccagagaaacagacaaggggcaucuucggcgcuauugccggguuuaucgaaaauggaugggaggguauggucgauggcugguauggguuccggcaccagaacagugagggacguggccaagcagcugaccuuaagagcacccaggccgcgauugaucagauaaaugguaaauugaaccgccucaucgggaagacgaacgaaaaauuccaccagauugagaaggaauuuuccgagguugaaggcagaauccaagaccuggagaaguacguggaggauaccaaaaucgacuuauggucuuauaaugccgaacugcucguagcacuugagaaccagcauacaauugaucugacugacagcgaaaugaauaaguuguucgagaaaaccaagaaacagcuaagggaaaacgcugaggauaugggaaauggcugcuuuaagauauaccacaagugugacaacgccugcaucgggucaauucggaauggaacauaugaucaugacguguaccgagacgaggcucugaacaaucgcuuccagaucaaaggugucgaacucaagaguggcuacaaagauuggauucuguggaucuccuuugccauaagcugcuuccuucuguguguggcauugcucggguuuaucaugugggccugccaaaagggaaacauuagauguaauaucugcauuuga

SEQ ID NO: 133426 - RNA, 1701 nt, Artificial Sequence; identical to SEQ ID NO: 133399
  derived and/or modified CDS sequence (opt3) from hemagglutinin__InfluenzaA__ADK98733

SEQ ID NO: 133427 - RNA, 1701 nt, Artificial Sequence; identical to SEQ ID NO: 130482
  derived and/or modified CDS sequence (opt3) from hemagglutinin__InfluenzaA__ADK98744

SEQ ID NO: 133428 - RNA, 1701 nt, Artificial Sequence; identical to SEQ ID NO: 130482
  derived and/or modified CDS sequence (opt3) from hemagglutinin__InfluenzaA__ADK98777

SEQ ID NO: 133429 - RNA, 1701 nt, Artificial Sequence; identical to SEQ ID NO: 130482
  derived and/or modified CDS sequence (opt3) from hemagglutinin__InfluenzaA__ADK98788

SEQ ID NO: 133430 - RNA, 1701 nt, Artificial Sequence; identical to SEQ ID NO: 131661
  derived and/or modified CDS sequence (opt3) from hemagglutinin__InfluenzaA__ADK98799

SEQ ID NO: 133431 - RNA, 1701 nt, Artificial Sequence
  derived and/or modified CDS sequence (opt3) from hemagglutinin__InfluenzaA__ADK98810
augaagaccaucauugcccugagcuacauacucugccuuguguucgcucagaaacugcccggcaacgacaauuccacagcaacuuuguguuuagggcaccaugccgucccuaacggaacgaucguuaagaccauuacaaaugaucaaaucgaggugacuaacgcgaccgaacugguacagucuucaaguacaggugagauuugcgacagcccacaccagauccuagauggcgaaaauuguacccucauagacgcucugcuuggggauccgcagugcgacggauuucaaaacaaaaagugggaucuguucguggagagauccaaagccuauucuaauuguuaccccuaugacgucccugauuacgcaucguugaggucacucguggccagcaguggcacucuggaauuuaacaaugaguccuucaacuggacagguguuacccagaaugggacgucuagcgcuugcauccggcgcuccaacaauucauuuuucagucgacugaacuggcucacucauuuaaaguuuaaguauccagcacugaaugugaccaugcccaacaacgagcaguucgacaaacuuuacauuuggggaguccaccauccuggcacagauaaugaccagaccuuuuuguaugcccaagcuagcggccguaucacugugucuacaaagagaucccagcagaccguaauuccaaacaucgggucaaggccccggguucgcaauauaccuagcagaauuaguaucuacuggacgauugugaaaccaggagauauccugcuaaucaacucuacugguaaucucauugccccgaggggcuacuucaagauacgguccgggaaaagcucgaucaugcgcucugacgcgcccauuggaaaguguaacuccgaaugcaucacaccuaauggcucaauaccaaacgacaagcccuuucagaaugucaaccgaauuaccuauggugcauguccuagauacgugaaacaaaauacucugaagcuggccacagggaugaggaacgugccagagaaacagacccggggaaucuucggcgcuaucgccggcuuuauugaaaaugggugggagggaauggucgaugguugguauggcuuccgucaccagaacagugaggggcgcggacaagcagcugaccuuaagagcacgcaggccgcgaucgaucagauuaauggcaaauugaacagacucauagguaagaccaacgaaaaauuccaccagaucgagaaggaauuuuccgagguugaagggaggauucaagaccuggagaaguacguggaggauacaaaaaucgacuuauggucuuauaaugccgaacugcucguagcacuugagaaccagcauacuaucgaucugaccgacagcgaaaugaauaaguuguucgagaaaacaaagaaacagcuacgggaaaacgcugaggauaugggcaauggaugcuuuaagauuuaccacaagugugacaacgccugcauaggcucaauccgaaaugggacuuaugaucauaacguguaccgcgacgaggcucugaauaacagauuccagauuaaagaagucgagcucaagaguggauacaaagacuggauccuguggauuuccuuugccaucagcugcuuccuucuguguguggcauugcucgguuuuauaaugugggccugccaaaagggcaauaucagguguaacauuugcaucuga

SEQ ID NO: 133432 - RNA, 1701 nt, Artificial Sequence
  derived and/or modified CDS sequence (opt3) from hemagglutinin__InfluenzaA__ADK98821
augaagaccaucauugcccugagcuacauacucugccuuguguucgcucagaaacugcccggcaacgacaauuccacagcaacuuuguguuuagggcaccaugccgucccuaacggaacgaucguuaagaccauuacaaaugaucaaaucgaggugacuaacgcgaccgaacugguacagucuucaaguacaggugagauuugcgacagcccacaccagauccuagauggcaaaaauuguacccucauagacgcucugcuuggggauccgcagugcgacggauuucaaaacaagaaaugggaucuguucguggaaagauccaaggccuauucuaauuguuaccccuaugacgucccugauuacgcaucguugaggucacucguggccagcaguggcacucuggaguuuaacaaugaauccuucaacuggacagguguuacccagaaugggacgucuagcgcuugcauccggcgcuccaagaacucauuuuucagucgacugaauuggcucacucauuuaaacuuuaaauauccagcacugaaugugaccaugcccaacaacgagcaguucgacaagcuguacauuuggggaguccaccauccuggcacagauaaagaccagaucuuuuuguaugcccaagcuagcggccguauuacugugucuaccaagagaucccagcagacagccaucccaaauauagggucaaggccccggguacgcaacauuccuagcagaaucaguauuuacuggaccaucguuaaaccaggagauauccugcuaauuaauucuacggguaaccucauagcgccgaggggcuacuucaagauccgguccggaaagagcucgauuaugcgcucugacgcacccaucgggaaauguaauuccgagugcauaacuccuaacggcucaauuccaaaugacaagcccuuucagaacgugaaucgaaucacauauggugccuguccuagauacgucaaacaaaacacccugaaacuugcuacugggaugaggaaugugccagaaaaacagacacggggaaucuucggcgccauugcaggcuuuaucgagaacgggugggaaggaaugguggaugguugguauggcuuccgucaccagaauagugaggggcgcggacaagcugccgaccuuaagagcacccaggcggccauugaucagauaaacggcaaauugaauagacucaucgguaagacgaacgagaaguuccaccagauugaaaaagaguuuuccgaagucgaggggaggauccaagaccuggaaaaguacguugaggauaccaaaaucgacuuauggucuuauaacgcagagcugcucguggcucuugaaaaucagcauacaauugaucugacugacagcgagaugaacaaguuguucgaaaagacccggaagcagcuacgagagaaugccgaagauaugggcaacggaugcuuuaagauauaccacaaaugugacaaugcuugcaucggcucaauucgcaacgggacauaugaucaugacguauacagagacgaggcccugaauaacagguuccagaucaagggaguggagcucaaaagugguuacaaggauuggauucuguggaucuccuuugcaauaagcugcuuccuucugugugucgccuugcucggcuuuaucaugugggcuugccaaaaagggaauauucgguguaacaucugcauuuga

SEQ ID NO: 133433 - RNA, 1701 nt, Artificial Sequence; identical to SEQ ID NO: 130482
  derived and/or modified CDS sequence (opt3) from hemagglutinin__InfluenzaA__ADK98832

SEQ ID NO: 133434 - RNA, 1701 nt, Artificial Sequence; identical to SEQ ID NO: 133412
  derived and/or modified CDS sequence (opt3) from hemagglutinin__InfluenzaA__ADK98843

SEQ ID NO: 133435 - RNA, 1701 nt, Artificial Sequence
  derived and/or modified CDS sequence (opt3) from hemagglutinin__InfluenzaA__ADK98854
augaagaccaucauugcccugagcuacauacucugccuuguguucacacagaaacugcccggcaacgacaauuccacugcuacguuguguuuagggcaccaugcagucccuaacggaaccaucguuaagacaauuacuaaugaucaaaucgaggugaccaacgccacagaacugguacagucuucaaguaccggugagauuugcgacagcccacaccagauccuagauggcgaaaauuguacucucauagacgcgcugcuuggggauccgcagugcgacggauuucaaaacaaaaagugggaucuguucguggagagauccaaggcuuauucuaauuguuaccccuaugacgucccugauuacgccucguugaggucacucguggcaagcaguggcacacuggaauuuaacaaugaguccuucaacuggaccgguguuacgcagaaugggacuucuagcgccugcauccggcgcuccaacaauucauuuuucagucgacugaacuggcucacccauuuaaaauuuaaguauccagcucugaaugugacaaugcccaacaacgagcaguucgacaaacuuuacauuuggggaguccaccauccuggcacugauaaugaccagaucuuuuuguaugcacaagccagcggccguauuaccgugucuacaaagagaucccagcagaccguaaucccaaacauagggucaaggccccggguucgcaauauuccuagcagaaucaguauuuacuggacgaucgugaaaccaggagauauccugcuaauuaacucuacugguaaucucauagcuccgaggggcuacuucaagauccgguccgggaaaagcucgauuaugcgcucugacgcccccaucggaaaguguaacuccgaaugcauaacaccuaauggcucaauuccaaacgacaagcccuuucagaaugucaaccgaaucaccuauggugcguguccuagauacgugaaacaaaauacucugaagcuggcaacagggaugaggaacgugccagagaaacagacccggggaaucuucggcgccauugcuggcuuuaucgaaaaugggugggagggaauggucgaugguugguauggcuuccgucaccagaacagugaggggcgcggacaagccgcagaccuuaagagcacgcaggcugccauugaucagauaaauggcaaauugaacagacucaucgguaagaccaacgaaaaauuccaccagauugagaaggaauuuuccgagguugaagggaggauccaagaccuggagaaguacguggaggauacaaaaaucgacuuauggucuuauaaugcggaacugcucguagcccuugagaaccagcauacuauugaucugaccgacagcgaaaugaauaaguuguucgagaaaacaaagaaacagcuacgggaaaacgcagaggauaugggcaauggaugcuuuaagauauaccacaagugugacaacgcuugcaucggcucaauucgaaaugggacuuaugaucaugacguguaccgcgacgaggcccugaacaauagauuccagaucaaaggagucgaacucaagcccgguuacaaagauuggauucuguggaucaguuuugcuauauccugcuuccuucuguguguggccuugcucggcuuuaucaugugggcaugccaaaaggggaacauuagguguaauaucugcauuuga

SEQ ID NO: 133436 - RNA, 1701 nt, Artificial Sequence
  derived and/or modified CDS sequence (opt3) from hemagglutinin__InfluenzaA__ADK98865
augaagaccaucauugcccugagcuacauacucugccuuguguucgcucagaaacugcccggcuccgacaacucuacagcaacuuuguguuuagggcaccaugccgucccuaauggaacgaucguuaagaccauuacaaacgaucaaaucgaggugacuaaugcgaccgaacugguacagucaaguagcacaggugagauuugcgacuccccacaccagauccuagauggcgaaaacuguacccucauagacgcucugcuuggggauccgcagugcgacgauuuucaaaauaaaaagugggaccuguucguggagagaucuaaagccuauucgaacuguuaccccuaugaugucccugacuacgcaucauugaggagccucguggccaguuccggaacucuggaauuuaauaacgagucuuucaauuggacaggcguuacccagaacgguacgagcuccgcuugcauccggcgcucaaguaauagcuuuuucucucgacugaacuggcucacucauuuacguuuuaaguauccagcacugaaugugaccaugcccaacaaugagcaguucgauaaacuuuacauuuggggaguccaccauccugggacagacaacgaucagaucuuuuuguaugcccaggcuuccggcagaauuacugugucaaccaagaggagccaacagacaguaaucccaaacauaggcagucggccccgcguuagaaauauuccuucuaggaucuccauuuacuggaccaucgugaagccaggggacauccugcuaauuaacagcacgggaaaucucauagccccgcgggguuacuucaaaauccgcucgggcaagucuuccauuaugcgaucagacgcgcccaucgggaaauguaacagugaaugcauaacuccuaauggaagcauuccaaacgauaagcccuuucagaaugucaacagaaucacauauggcgcauguccuagguacgugaagcaaaauacccugaaacuugccacugguaugcggaacgugccagagaagcagacacgugggaucuucggagcuauugccggcuuuaucgaaaauggcugggaggggauggucgacggaugguaugguuuccgccaccagaacuccgagggcagagggcaagcagcugaucugaaaucuacccaggccgcgauugaccagauaaauggaaaguugaacaggcucaucggcaaaacgaaugaaaaguuccaccagauugagaaagaauuuagcgagguugaaggucggauccaagaucuggagaaguacguggaggacaccaagaucgauuuauggucauauaacgccgaacugcucguagcacuugagaaccagcauacaauugaccugacugauagugaaaugaauaaauuguucgagaagaccaaaaagcagcuacgagaaaacgcugaggacauggggaauggcugcuuuaaaauauaccacaagugugauaacgccugcaucggauccauucgcaauggcacauaugaccaugacguguacagagaugaggcucugaacaauagguuccagaucaagggggucgaacucaaaagcggauacaaggacuggauucuguggaucucuuuugccauaucaugcuuccuucuguguguggcauugcucgguuuuaucaugugggccugccaaaaaggcaacauucgguguaauaucugcauuuga

SEQ ID NO: 133437 - RNA, 1701 nt, Artificial Sequence
  derived and/or modified CDS sequence (opt3) from hemagglutinin__InfluenzaA__ADK98876
augaagaccaucauugcccugagcuacauacucugccuuguguucgcucagaaacugcccggcaacgacaauuccacagcaacuuuguguuuagggcaccaugccgucccuaacggaacgaucguuaagaccauuacaaaugaucaaaucgaggugacuaacgcgaccgaacugguacaaaauucuucaacaggugagauuugcgacaguccacaccagauccuagauggcaaaaacuguacccucauagacgcucugcuuggggauccgcagugcgacggauuucagaauaagaaaugggaucuguucguggaaagaagcaaggccuauuccaacuguuaccccuaugacgucccugauuacgcaucuuugaggucgcucguggccucaagcggcacucuggaguuuaauaacgaaaguuucaauuggacagguguuacccagaacgggacguccucugcuugcauccggcgcagcaaaaauuccuuuuucucacgacugaacuggcucacucauuuaaauuuuaaguauccagcacugaacgugaccaugcccaacaauggacaguucgacaaacuuuacauuuggggcguccaccauccuggcacagauaaggaccagaucuuuuuguaugcccaagcuagugggcguauuacugugagcaccaagagaucucagcagacaguaaucccaaacauaggauccaggccccggguucgcaauauuccuucaagaaucagcauuuacuggaccaucgugaaaccaggugauauccugcuaauuaacaguacgggcaaucucauagccccgaggggguacuucaagauccggucuggaaaguccagcauuaugcgcucggacgcgcccaucggcaaauguaacucugagugcauaacuccuaaugguuccauuccaaacgacaagcccuuucagaaugucaaccgaaucacauauggggcauguccuagauacgugaaacaaaauacccugaaacuugccacuggaaugaggaacgugccagagaagcagacacggggcaucuucggcgcuauugccggguuuaucgaaaauggaugggaggguauggucgauggcugguauggguuccgucaccagaacucagaaggacgcggccaagcagcugaccugaagaguacccaggccgcgauugaucagauaaaugguaaauugaacagacucaucgggaagacgaacgagaaguuccaccagauugagaaagaauuuagcgagguugaaggcaggauccaagaccuggagaaguacguggaagauaccaaaaucgacuuaugguccuauaaugccgagcugcucguagcacuugagaaccagcauacaauugaucugacugacucugaaaugaauaaguuguucgagaaaaccaagaagcagcuacgggaaaacgcugaggauaugggaaauggcugcuuuaaaauauaccacaagugugacaacgccugcaucgggagcauucgaaauggaacauaugaucaugacguguaccgcgacgaagcucugaacaauagauuccagaucaaaggugucgagcucaagucaggcuacaaagauuggauucuguggaucaguuuugccauauccugcuuccuucuguguguggcauugcucggguuuaucaugugggccugccaaaagggaaacauuagguguaauaucugcauuuga

SEQ ID NO: 133438 - RNA, 1701 nt, Artificial Sequence; identical to SEQ ID NO: 133412
  derived and/or modified CDS sequence (opt3) from hemagglutinin__InfluenzaA__ADK98887

SEQ ID NO: 133439 - RNA, 1701 nt, Artificial Sequence; identical to SEQ ID NO: 130482
  derived and/or modified CDS sequence (opt3) from hemagglutinin__InfluenzaA__ADK98898

SEQ ID NO: 133440 - RNA, 1701 nt, Artificial Sequence
  derived and/or modified CDS sequence (opt3) from hemagglutinin__InfluenzaA__ADK98909
augaagaccaucauugcccugagcuacauacucugccuuguguucgcucagaaacugcccggcaacgacaauuccacagcaacuuuguguuuagggcaccaugccgucccuaacggaacgaucguuaagaccauuacaaaugaucaaaucgaggugacuaacgcgaccgaacugguacagauuucuucaacaggugagaucugcgacaguccacaccagauacuagauggcgaaaauuguacccucaucgacgcucugcuuggggauccgcagugcgacggauuucaaaacaaaaagugggaucuguucguggagagaagcaaagccuauuccaauuguuaccccuaugacgucccugauuacgcaucuuugaggucgcucguggccucaagcggcacucuggaauuuaacaaugagaguuucaacuggacagguguuacccagaaugggacguccucugcuugcauucggcgcagcaacaauuccuuuuucucacgacugaacuggcucacucauuuaaaguuuaaguauccagcacugaaugugaccaugcccaacaacgagcaguucgacaaacuuuacaucuggggaguccaccauccuggcacagauaaugaccagauuuuucuuuaugcccaagcuaguggccguaucacugugagcaccaagagaucucagcagacaguaauaccaaacauuggguccaggccccggguucgcaauaucccuucaagaauuagcaucuacuggaccaucgugaaaccaggagauauucugcuaauaaacaguacggguaaucucaucgccccgaggggcuacuucaagauucggucugggaaauccagcaucaugcgcucggacgcgcccauaggaaaguguaacucugaaugcauuacuccuaauggcuccaucccaaacgacaagcccuuucagaaugucaaccgaaucacauauggugcauguccuagauacgugaaacaaaauacccugaaguuggccacugggaugaggaacgugccagagaaacagacacggggaauuuucggcgcuaucgccggcuuuauugaaaaugggugggagggaauggucgaugguugguauggcuuccgucaccagaacucagaggggcgcggacaagcagcugaccugaagaguacccaggccgcgauagaucagaucaauggcaaauugaacagacucauugguaagacgaacgaaaaauuccaccagaucgagaaggaauuuagcgagguugaagggaggauccaagaccuggagaaguacguggaggauaccaaaauugacuuaugguccuauaaugccgaacugcucguagcacuugagaaccagcauacaauagaucugacugacucugaaaugaauaaguuguucgagaaaaccaagaaacagcuacgggaaaacgcugaggauaugggcaauggaugcuuuaagaucuaccacaagugugacaacgccugcauuggcagcauccgaaaugggacauaugaucaugacguguaccgcgacgaggcucugaacaauagauuccagauuaaaggagucgaacucaagucagguuacaaagauuggauccuguggauaaguuuugccaucuccugcuuccuucuguguguggcauugcucggcuuuauuaugugggccugccaaaaggggaacaucagguguaauauuugcaucuga

SEQ ID NO: 133441 - RNA, 1701 nt, Artificial Sequence
  derived and/or modified CDS sequence (opt3) from hemagglutinin__InfluenzaA__ADK98920
augaagaccaucauugcccugagcuacauacucugccuuguguucgcucagaaacugcccggcaacgacaauuccacagcaacuuuguguuuagggcaccaugccgucccuaacggaacgaucguuaagaccauuacaaaugaucaaaucgaggugacuaacgcgaccgaacugguacagucuucaaguacaggugagauuugcgacagcccacaccagauccuagauggcaaaaauuguacccucauagacgcucugcuuggggauccgcagugcgacggauuucaaaacaagaaaugggaucuguucguggaaagaggcaaggccuauuccaauuguuaccccuaugacgucccugauuacgcaucuuugaggucgcucguggccucaagcgguacucuggaguuuaacaaugaaaguuucaacuggacagggguuacccagaauggaacguccucugcuugcauccggcgcagcaagaacuccuuuuucucacgacugaauuggcucacucauuuaaacuuuaaauauccagcacugaaugugaccaugcccaacaacgagcaguucgacaagcuguacauuuggggcguccaccauccuggcacagauaaagaccagaucuuuuuguaugcccaagcuagugggcguauuacugugagcaccaagagaucucagcagacaguaaucccaaauauaggauccaggccccggguucgcaacauuccuucaagaaucagcauuuacuggaccaucgugaaaccaggugauauccugcuaauuaauaguacgggcaaccucauagccccgaggggguacuucaagauccggucuggaaaguccagcauuaugcgcucggacgcgcccaucggcaaauguaauucugagugcauaacuccuaacgguuccauuccaaaugacaagcccuuucagaacgucaaucgaaucacauauggggcauguccuagauacgugaaacaaucaacccugaaacuugccacuggaaugaggaacgugccagaaaaacagacacggggcaucuucggcgcuauugccggguuuaucgagaauggaugggaagguauggucgauggcugguauggguuccgucaccagaacagugagggacgcggccaagcagcugaccuuaagagcacccaggccgcgauugaucagauaaaugguaaauugaacagacucaucgggaagacgaaugagaaguuccaccagauugaaaaagaguuuuccgaaguugagggcaggauccaagaccuggaaaaguacguggaggauaccaaaaucgacuuauggucuuauaacgccgagcugcucguagcacuugaaaaccagcauacaauugaucugacugacagcgagaugaauaaguuguucgaaaagaccaagaagcagcuacgggagaacgcugaagauaugggaaauggcugcuuuaaaauauaccacaagugugacaacgccugcaucgggucaauucgaaauggaacauaugaucaugacguguaccgcgacgaggcucugaacaauagauuccagaucaaaggugucgagcucaagaguggcuacaaagauuggauucuguggaucuccuuugccauaagcugcuuccuucuguguguggcauugcucggguuuaucaugugggccugccaaaagggaaacauuagguguaauaucugcauuuga

SEQ ID NO: 133442 - RNA, 1701 nt, Artificial Sequence; identical to SEQ ID NO: 130482
  derived and/or modified CDS sequence (opt3) from hemagglutinin__InfluenzaA__ADK98931

SEQ ID NO: 133443 - RNA, 1701 nt, Artificial Sequence
  derived and/or modified CDS sequence (opt3) from hemagglutinin__InfluenzaA__ADK98942
augaagaccaucauugcccugagcuacauacucugccuuguguucgcucagaaacugcccggcaacgacaauuccacagcaacuuuguguuuagggcaccaugccgucccuaacggaacgaucguuaagaccauuacaaaugaucaaaucgaggugacuaacgcgaccgaacugguacagucuucaaguacaggugagauuugcgacagcccacaccagauccuagauggcgaaaauuguacccucauagacgcucugcuuggggauccgcagugcgacggauuucaaaacaaaaagugggaucuguucguggagagauccaaagccuauucuaauuguuaccccuaugacgucccugauuacgcaucguugaggucacucguggccagcaguggcacucuggaauuuaacaaugaguccuucaacuggacagguguuacccagaaugggacgucuagcgcuugcauccggcgcuccaacaauucauuuuucagucgacugaacuggcucacucauuuaaaguuuaaguauccagcacugaaugugaccaugcccaacaacgagcaguucgacaaacuuuacauuuggggaguccaccauccuggcacagauaaugaccagaucuuuuuguaugcccaagcuagcggccguauuacugugucuaccaagagaucccagcagacaguaaucucaaacauagggagcaggccacggguucgcaauauucccaguagaaucucuauuuacuggaccaucgugaaaccuggagauauccugcuaauuaacuccacggguaaucucauagccccaaggggcuacuucaagauccggagcgggaaaucgucuauuaugcgcuccgacgcgccgaucggaaaguguaacucagaaugcauaacucccaauggcaguauuccuaacgacaagccauuucagaaugucaaccgaaucacauauggugcaugucccagauacgugaaacaaaauacccugaaacuugccacugggaugaggaacgugccugagaagcagacacggggaaucuucggcgcuauugccggcuuuaucgaaaaugggugggagggaauggucgaugguugguauggcuuccgucaccagaacagcgaggggcgcggacaagcagcugaccugaaguccacccaggccgcgauugaucagauaaauggcaaauugaacagacucaucgguaagacgaacgaaaaauuccaccagauugagaaggaauuuucugagguugaagggaggauccaagaccuggagaaguacguggaggauaccaaaaucgacuuauggagcuauaaugccgaacugcucguagcacuugagaaccagcauacaauugaucugacugacucagaaaugaauaaguuguucgagaaaaccaagaaacagcuacgggaaaacgcugaggauaugggcaauggaugcuuuaagauauaccacaagugugacaacgccugcaucggcaguauucgaaaugggacauaugaucauaacguguaccgcgacgaggcucugaauaacagauuccagaucaaaggagucgaacucaaguccgguuacaaagacuggauucuguggaucagcuuugccauaucuugcuuccuucuguguguggcauugcucggcuuuaucaugugggccugccaaaaggggaauauuagguguaacaucugcauuuga

SEQ ID NO: 133444 - RNA, 1701 nt, Artificial Sequence
  derived and/or modified CDS sequence (opt3) from hemagglutinin__InfluenzaA__ADK98953
augaagaccaucauugcccugagcuacaugcucugccuuguguucgcucagaaacugcccggcaacgacaauuccacagcaacuuuguguuuagggcaccaugccgucccuaacggaacgauaguuaagaccaucacaaaugaucaaauugaggugacuaacgcgaccgaacugguacagucuucaaguacaggugagaucugcgacagcccacaccagauucuagauggcgaaaauuguacccucaucgacgcucugcuuggggauccgcagugcgacggauuucaaaacaaaaagugggaucuguucguggagagauccaaagccuauucuaauuguuaccccuaugacgucccugauuacgcaucguugaggucacucauagccagcaguggcacucuggaauuuaacaaugaguccuucaacuggacaggugugacccagaaugggacgucuagcgcuugcauccggcgcuccaacaauucauuuuucagucgacugaacuggcucacucauuuaaaguuuaaguauccagcacugaauguuaccaugcccaacaacgagcaguucgacaaacuuuacauuuggggagugcaccauccuggcacagauaaugaccagaucuuuuuguaugcccaagcuagcggccguauuacugucucuaccaagagaucccagcagacagugaucccaaacauagggucaaggccccggguacgcaauauuccuagcagaaucaguauuuacuggaccaucguuaaaccaggagauauccugcuaauuaacucuacggguaaucucauagccccgaggggcuacuucaagauccgguccgggaaaagcucgauuaugcgcucugacgcgcccaucggaaaguguaacuccgaaugcauaacuccuaauggcucaauuccaaacgacaagcccuuucagaaugugaaccgaaucacauauggugcauguccuagauacgucaaacaaaauacccugaagcuggccacugggaugaggaacgugccagagaaacagacacggggaaucuucggcgcuauugccggcuuuaucgaaaaugggugggagggaaugguggaugguugguauggcuuccgucaccagaacagugaggggcgcggacaagcagcugaccuuaagagcacccaggccgcgauugaucagauaaauggcaaauugaacagacucaucgguaagacgaacgaaaaauuccaccagauugagaaggaauuuuccgaggucgaagggaggauccaagaccuggagaaguacguugaggauaccaaaaucgacuuauggucuuauaaugccgaacugcucguggcacuugagaaccagcauacaauugaucugacugacagcgaaaugaauaaguuguucgagaaaaccaagaaacagcuacgggaaaacgcugaggauaugggcaauggaugcuuuaagauauaccacaagugugacaacgccugcaucggcucaauucgaaaugggacauaugaucaugacguauaccgcgacgaggcucugaacaauagauuccagaucaaaggaguggaacucaagagugguuacaaagauuggauucuguggaucuccuuugccauaagcugcuuccuucugugugucgcauugcucggcuuuaucaugugggccugccaaaaggggaacauuagguguaauaucugcauuuga

SEQ ID NO: 133445 - RNA, 1701 nt, Artificial Sequence; identical to SEQ ID NO: 130482
  derived and/or modified CDS sequence (opt3) from hemagglutinin__InfluenzaA__ADK98964

SEQ ID NO: 133446 - RNA, 1701 nt, Artificial Sequence; identical to SEQ ID NO: 133399
  derived and/or modified CDS sequence (opt3) from hemagglutinin__InfluenzaA__ADK98975

SEQ ID NO: 133447 - RNA, 1701 nt, Artificial Sequence; identical to SEQ ID NO: 133444
  derived and/or modified CDS sequence (opt3) from hemagglutinin__InfluenzaA__ADK98986

SEQ ID NO: 133448 - RNA, 1701 nt, Artificial Sequence; identical to SEQ ID NO: 131661
  derived and/or modified CDS sequence (opt3) from hemagglutinin__InfluenzaA__ADK98997

SEQ ID NO: 133449 - RNA, 1701 nt, Artificial Sequence; identical to SEQ ID NO: 133444
  derived and/or modified CDS sequence (opt3) from hemagglutinin__InfluenzaA__ADK99008

SEQ ID NO: 133450 - RNA, 1701 nt, Artificial Sequence
  derived and/or modified CDS sequence (opt3) from hemagglutinin__InfluenzaA__ADK99030
augaagaccaucauugcccugagcuacauacucugccuuguguucgcucagaaacugcccggcaacgacaauuccacagcaacuuuguguuuagggcaccaugccgucccuaacggaacgaucguuaagaccauuacaaaugaucaaaucgaggugacuaacgcgaccgaacugguacagucuucaaguacaggugagauuugcgacagcccacaccagauccuagauggcaaaaauuguacccucauagacgcucugcuuggggauccgcagugcgacggauuucaaaacaagaaaugggaucuguucguggaaagauccaaggccuauucuaauuguuaccccuaugacgucccugauuacgcaucguugaggucacucguggccagcaguggcacucuggaguuuaacaaugaauccuucaacuggacagguguuacccagaaugggacgucuagcgcuugcauccggcgcuccaagaacucauuuuucagucgacugaauuggcucacucauuuaaacuuuaaauauccagcacugaaugugaccaugcccaacaacgagcguuucgacaagcuguacauuuggggaguccaccauccuggcacagauaaagaccagaucuuuuuguaugcccaggcuagcggcagaauuacugugucuaccaagaggucccaacagacaguaaucccaaauauagggucacggccccgcguuagaaacauuccuagcaggaucaguauuuacuggaccaucgugaaaccaggagauauccugcuaauuaauucuacggguaaccucauagccccgcggggcuacuucaagauccgcuccggaaagagcucgauuaugcgaucugacgcgcccaucgggaaauguaauuccgagugcauaacuccuaacggcucaauuccaaaugacaagcccuuucagaacgucaauagaaucacauauggugcauguccuagguacgugaaacagaacacccugaaacuugccacugggaugcggaaugugccagaaaaacaaacacguggaaucuucggcgcuauugccggcuuuaucgagaacgggugggaaggaauggucgaugguugguauggcuuccgccaccagaauagugaggggagaggacaggcagcugaccuuaagagcacccaagccgcgauugaucagauaaacggcaaauugaauaggcucaucgguaagacgaacgagaaguuccaccagauugaaaaagaguuuuccgaaguugaggggcggauccaggaccuggaaaaguacguggaggauaccaaaaucgacuuauggucuuauaacgccgagcugcucguagcacuugaaaaucaacauacaauugaucugacugacagcgagaugaacaaguuguucgaaaagaccaagaagcagcuacgagagaaugcugaagauaugggcaacggaugcuuuaaaauauaccacaagugugacaaugccugcaucggcucaauucgcaacgggacauaugaucaugacguguacagagacgaggcucugaauaacagguuccagaucaaaggagucgagcucaagagugguuacaaagauuggauucuguggaucuccuuugccauaagcugcuuccuucuguguguggcauugcucggcuuuaucaugugggccugccagaaggggaauauucgguguaacaucugcauuuga

SEQ ID NO: 133451 - RNA, 1701 nt, Artificial Sequence
  derived and/or modified CDS sequence (opt3) from hemagglutinin__InfluenzaA__ADK99041
augaagaccaucauugcccugagcuacauacucugccuuguguucgcucagaaacugcccggcaacgacaauuccacagcaacuuuguguuuagggcaccaugccgucccuaacggaacgaucguuaagaccauugcgaaugaucaaaucgaggugacaaacgcuacugaacugguacagucuucaaguaccggugagauuugcgacagcccacaccagauccuagauggcgaaaauuguacacucauagacgcccugcuuggggauccgcagugcgacggauuucaaaacaaaaagugggaucuguucguggagagauccaaagcauauucuaauuguuaccccuaugacgucccugauuacgccucguugaggucacucguggcuagcaguggcacccuggaauuuaacaaugaguccuucaacuggacugguguuacacagaaugggaccucuagcgcaugcauccggcgcuccaacaauucauuuuucagucgacugaacuggcucacgcauuuaaaguuuaaguauccagcccugaaugugacuaugcccaacaacgagcaguucgacaaacuuuacauuuggggaguccaccauccuggcaccgauaaugaccagaucuuuuuguaugcucaagccagcggccguauuacagugucuacuaagagaucccagcagaccguaaucccaaacauagggucaaggccccggguucgcaauauuccuagcagaaucaguauuuacuggacaaucgugaaaccaggagauauccugcuaauuaacucuaccgguaaucucauagcgccgaggggcuacuucaagauccgguccgggaaaagcucgauuaugcgcucugacgcacccaucggaaaguguaacuccgaaugcauaacgccuaauggcucaauuccaaacgacaagcccuuucagaaugucaaccgaaucacuuauggugccuguccuagauacgugaaacaaaauacacugaagcuggcuaccgggaugaggaacgugccagagaaacagacucggggaaucuucggcgccauugcaggcuuuaucgaaaaugggugggagggaauggucgaugguugguauggcuuccgucaccagaacagugaggggcgcggacaagcugccgaccuuaagagcacacaggcggccauugaucagauaaauggcaaauugaacagacucaucgguaagaccaacgaaaaauuccaccagauugagaaggaauuuuccgagguugaagggaggauccaagaccuggagaaguacguggaggauacgaaaaucgacuuauggucuuauaaugcagaacugcucguagcucuugagaaccagcauaccauugaucugacagacagcgaaaugaauaaguuguucgagaaaacuaagaaacagcuacgggaaaacgccgaggauaugggcaauggaugcuuuaagauauaccacaagugugacaacgcuugcaucggcucaauucgaaaugggaccuaugaucaugacguguaccgcgacgaggcccugaacaauagauuccagaucaaaggagucgaacucaagagugguuacaaagauuggauucuguggaucuccuuugcaauaagcugcuuccuucuguguguggccuugcucggcuuuaucaugugggcuugccaaaaggggaacauuagguguaauaucugcauuuga

SEQ ID NO: 133452 - RNA, 1701 nt, Artificial Sequence; identical to SEQ ID NO: 133399
  derived and/or modified CDS sequence (opt3) from hemagglutinin__InfluenzaA__ADK99063

SEQ ID NO: 133453 - RNA, 1701 nt, Artificial Sequence; identical to SEQ ID NO: 130482
  derived and/or modified CDS sequence (opt3) from hemagglutinin__InfluenzaA__ADK99085

SEQ ID NO: 133454 - RNA, 1701 nt, Artificial Sequence; identical to SEQ ID NO: 130482
  derived and/or modified CDS sequence (opt3) from hemagglutinin__InfluenzaA__ADK99096

SEQ ID NO: 133455 - RNA, 1701 nt, Artificial Sequence; identical to SEQ ID NO: 130482
  derived and/or modified CDS sequence (opt3) from hemagglutinin__InfluenzaA__ADK99107

SEQ ID NO: 133456 - RNA, 1701 nt, Artificial Sequence
  derived and/or modified CDS sequence (opt3) from hemagglutinin__InfluenzaA__ADK99118
augaagaccaucauugcccugagcuacauacucugccuuguguucgcucagaaacugcccggcaacgacaauuccacagcaacuuuguguuuagggcaccaugccgucccuaacggaacgaucguuaagaccauuacaaaugaucaaaucgaggugacuaacgcgaccgaacugguacagucuucaaguacaggugagauuugcgacaucccacaccagauacuagauggcaaaaauuguacccucaucgacgcucugcuuggggauccgcagugcgacggauuucaaaacaagaaaugggaucuguucguggaaagaagcaaggccuauuccaauuguuaccccuaugacgucccugauuacgcaucuuugaggucgcucguggccucaagcggcacucuggaguuuaacaaugaaaguuucaacuggacagguguuacccagaaugggacguccucugcuugcauucggcgcagcaagaacuccuuuuucucacgacugaauuggcucacucauuuaaacuuuaaauauccagcacugaaugugaccaugcccaacaacgagcaguucgacaagcuguacaucuggggaguccaccauccuggcacagauaaagaccagaucuuuuuguaugcccaagcuaguggccguauuacugugagcaccaagagaucucagcagacaguaauaccaaauauuggguccaggccccggguucgcaacaucccuucaagaauuagcaucuacuggaccaucgugaaaccaggagauauucugcuaauaaauaguacggguaaccucaucgccccgaggggcuacuucaagauucggucugggaaguccagcaucaugcgcucggacgcgcccauaggaaaauguaauucugagugcauuacuccuaacggcuccaucccaaaugacaagcccuuucagaacgucaaucgaaucacauauggugcauguccuagauacgugaaacaaucaacccugaaacuugccacugggaugaggaacgugccagaaaaacagacacggggaauuuucggcgcuaucgccggcuuuauugagaaugggugggaaggaauggucgaugguugguauggcuuccgucaccagaacagugaggggcgcggacaagcagcugaccuuaagagcacccaggccgcgauagaucagaucaauggcaaauugaacagacucauugguaagacgaaugagaaguuccaccagaucgaaaaagaguuuuccgaaguugaggggaggauccaagaccuggaaaaguacguggaggauaccaaaauugacuuauggucuuauaacgccgagcugcucguagcacuugaaaaccagcauacaauagaucugacugacagcgagaugaauaaguuguucgaaaagaccaagaagcagcuacgggagaacgcugaagauaugggcaauggaugcuuuaaaaucuaccacaaguguaacaaugccugcauuggcucaauccgaaacgggacauaugaccaugauguguaccgcgacgaggcucugaauaacagauuccagauuaaaggagucgagcucaagagugguuacaaagacuggauccuguggauauccuuugccaucagcugcuuccuucuguguguggcauugcucggcuuuauuaugugggccugccaaaaggggaauaucagguguaacauuugcaucuga

SEQ ID NO: 133457 - RNA, 1701 nt, Artificial Sequence
  derived and/or modified CDS sequence (opt3) from hemagglutinin__InfluenzaA__ADK99129
augaagaccaucauugcccugagcuacauacucugccuuguguucgcucagaaacugcccggcaacgacaauuccacagcaacuuuguguuuagggcaccaugccgucccuaacggaacgaucguuaagaccauuacaaaugaucaaaucgaggugacuaacgcgaccgaacugguacagucuucaaguacaggugagauuugcgacagcccacaccagauccuagauggcaaaaauuguacccucauagacgcucugcuuggggauccgcagugcgacggauuucaaaacaagaaaugggaucuguucguggaaagauccaaggccuauucuaauuguuaccccuaugacgucccugauuacgcaucguugaggucacucguggccagcaguggcacucuggaguuuaacaaugaauccuucaacuggacagguguuacccagaaugggacgucuagcgcuugcauccggcgcuccaagaacucauuuuucagucgacugaauuggcucacucauuuaaacuuuaaauauccagcacugaauaugaccaugcccaacaacgagcaguucgacaaacuuuacauuuggggagugcaccauccuggcacagauaaagaccagaucuuuuuguaugcccaagcuagcggccguauuacugucucuaccaagagaucccagcagacagugaucccaaauauagggucaaggccccggguacgcaacauuccuagcagaaucaguauuuacuggaccaucguuaaaccaggagauauccugcuaauuaauucuacggguaaccucauagccccgaggggcuacuucaagauccgguccggaaagagcucgauuaugcgcucugacgcgcccaucgggaaauguaauuccgagugcauaacuccuaacggcucaauuccaaaugacaagcccuuucagaacgugaaucgaaucacauauggugcauguccuagauacgucaaacaaaguacccugaaacuugccacugggaugaggaacgugccagaaaagcagacacggggaaucuucggcgcuauugccggcuuuaucgagaaugggugggaaggaaugguggaugguugguauggcuuccgucaccagaacagcgaggggcgcggacaagcagcugaccugaaguccacccaggccgcgauugaucagauaaauggcaaauugaacagacucaucgguaagacgaaugagaaguuccaccagauugaaaaagaguuuucugaagucgaggggaggauccaagaccuggaaaaguacguugaggauaccaaaaucgacuuauggagcuauaacgccgagcugcucguggcacuugaaaaccagcauacaauugaucugacugacucagagaugaauaaguuguucgaaaagaccaagaagcagcuacgggagaacgcugaagauaugggcaauggaugcuuuaaaauauaccacaaguguaacaaugccugcaucggcaguauucgaaacgggacauaugaccaugauguauaccgcgacgaggcucugaauaacagauuccagaucaaaggaguggagcucaaguccgguuacaaagacuggauucuguggaucagcuuugccauaucuugcuuccuucugugugucgcauugcucggcuuuaucaugugggccugccaaaaggggaauauuagguguaacaucugcauuuga

SEQ ID NO: 133458 - RNA, 1701 nt, Artificial Sequence; identical to SEQ ID NO: 133399
  derived and/or modified CDS sequence (opt3) from hemagglutinin__InfluenzaA__ADK99140

SEQ ID NO: 133459 - RNA, 1701 nt, Artificial Sequence
  derived and/or modified CDS sequence (opt3) from hemagglutinin__InfluenzaA__ADK99151
augaagaccaucauugcccugagcuacauacucugccuuguguucgcucagaaacugcccggcaacgacaauuccacagcaacuuuguguuuagggcaccaugccgucccuaacggaacgaucguuaagaccauuacaaaugaucaaaucgaggugacuaacgcgaccgaacugguacagucuucaaguacaggugagauuugcgacagcccacaccagauccuagauggcaaaaauuguacccucauagacgcucugcuuggggauccgcagugcgacggacugcaaaacaagaaaugggauuuguuuguggaaagauccaaggccuauucuaauuguuaccccuaugacgucccugauuacgcaucgcucaggucacugguggccagcaguggcacucuggaguucaacaaugaauccuuuaacuggacagguguuacccagaaugggacgucuagcgcuugcauccggcgcuccaagaacucauucuuuagucgacucaauugguuaacucaucugaacuucaaauauccagcacuuaaugugaccaugcccaacaacgagcaguuugacaaguuguacauuuggggaguccaccauccuggcacagauaaagaccagaucuuccuguaugcccaagcuagcggccguauuacugugucuaccaagagaucccagcagacagccaucccaaauauagggucaaggccccggguacgcaacauuccuagcagaaucaguauuuacuggaccaucguuaaaccaggagauauccuacucauuaauucuacggguaaccugauagcgccgaggggcuacuuuaagauccgguccggaaagagcucgauuaugcgcucugacgcacccaucgggaaauguaauuccaagugcauaacuccuaacggcucaauuccaaaugacaaacccuuccagaacgugaaucgaaucacauauggugccuguccuagauacgucaagcaaaacacccuuaaacuggcuacugggaugaggaaugugccagagaagcagacacggggaaucuuuggcgccauugcaggcuucaucgaaaacgggugggagggaaugguggaugguugguauggcuuucgucaccagaauagugaagggcgcggacaagcugccgacuugaaaagcacccaggcggccauugaucagauaaacggcaagcucaauagacugaucgguaagacgaacgagaaauuccaccagauugagaaggaguucuccgaagucgaagggaggauccaagacuuagagaaauacguugaagauaccaagaucgaccuguggucuuauaacgcagagcuccuuguggcucuggagaaucagcauacaauugauuugacugacagcgaaaugaacaaacuauuugagaagaccaagaaacagcugcgggaaaaugccgaggauaugggcaacggaugcuucaagauauaccacaaaugugacaaugcuugcaucggcucaauucgaaacgggacauaugaucaugacguauaccgcgacgaagcccucaauaacagauuucagaucaagggaguggagcugaaaagugguuacaaggauuggauucuuuggaucuccuucgcaauaagcugcuuucuguugugugucgcccuccugggcuucaucaugugggcuugccaaaaggggaauauuagguguaacaucugcauuuga

SEQ ID NO: 133460 - RNA, 1701 nt, Artificial Sequence; identical to SEQ ID NO: 133399
  derived and/or modified CDS sequence (opt3) from hemagglutinin__InfluenzaA__ADK99162

SEQ ID NO: 133461 - RNA, 1701 nt, Artificial Sequence
  derived and/or modified CDS sequence (opt3) from hemagglutinin__InfluenzaA__ADK99173
augaagaccaucauugcccugagcuacauacucugccuuguguucgcucagaaacugcccggcaacgacaauuccacagcaacuuuguguuuagggcaccaugccgucccuaacggaacgaucguuaagaccauuacaaaugaucaaaucgaggugacuaacgcgaccgaacugauucagucuucaaguacaggugagaucugcgacagcccacaccagauacuagauggcgaaaauuguacccucaucgacgcucugcuuggggauccgcagugcgacggacugcaaaacaaaaagugggauuuguuuguagagagauccaaagccuauucuaauuguuaccccuaugacgugccugauuacgcaucgcucaggucacuggucgccagcaguggcacucuggaguucaacaaugaauccuuuaacuggacaggugugacccagaaugggacgucuagcgcuugcauucggcgcuccaacaauucauucuuuagucgacucaacugguuaacucaucugaaguucaaguauccagcacuuaauguuaccaugcccaacaacgagcaguuugacaaauuguacaucuggggagugcaccauccuggcacagauaaugaccagauuuuccuguaugcccaagcuagcggccguaucacugucucuaccaagagaucccagcagacagugauaccaaacauugggucaaggccccggguacgcaauaucccuagcagaauuaguaucuacuggaccaucguuaaaccaggagauauucuacucauaaacucuacggguaaucugaucgccccgaggggcuacuuuaagauucgguccgggaaaagcucgaucaugcgcucugacgcgcccauaggaaaguguaacuccgaaugcauuacuccuaauggcucaaucccaaacgacaagcccuuccagaaugugaaccgaaucacauauggugcauguccuagauacgucaaacaaaauacccuuaagcuggccacugggaugaggaacgugccagagaaacagacacggggaauuuuuggcgcuaucgccggcuucauugaaaaugggugggagggaaugguggaugguugguauggcuuucgucaccagaacagugaggggcgcggacaagcagcugaccucaagagcacccaggccgcgauagaucagaucaauggcaaauugaacagacugauugguaagacgaacgaaaaauuccaccagaucgagaaggaguucuccgaagucgaagggaggauccaagacuuagagaaguacguugaggauaccaaaauugaccuguggucuuauaaugccgaacuccuuguggcacuggagaaccagcauacaauagauuugacugacagcgaaaugaauaagcuauuugagaaaaccaagaaacagcugcgggaaaacgcugaggauaugggcaauggaugcuucaagaucuaccacaagugugacaacgccugcauuggcucaauccgaaaugggacauaugaucaugacguauaccgcgacgaggcucucaacaauagauuucagauuaaaggaguggaacugaagagugguuacaaagauuggauccuuuggauauccuucgccaucagcugcuuucuguugugugucgcacuccugggcuucauuaugugggccugccaaaaggggaacaucagguguaauauuugcaucuga

SEQ ID NO: 133462 - RNA, 1701 nt, Artificial Sequence
  derived and/or modified CDS sequence (opt3) from hemagglutinin__InfluenzaA__ADK99184
augaagaccaucauugcccugagcuacauacucugccuuguguccgcucagaaacugcccggcaacgacaauucuacagcaacuuuguguuuagggcaccaugccgucccuaacggaacgaucguuaagaccauuacaaaugaucaaaucgaggugacuaacgcgaccgaacugguacagucaaguagcacaggugagauuugcaauuccccacaccagauccuagacggcgaaaacuguacccucauagaugcucugcuuggggacccgcagugcgauggauuccaaaauaaaaagugggaccuguuuguggagagaucuaaagccuauucgaacuguuaccccuaugaugucccugacuacgcaucauugaggagccucguggccaguuccggcacucuggaguucaauaacgaaucuuuuaauuggacagguguuacccagaacgggacgagcuccgcuugcauccggcgcucaaauaacaguuucuuuagccgacugaauuggcucacucauuuaaaguucaaguauccagcacugaacgugaccaugcccaacaaugagcaguuugauaaacuuuacauuuggggaguccaccauccuggcacagacaacgaucagaucuucuuguaugcccaggcuucuggccguauuacuguguccaccaagagaucacaacagacaguaaucccaaauauagggagcaggccccggguucgcaacauuccuaguagaaucucuauuuacuggaccaucgugaaaccaggagacauccugcuaauuaauuccacggguaaccucauagccccgaggggcuacuuuaagauccggagcgggaaaucgucuauuaugcgcuccgaugcgcccaucggaaaguguaauucagaaugcauaacuccuaacggcaguauuccaaaugacaagcccuuccagaacgucaaucgaaucacauauggugcauguccuagauacgugaaacaaaacacccugaaacuugccacugggaugaggaaugugccagagaagcagacacggggaaucuuuggcgcuauugccggcuucaucgaaaacgggugggagggaauggucgacgguugguauggcuuucgucaccagaauagcgaggggcgcggacaagcagcugaucugaaguccacccaggccgcgauugaccagauaaacggcaaauugaacagacucaucgguaagacgaaugaaaaauuccaccagauugagaaggaguucucugaaguugaagggaggauccaagaucuggagaaguacguggaggacaccaaaaucgauuuauggagcuauaacgccgaacugcucguagcacuugagaaucagcauacaauugaccugacugauucagaaaugaacaaguuguuugagaaaaccaagaaacagcuacgggaaaaugcugaggacaugggcaacggaugcuucaagauauaccacaagugugauaaugccugcaucggcaguauucgaaacgggacauaugaccaugauguguaccgcgacgaggcucugaauaacagauuucagaucaaaggagucgaacucaaguccgguuacaaagacuggauucuguggaucagcuucgccauaucuugcuuucuucuguguguggcauugcucggcuucaucaugugggccugccaaaaggggaauauuagguguaacaucugcauuuga

SEQ ID NO: 133463 - RNA, 1701 nt, Artificial Sequence; identical to SEQ ID NO: 130482
  derived and/or modified CDS sequence (opt3) from hemagglutinin__InfluenzaA__ADK99195

SEQ ID NO: 133464 - RNA, 1701 nt, Artificial Sequence
  derived and/or modified CDS sequence (opt3) from hemagglutinin__InfluenzaA__ADK99206
augaagaccaucauugcccugagcuacauacucugccuuguguucgcucagaaacugcccggcaacgacaauuccacagcaacuuuguguuuagggcaccaugccgucccuaacggaacgguugugaagaccaucacaaaugaucaaauugagguaacuaacgcgaccgaacuggugcagucuucaaguacaggugagaucugcgacagcccacaccagauucuagauggcaaaaauuguacccucaucgacgcucugcuuggggauccgcagugcgacggauuucaaaacaagaaaugggaucuguucgucgaaagauccaaggccuauucuaauuguuaccccuaugacgugccugauuacgcaucguugaggucacucguugccagcaguggcacucuggaguuuaacaaugaauccuucaacuggacaggugugacccagaaugggacgucuagcgcuugcauacggcgcuccaagaacucauuuuucagucgacugaauuggcucacucauuuaaacuuuaaauauccagcacugaaugucaccaugcccaacaacgagcaguucgacaagcuguacaucuggggagugcaccauccuggcacagauaaagaccagauuuuucuuuaugcccaagcuagcggccguaucacuguaucuaccaagagaucccagcagacaguuauuccaaauaucgggucaaggccccgggugcgcaacauaccuagcagagucaguauuuacuggaccaucgugaaaccaggagauauucugcuaaucaauucuacggguaaccucaucgccccgaggggcuacuucaagauucgguccgggaaaagcucgauaaugcgcucugacgcgcccaucggaaaauguaauuccgagugcauuacuccuaacggcucaaucccaaaugacaagcccuuucagaacgugaaucgaauaacauauggugcauguccuagauacgucaaacaaaacacccugaaguuggccacugggaugaggaauguuccagaaaaacagacacggggaauuuucggcgcuaucgccggcuuuaucgagaacgggugggaaggaaugguggaugguugguauggcuuccgucaccagaauagugaggggcgcggacaagcagcugaccuuaagagcacccaggccgcgauugaucagaucaacggcaaauugaauagacucauugguaagacgaacgagaaguuccaccagauagaaaaagaguuuuccgaaguagaggggaggauccaagaccuggaaaaguacguggaggauaccaaaauugacuuauggucuuauaacgccgagcugcucgucagccuugaaaaucagcauacaaucgaucugacugacucagagaugaacaaguuguucgaaaagaccaagaagcagcuacgggagaaugcagaagauaugggcaacggaugcuuuaaaaucuaccacaagugugacaaugcuugcauuggcaguauacgaaacgggacauaugaucaugacguguaccgcgacgaggcccugaauaacagauuccagaucaaaggaguugagcucaaguccgguuacaaagauuggauucuguggaucagcuuugcuauuucuugcuuccuucuguguguggccuugcucggcuuuaucaugugggcaugccaaaaggggaauauaagguguaacaucugcauuuga

SEQ ID NO: 133465 - RNA, 1701 nt, Artificial Sequence; identical to SEQ ID NO: 133399
  derived and/or modified CDS sequence (opt3) from hemagglutinin__InfluenzaA__ADK99217

SEQ ID NO: 133466 - RNA, 1701 nt, Artificial Sequence; identical to SEQ ID NO: 133399
  derived and/or modified CDS sequence (opt3) from hemagglutinin__InfluenzaA__ADK99228

SEQ ID NO: 133467 - RNA, 1701 nt, Artificial Sequence
  derived and/or modified CDS sequence (opt3) from hemagglutinin__InfluenzaA__ADK99239
augaagaccaucauugcccugagcuacauacucugccuuguguucgcucagaaacugcccggcaacgacaauuccacagcaacuuuguguuuagggcaccaugccgucccuaacggaacgaucguuaagaccauuacaaaugaucaaaucgaggugacuaacgcgaccgaacugguacagucuucaaguacaggugagauuugcgacagcccacaccagauccuagauggcaaaaauuguacccucauagacgcucugcuuggggauccgcagugcgacggauuucaaaacaagaaaugggaucuguucguggaaagauccaaggccuauucuaauuguuaccccuaugacgucccugauuacgcaucguugaggucacucguggccagcaguggcacucuggaguuuaacaaugaauccuucaacuggacagguguuacccagaaugggacgucuagcgcuugcauccggcgcuccaagaacucauuuuucagucgacugaauuggcucacucauuuaaacuuuaaauauccagcacugaaugugaccaugcccaacaacgagcaguucgacaagcuguacauuuggggaguccaccauccuggcacagauaaagaccagaucuuuuuguaugcccaagcuagcggccguauuacugugucuaccaagagaucccagcagacaguaaucccaaauauagggucaaggccccggguucgcaacauuccuagcagaaucaguauuuacuggaccaucgugaaaccaggagauauccugcuaauuaauucuacggguaaccucauagccccgaggggcuacuucaagauccgguccggaaagagcucgauuaugcgcucugacgcgcccaucgggaaauguaauuccgagugcauaacuccuaacggcucaauuccaaaugacaagcccuuucagaacgucaaucgaaucacauauggugcauguccuagauacgugaaacaaaacacccugaaacuugccacugggaugaggaaugugccagaaaaacagacacggggaaucuucggcgcuauugccggcuuuaucgagaacgggugggaaggaauggucgaugguugguauggcuuccgucaccagaauagugaggggcgcggacaagcagcugaccuuaagagcacccaggccgcgauugaucagauaaacggcaaauugaauagacucaucgguaagacgaacgagaaguuccaccagauugaaaaagaguuuuccgaaguugaggggaggauccaagaccuggaaaaguacguggaggauaccaaaaucgacuuauggucuuauaacgccgagcugcucguagcacuugaaaaucagcauacaauugaucugacugacagcgagaugaacaaguuguucgaaaagaccaagaagcagcuacgggagaaugcugaagauaugggcaacggaugcuuuaaaauauaccacaagugugacaaugccugcaucggcucaauucgaaacgggacauaugaucaugacguguaccgcgacgaggcucugaauaacagauuccagaucaaaggagucgagcucaagagugguuacaaagauuggauucuguggaucuccuuugccauaagcugcuuccuucuguguguggcauugcucggcuuuaucaugugggccugccaaaaggggaauauuagguguaacaucugcauuuga

SEQ ID NO: 133468 - RNA, 1701 nt, Artificial Sequence
  derived and/or modified CDS sequence (opt3) from hemagglutinin__InfluenzaA__ADK99250
augaagaccaucauugcccugagcuacauacucugccuuguguucgcucagaaacugcccggcaacgacaauuccacagcaacuuuguguuuagggcaccaugccgucccuaacggaacgaucguuaagaccauuacaaaugaucaaaucgaggugacuaacgcgaccgaacugguacagucuucaaguacaggugagauuugcgacagcccacaccagauccuagauggcgaaaauuguacccucauagacgcucugcuuggggauccgcagugcgacggauuucaaaacaaaaagugggaucuguucguggagagauccaaagccuauucuaauuguuaccccuaugacgucccugauuacgcaucguugaggucacucguggccagcaguggcacucuggaauuuaacaaugaguccuucaacuggacagguguuacccagaaugggacgucuagcgcuugcauccggcgcuccaacaauucauuuuucagucgacugaacuggcucacucauuuaaaguuuaaguauccagcacugaaugugaccaugcccaacaacgagcaguucgacaaacuuuacauuuggggaguccaccauccuggcacagauaaugaccagaucuuuuuguaugcccaagcuagcggccguauuacugugucuaccaagagaucccagcagacaguaaucccaaacauagggucaaggccccggguucgcaauauuccuagcagaaucaguauuuacuggaccaucgugaaaccaggagauauccugcuaauuaacucuacggguaaucucauagccccgaggggcuacuucaagauccgguccgggaaaagcucgauuaugcgcucugacgcgcccaucggaaaguguaacuccgaaugcauaacuccuaauggcucaauuccaaacgacaagcccuuucagaaugucaaccgaaucacauauggugcauguccuagauacgugaaacaaaauacccugaagcuggccacugggaugaggaacgugccagagaaacagacacggggaaucuucggcgcuauugccggcuuuaucgaaaaugggugggagggaauggucgaugguugguauggcuuccgucaccagaacagugaggggcgcggacaagcagcugaccuuaagagcacccaggccgcgauugaucagauaaauggcaaauugaacagacucaucgguaagacgaacgaaaaauuccaccagauugagaaggaauuuuccgagguugaagggaggauccaagacaucgagaaguacguggaggauaccaaaauugaccuguggucuuauaaugccgaauuacugguagcacucgagaaccagcauacaauagaucuuacugacagcgaaaugaauaagcuguucgagaaaaccaagaaacaguugcgggaaaacgcugaggauaugggcaauggaugcuuuaagaucuaccacaagugugacaacgccugcauuggcucaauccgaaaugggacauaugaucaugacguguaccgcgacgaggcucuaaacaauagauuccagauuaaaggagucgaacugaagagugguuacaaagauuggauccucuggauauccuuugccaucagcugcuuccugcuuuguguggcacuguugggcuuuauuaugugggccugccaaaaggggaacaucagguguaauauuugcaucuga

SEQ ID NO: 133469 - RNA, 1701 nt, Artificial Sequence; identical to SEQ ID NO: 133399
  derived and/or modified CDS sequence (opt3) from hemagglutinin__InfluenzaA__ADK99261

SEQ ID NO: 133470 - RNA, 1701 nt, Artificial Sequence
  derived and/or modified CDS sequence (opt3) from hemagglutinin__InfluenzaA__ADK99283
augaagaccaucauugcccugagcuacauacucugccuuguguucgcucagaaacugcccggcaacgacaauuccacagcaacuuuguguuuagggcaccaugccgucccuaacggaacgaucguuaagaccauuacaaaugaucaaaucgaggugacuaacgcgaccgaacugguacagucuucaaguacaggugagauuugcgacagcccacaccagauccuagauggcaaaaauuguacccucauagacgcucugcuuggggauccgcagugcgacggauuucaaaacaagaaaugggaucuguucguggaaagauccaaggccuauucuaauuguuaccccuaugacgucccugauuacgcaucguugaggucacucguggccagcaguggcacucuggaguuuaacaaugaauccuucaacuggacagguguuacccagaaugggacgucuagcgcuugcauccggcgcuccaagaacucauuuuucagucgacugaauuggcucacucauuuaaacuuuaaauauccagcacugaaugugaccaugcccaacaacgagcaguucgacaagcuguacauuuggggaguccaccauccuggcacagauaaagaccagaucuuuuuguaugcccaagcuagcggccguauuacugugucuaccaagagaucccagcagacaguaaucccaaauauagggucaaggccccggguucgcaacauuccuagcagaaucaguauuuacuggaccaucgugaaaccaggagauauccugcuaauuaauucuacggguaaccucauagccccgaggggcuacuucaagauccgguccggaaagagcucgauuaugcgcucugacgcgcccaucgggaaauguaauuccgagugcauaacuccuaacggcucaauuccaaaugacaagcccuuucagaacgucaaucgaaucacauauggugcauguccuagauacgugaaacaaaacacccugaaacuugccacugggaugaggaaugugccagaaaagcagacacggggaaucuucggcgcuauugccggcuuuaucgagaacgggugggaaggaauggucgaugguugguauggcuuccgucaccagaauagugaggggcgcggacaagcagcugaccuuaagagcacccaggccgcgauugaucagauaaacggcaaauugaauagacucaucgguaagacgaacgagaaguuccaccagauugaaaaagaguuuuccgaaguugaggggaggauccaagaccuggaacgguacguggaggauaccaagaucgacuuauggucuuauaacgccgagcugcucguagcacuugaaaaucagcauacaauugaucugacugacagcgagaugaacaaauuguucgaaaagaccaaaaagcagcuacgagagaaugcugaagauaugggcaacggaugcuuuaagauauaccacaaaugugacaaugccugcaucggcucaauucgcaacgggacauaugaucaugacguguacagagacgaggcucugaauaacagguuccagaucaagggagucgagcucaaaagugguuacaaggauuggauucuguggaucuccuuugccauaagcugcuuccuucuguguguggcauugcucggcuuuaucaugugggccugccaaaaagggaauauucgguguaacaucugcauuuga

SEQ ID NO: 133471 - RNA, 1701 nt, Artificial Sequence
  derived and/or modified CDS sequence (opt3) from hemagglutinin__InfluenzaA__ADK99294
augaagaccaucauugcccugagcuacauacucugccuuguguucgcucagaaacugcccggcaacgacaauuccacagcaacuuuguguuuagggcaccaugccgucccuaacggaacgaucguuaagaccauuacaaaugaucaaaucgaggugacuaacgcgaccgaacugguacagucuucaaguacaggugagauuugcgacagcccacaccagauccuagauggcgaaaauuguacccucauagacgcucugcuuggggauccgcagugcgacggauuucaagauaaaaagugggaccuguucguggagagauccaaagccuauucuaacuguuaccccuaugaugucccugacuacgcaucguugaggucacucguggccagcaguggcacucuggaauuuaauaacgaguccuucaauuggacagguguuacccagaacgggacgucuagcgcuugcauccggcgcuccaauaacucauuuuucagucgacugaauuggcucacucauuuaaacuuuaaguauccagcacugaaugugaccaugcccaacaacgagcaguucgauaagcuguacauuuggggaguccaccauccuggcacagacaaagaucagaucuuuuuguaugcccaagcuagcggccguauuacugugucuaccaagagaucccagcaggccguaaucccaaauauagggucaaggccccggguucgcaacauuccuagcagaaucaguauuuacuggacaaucgugaaaccaggagacauccugcuaauuaauucuaccgguaaccucauagcgccgaggggcuacuucaagauccgguccgggaaaagcucgauuaugcgcucugacgcacccaucggaaaguguaauuccgaaugcauaacgccuaacggcucaauuccaaaugauaagcccuuucagaacgucaaucgaaucacuuauggugccuguccuagauacgugaaacaaaacacacugaaacuugcuaccgggaugaggaaugugccagagaagcagacucggggaaucuucggcgccauugcaggcuuuaucgaaaacgggugggagggaauggucgacgguugguauggcuuccgucaccagaauagugaggggcgcggacaagcugccgaucuuaagagcacacaggcggccauugaccagauaaacggcaaauugaauagacucaucgguaagaccaacgaaaaauuccaccagauugagaaggaauuuuccgagguugaagggaggauccaagaucuggagaaguacguggaggacacgaaaaucgauuuauggucuuauaacgcagaacugcucguagcucuugagaaucagcauaccauugaccugacagauagcgaaaugaacaaguuguucgagaaaacuaagaaacagcuacgggaaaaugccgaggacaugggcaacggaugcuuuaagauauaccacaagugugauaaugcuugcaucggcucaauucgaaacgggaccuaugaccaugacguguaccgcgaugaggcccugaauaacagauuccagaucaaaggagucgaacucaagagugguuacaaagacuggauucuguggaucuccuuugcaauaagcugcuuccuucuguguguggccuugcucggcuuuaucaugugggcuugccaaaaggggaauauuagguguaacaucugcauuuga

SEQ ID NO: 133472 - RNA, 1701 nt, Artificial Sequence; identical to SEQ ID NO: 130482
  derived and/or modified CDS sequence (opt3) from hemagglutinin__InfluenzaA__ADK99305

SEQ ID NO: 133473 - RNA, 1701 nt, Artificial Sequence; identical to SEQ ID NO: 130482
  derived and/or modified CDS sequence (opt3) from hemagglutinin__InfluenzaA__ADL27989

SEQ ID NO: 133474 - RNA, 1701 nt, Artificial Sequence
  derived and/or modified CDS sequence (opt3) from hemagglutinin__InfluenzaA__ADL28000
augaagaccaucauugcccugagcuacauacucugccuuguguucgcucagaaacugcccggcaacgacaauuccacagcaacuuuguguuuagggcaccaugccgucccuaacggaacgaugguuaagaccaucacaaaugaucaaauugaggugacuaacgcgaccgaacugguacagucuucaaguacaggugagaucugcgacagcccacaccagauucuagauggcaaaaauuguacccucaucgacgcucugcuuggggauccgcagugcgacggauuucaaaacaagaaaugggaucuguucguggaaagauccaaggccuauucuaauuguuaccccuaugacgucccugauuacgcaucguugaggucacucguggccagcaguggcacucuggaguuuaacaaugaauccuucaacuggacagguguuacccagaaugggacgucuagcgcuugcauacggcgcuccaagaacucauuuuucagucgacugaauuggcucacucauuuaaacuuuaaauauccagcacugaaugugaccaugcccaacaacgagcaguucgacaaguuguacaucuggggaguccaccauccuggcacagauaaagaccagauuuuucuuuaugcccaagcuagcgagcguaucacugugucuaccaagagaucccagcagacaguaauuccaaauaucggcucaaggccccggguucgcaacauaccuagcagaauuaguaucuacuggaccauugugaaaccaggggauauccugcuaaucaauucuacgggaaaccucauugccccgagggguuacuucaagauacgguccggcaagagcucgaucaugcgcucugacgcgcccauugggaaauguaauuccgaaugcaucacuccuaacggaucaauaccaaaugacaagcccuuucagaacgucaaucgaauuacauauggcgcauguccuagauacgugaaacaaaguacccugaaacuugccacugguaugaggaacgugccagagaagcagacacgggggaucuucggagcuaucgccggcuuuauugaaaauggcugggaggggauggucgauggaugguaugguuuccgucaccagaacagcgagggccgcgggcaagcagcugaccugaaguccacccaggccgcgaucgaucagauuaauggaaaauugaacagacucauaggcaagacgaaugaaaaguuccaccagaucgagaaagaauuuucugagguugaagguaggauucaagaccuggagaaguacguggaggauaccaaaaucgacuuauggagcuauaacgccgaacugcucguagcacuugagaaccagcauacaaucgaucugacugacucagaaaugaauaaguuguucgagaaaaccaagaagcagcuacgggaaaacgcugaggauauggggaauggcugcuuuaaaauuuaccacaagugugacaacgccugcauaggaaguauccgaaauggcacauaugaucaugacguguaccgcgacgaggcucugaacaauagauuccagauuaaaggggucgaacucaaguccggauacaaagauuggauccuguggauuagcuuugccaucucuugcuuccuucuguguguggcauugcucgguuuuauaaugugggccugccaaaagggcaacaucagguguaauauuugcaucuga

SEQ ID NO: 133475 - RNA, 1701 nt, Artificial Sequence
  derived and/or modified CDS sequence (opt3) from hemagglutinin__InfluenzaA__ADL28011
augaagaccaucauugcccugagcuacauacucugccuuguguucgcucagaaacugcccggcaacgacaauuccacagcaacuuuguguuuagggcaccaugccgucccuaacggaacgaucguuaagaccauuacaaaugaucaaaucgaggugacuaacgcgaccgaacugguacagucuucaaguacaggugagauuugcgacagcccacaccagauccuagauggcgaaaauuguacccucauagacgcucugcuuggggauccgcagugcgacggauuucaaaacaaaaagugggaucuguucguggagagauccaaagccuauucuaauuguuaccccuaugacgucccugauuacgcaucguugaggucacucguggccagcaguggcacucuggaauuuaacaaugaguccuucaacuggacagguguuacccagaaugggacgucuagcgcuugcauccggcgcuccaacaauucauuuuucagucgacugaacuggcucacucauuuaaaguuuaaguauccagcacugaaugugaccaugcccaacaacgagcaguucgacaaacuuuacauuuggggaguccaccauccuggcacagauaaugaccagaucuuuuuguaugcccaagcuagcggccguauuacugugucuaccagaaggucccagcagacaguaaucccaaacauagggucacggccccgcguuagaaauauuccuagcaggaucaguauuuacuggaccaucgugaagccaggagauauccugcuaauuaacucuacggguaaucucauagccccgcggggcuacuucaaaauccgcuccggaaagagcucgauuaugcgaucugacgcgcccaucgggaaauguaacuccgaaugcauaacuccuaauggcucaauuccaaacgacaagcccuuucagaaugucaacagaaucacauauggugcauguccuagguacgugaagcaaaauacccugaaacuugccacugggaugcggaacgugccagagaagcagacacguggaaucuucggcgcuauugccggcuuuaucgaaaaugggugggagggaauggucgaugguugguauggcuuccgccaccagaacagugaggggagaggacaagcagcugaccugaaaagcacccaggccgcgauugaucagauaaauggcaaguugaacaggcucaucgguaaaacgaacgaaaaguuccaccagauugagaaagaauuuuccgagguugaagggcggauccaagaccuggagaaguacguggaggauaccaagaucgacuuauggucuuauaaugccgaacugcucguagcacuugagaaccagcauacaauugaucugacugacagcgaaaugaauaaauuguucgagaagaccaaaaagcagcuacgagaaaacgcugaggauaugggcaauggaugcuuuaaaauauaccacaagugugacaacgccugcaucggcucaauucgcaaugggacauaugaucaugacguguacagagacgaggcucugaacaauagguuccagaucaagggagucgaacucaaaagugguuacaaggauuggauucuguggaucuccuuugccauaagcugcuuccuucuguguguggcauugcucggcuuuaucaugugggccugccaaaaagggaacauucgguguaauaucugcauuuga

SEQ ID NO: 133476 - RNA, 1701 nt, Artificial Sequence; identical to SEQ ID NO: 133399
  derived and/or modified CDS sequence (opt3) from hemagglutinin__InfluenzaA__ADL28022

SEQ ID NO: 133477 - RNA, 1701 nt, Artificial Sequence; identical to SEQ ID NO: 130482
  derived and/or modified CDS sequence (opt3) from hemagglutinin__InfluenzaA__ADL28033

SEQ ID NO: 133478 - RNA, 1701 nt, Artificial Sequence; identical to SEQ ID NO: 131661
  derived and/or modified CDS sequence (opt3) from hemagglutinin__InfluenzaA__ADL28044

SEQ ID NO: 133479 - RNA, 1701 nt, Artificial Sequence
  derived and/or modified CDS sequence (opt3) from hemagglutinin__InfluenzaA__ADL28055
augaagaccaucguggcccugagcuacauucucugccuugucuucgcucagaaacugcccggcaacgacaauuccacagcaacuuuguguuuagggcaccaugccguuccuaacggaacgauagugaagaccaucacaaaugaucaaauugagguaacuaacgcgaccgaacuggugcagucuucaaguacaggugagaucugcgacagcccacaccagauucuagauggcgaaaauuguacccucaucgacgcucugcuuggggauccgcagugcgacggauuucaaaacaaaaagugggaucuguucgucgagagauccaaagccuauucuaauuguuaccccuaugacgugccugauuacgcaucguugaggucacucguugccagcaguggcacucuggaauuuaacaaugaguccuucaacuggacaggugugacccagaaugggacgucuagcgcuugcauacggcgcuccaacaauucauuuuucagucgacugaacuggcucacucauuuaaaguuuaaguauccagcacugaaugucaccaugcccaacaacgagcaguucgacaaacuuuacaucuggggagugcaccauccuggcacagauaaugaccagaucuuuuuguaugcccaagcuagcggccguauuacuguaucuaccaagagaucccagcagacaguuauuccaaacaucgggucaaggccccgggugcgcaauauaccuagcagaauuaguaucuacuggaccauugucaaaccaggagauauccugcuaaucaacucuacggguaaucucauugccccgaggggcuacuucaagauacgguccgggaaaagcucgaucaugcgcucugacgcgcccauuggaaaguguaacuccgaaugcaucacuccuaauggcucaauaccaaacgacaagcccuuucagaaugugaaccgaauuacauauggugcauguccuagauacgugaaacaaaauacccugaagcuggccacugggaugaggaacgucccagagaaacagacacggggaaucuucggcgcuaucgccggcuuuauugaaaaugggugggagggaaugguugaugguugguauggcuuccgucaccagaacagugaggggcgcggacaagcagcugaccuuaagagcacccaggccgcgaucgaucagauuaauggcaaauugaacagacucauagguaagacgaacgaaaaauuccaccagaucgagaaggaauuuuccgagguggaagggaggauucaagaccuggagaaguacguagaggauaccaaaaucgacuuauggucuuauaaugccgaacugcucguggcacuugagaaccagcauacaaucgaucugacugacagcgaaaugaauaaguuguucgagaaaaccaagaaacagcuacgggaaaacgcugaggauaugggcaauggaugcuuuaagauuuaccacaagugugacaacgccugcauaggcucaauccgaaaugggacauaugaucaugacgucuaccgcgacgaggcucugaacaauagauuccagauuaaaggaguggaacucaagagugguuacaaagauuggauccuguggauuuccuuugccaucagcugcuuccuucuguguguugcauugcucggcuuuauaaugugggccugccaaaaggggaacaucagguguaauauuugcaucuga

SEQ ID NO: 133480 - RNA, 1701 nt, Artificial Sequence; identical to SEQ ID NO: 130482
  derived and/or modified CDS sequence (opt3) from hemagglutinin__InfluenzaA__ADL28066

SEQ ID NO: 133481 - RNA, 1701 nt, Artificial Sequence; identical to SEQ ID NO: 133399
  derived and/or modified CDS sequence (opt3) from hemagglutinin__InfluenzaA__ADL28077

SEQ ID NO: 133482 - RNA, 1701 nt, Artificial Sequence
  derived and/or modified CDS sequence (opt3) from hemagglutinin__InfluenzaA__ADL28088
augaagaccaucauugcccugagcuacauacucugccuuguguucgcucagaaacugcccggcaacgacaauuccacagcaacuuuguguuuagggcaccaugccgucccuaacggaacgaucguuaagaccauuacaaaugaucaaaucgaggugacuaacgcgaccgaacugguacagucuucaaguacaggugagauuugcgacagcccacaccagauccuagauggcgaaaauuguacccucauagacgcucugcuuggggauccgcagugcgacggauuucaaaacaaaaagugggaucuguucguggagagauccaaagccuauucuaauuguuaccccuaugacgucccugauuacgcaucguugaggucacucguggccagcaguggcacucuggaauuuaacaaugaguccuucaacuggacagguguuacccagaaugggacgucuagcgcuugcauccggcgcuccaacaauucauuuuucagucgacugaacuggcucacucauuuaaaguuuaaguauccagcacugaaugugaccaugcccaacaacgagcaguucgacaaacuuuacauuuggggaguccaccauccuggcacagauaaugaccagaucuuuuuguauagccaagccucuggccguauuacuguguccaccaagagaucacagcagacaguaaucccaaacauagggagcaggccccggguucgcaauauuccuaguagaaucucuauuuacuggaccaucgugaaaccaggagauauccugcuaauuaacuccacggguaaucucauagcuccgaggggcuacuucaagauccggagcgggaaaucgucuauuaugcgcuccgacgcccccaucggaaaguguaacucagaaugcauaacuccuaauggcaguauuccaaacgacaagcccuuucagaaugucaaccgaaucacauauggugcguguccuagauacgugaaacaaaauacccugaaacuugcaacugggaugaggaacgugccagagaagcagacacggggaaucuucggcgccauugcuggcuuuaucgaaaaugggugggagggaauggucgaugguugguauggcuuccgucaccagaacagcgaggggcgcggacaagccgcagaccugaaguccacccaggcugccauugaucagauaaauggcaaauugaacagacucaucgguaagacgaacgaaaaauuccaccagauugagaaggaauuuucugagguugaagggaggauccaagaccuggagaaguacguggaggauaccaaaaucgacuuauggagcuauaaugcggaacugcucguagcccuugagaaccagcauacaauugaucugacugacucagaaaugaauaaguuguucgagaaaaccaagaaacagcuacgggaaaacgcagaggauaugggcaauggaugcuuuaagauauaccacaagugugacaacgcuugcaucggcaguauucgaaaugggacauaugaucaugacguguaccgcgacgaggcccugaacaauagauuccagaucaaaggagucgaacucaaguccgguuacaaagauuggauucuguggaucagcuuugcuauaucuugcuuccuucuguguguggccuugcucggcuuuaucaugugggcaugccaaaaggggaacauuagguguaauaucugcauuuga

SEQ ID NO: 133483 - RNA, 1701 nt, Artificial Sequence; identical to SEQ ID NO: 130482
  derived and/or modified CDS sequence (opt3) from hemagglutinin__InfluenzaA__ADL28099

SEQ ID NO: 133484 - RNA, 1701 nt, Artificial Sequence
  derived and/or modified CDS sequence (opt3) from hemagglutinin__InfluenzaA__ADL28110
augaagaccaucauugcccugagcuacauacucugccuuguguucgcucagaaacugcccggcaacgacaauuccacagcaacuuuguguaucgggcaccaugccgucccuaacggaacgauuguuaagaccaucacaaaugaucaaauugaggugacuaacgcgaccgaauuaguacaaaauucuucaacaggugagaucugcgacaguccacaccagauacuggauggcaaaaacuguacccuaaucgacgcucuccugggggauccgcagugcgacggauuucagaauaagaaaugggaucuuuucguggaaagaagcaaggccuauuccaacuguuaccccuaugacgucccugauuacgcaucucugaggucguugguggccucaagcggcacucucgaguuuaauaacgaaaguuucaauuggacagguguuacccagaacgggacguccucugcuugcauucggcgcagcaaaaauuccuuuuucucacgacugaacuggcugacucaucucaauuuuaaauauccagcauuaaacgugaccaugcccaacaaugagcaguucgacaagcuguacaucuggggaguccaccauccuggcacagauaaagaccagauuuuucuuuaugcccaagcuaguggccguaucacugugagcaccaagagaucucagcagacagccauaccaaacauuggguccaggccccggguacgcaauaucccuucaagaauuagcaucuacuggaccaucguuaaaccaggagauauuuugcugauaaacaguacggguaaucuaaucgcgccgaggggcuacuucaagauucggucugggaaguccagcaucaugcgcucggacgcacccauagacaaauguaacucugagugcauuacuccuaauggauccaucccaaacgauaagcccuuucagaaugugaaccgaaucacauauggcgccuguccuagauacgucaaacaaaauacccucaagcuggcuacugguaugaggaacgugccagaaaaacagacacgggggauuuucggagccaucgcaggcuuuauugagaauggcugggaagggaugguggacggaugguaugguuuccgucaccagaacucagagggccgcgggcaagcugccgaucuuaagaguacccaggcggccauagaccagaucaauggaaaacugaacagauugauuggcaagacgaacgagaaguuccaccagaucgaaaaagaguuuagcgaagucgaggguaggauccaagaucucgaaaaguacguugaggacaccaaaauugaucugugguccuauaaugcagaguuacugguggcucucgaaaaccagcauacaauagaccuuacugauucugagaugaauaagcuguucgaaaagaccaagaagcaguugcgggagaacgccgaagacauggggaauggcugcuuuaaaaucuaccacaagugugauaacgcuugcauuggaagcauccgaaauggcacauaugaccaugacguauaccgcgaugaggcccuaaacaauagauuccagauuaaagggguggagcugaagucaggauacaaagacuggauccucuggauaaguuuugcaaucuccugcuuccugcuuugugucgcccuguuggguuuuauuaugugggcuugccaaaagggcaacaucagguguaauauuugcaucuga

SEQ ID NO: 133485 - RNA, 1701 nt, Artificial Sequence
  derived and/or modified CDS sequence (opt3) from hemagglutinin__InfluenzaA__ADL28126
augaagaccaucauugcccugagcuacauacucugccuuguguucgcucagaaacugcccggcaacgacaauuccacagcaacuuuguguuuagggcaccaugccgucccuaacggaacgaucguuaagaccauuacaaaugaucaaaucgaggugacuaacgcgaccgaacugguacagucuucaaguacaggugagauuugcgacagcccacaccagauccuagauggcgaaaauuguacccucauagacgcucugcuuggggauccgcagugcgacggauuucaaaacaaaaagugggaucuguucguggagagauccaaagccuauucuaauuguuaccccuaugacgucccugauuacgcaucguugaggucacucguggccagcaguggcacucuggaauuuaacaaugaguccuucaacuggacagguguuaaucagaacgggaccucuagcgcuugcauccggcgcuccaauaacucauuuuucagucgacugaauuggcucacgcauuuaaaguuuaaguauccagcacugaacgugacuaugcccaacaaugagcaguucgacaaacuuuacauuuggggaguccaccauccuggcaccgauaacgaccagaucuuuuuguaugcccaagcuagcggccguauuacagugucuacuaagagaucccagcagaccguaaucccaaauauagggucaaggccccggguucgcaacauuccuagcagaaucaguauuuacuggacaaucgugaaaccaggagauauccugcuaauuaauucuaccgguaaccucauagccccgaggggcuacuucaagauccgguccgggaaaagcucgauuaugcgcucugacgcgcccaucggaaaguguaauuccgaaugcauaacgccuaacggcucaauuccaaaugacaagcccuuucagaacgucaaucgaaucacuuauggugcauguccuagauacgugaaacaaaacacacugaagcuggccaccgggaugaggaaugugccagagaaacagacucggggaaucuucggcgcuauugccggcuuuaucgaaaacgggugggagggaauggucgaugguugguauggcuuccgucaccagaauagugaggggcgcggacaagcagcugaccuuaagagcacacaggccgcgauugaucagauaaacggcaaauugaacagacucaucgguaagaccaaugaaaaauuccaccagauugagaaggaauuuuccgagguugaagggaggauccaagaccuggagaaguacguggaggauacgaaaaucgacuuauggucuuauaacgccgaacugcucguagcacuugagaaucagcauaccauugaucugacagacagcgaaaugaacaaguuguucgagaaaacuaagaaacagcuacgggaaaaugcugaggauaugggcaacggaugcuuuaagauauaccacaagugugacaaugccugcaucggcucaauucgaaacgggaccuaugaucaugacguguaccgcgacgaggcucugaauaacagauuccagaucaaaggagucgaacucaagagugguuacaaagauuggauucuguggaucuccuuugccauaagcugcuuccuucuguguguggcauugcucggcuuuaucaugugggccugccaaaaggggaauauuagguguaacaucugcauuuga

SEQ ID NO: 133486 - RNA, 1701 nt, Artificial Sequence
  derived and/or modified CDS sequence (opt3) from hemagglutinin__InfluenzaA__ADL28137
augaagaccaucauugcccugagcuacauacucugccuuguguccgcucagaaacugcccggcaacgacaauucuacagcaacuuuguguuuagggcaccaugccgucccuaacggaacgaucguuaagaccauuacaaaugaucaaaucgaggugacuaacgcgaccgaacugguacagucaaguagcacaggugagauuugcgacggcccacaccagauccuagauggggaaaauuguacccucauagacgcucugcuuggagauccgcagugcgacggcuuccaaaacaaaaagugggaucuguuuguggagagauccaaagccuauucuaauuguuaccccuaugacgucccugauuacgcaucguugaggucacucguggccagcagugguacucuggaguucaacaaugaauccuuuaacuggacagggguuacccagaauggaacgucuagcgcuugcauccggcgcuccaacaauucauucuuuagucgacugaacuggcucacucauuuaaaguucaaguauccagcacugaaugugaccaugcccaacaacgagcaguuugacaaacuuuacauuuggggcguccaccauccuggcacagauaaugaccagaucuucuuguaugcccaagcuagcgggcguauuacugugucuaccaagagaucccagcagacaguaaucccaaacauaggaucaaggccccggguucgcaauauuccuagcagaaucaguauuuacuggaccaucgugaaaccaggugauauccugcuaauuaacucuacgggcaaucucauagccccgaggggguacuuuaagauccgguccggaaaaagcucgauuaugcgcucugacgcgcccaucggcaaguguaacuccgaaugcauaacuccuaaugguucaauuccaaacgacaagcccuuccagaaugucaaccgaaucacauauggggcauguccuagauacgugaaacaaaauacccugaagcuggccacuggaaugaggaacgugccagagaaacagacacggggcaucuuuggcgcuauugccggguucaucgaaaauggaugggaggguauggucgauggcugguauggguuucgucaccagaacagugagggacgcggccaagcagcugaccuuaagagcacccaggccgcgauugaucagauaaaugguaaauugaacagacucaucgggaagacgaacgaaaaauuccaccagauugagaaggaguucuccgaaguugaaggcaggauccaagaccuggagaaguacguggaggauaccaaaaucgacuuauggucuuauaaugccgaacugcucguagcacuugagaaccagcauacaauugaucugacugacagcgaaaugaauaaguuguuugagaaaaccaagaaacagcuacgggaaaacgcugaggauaugggaaauggcugcuucaagauauaccacaagugugacaacgccugcaucgggucaauucgaaauggaacauaugaucaugacguguaccgcgacgaggcucugaacaauagauuucagaucaaaggugucgaacucaagaguggcuacaaagauuggauucuguggaucuccuucgccauaagcugcuuucuucuguguguggcauugcucggguucaucaugugggccugccaaaagggaaacauuagguguaauaucugcauuuga

SEQ ID NO: 133487 - RNA, 1701 nt, Artificial Sequence; identical to SEQ ID NO: 130482
  derived and/or modified CDS sequence (opt3) from hemagglutinin__InfluenzaA__ADL28148

SEQ ID NO: 133488 - RNA, 1701 nt, Artificial Sequence; identical to SEQ ID NO: 133399
  derived and/or modified CDS sequence (opt3) from hemagglutinin__InfluenzaA__ADL28170

SEQ ID NO: 133489 - RNA, 1701 nt, Artificial Sequence; identical to SEQ ID NO: 130482
  derived and/or modified CDS sequence (opt3) from hemagglutinin__InfluenzaA__ADL28181

SEQ ID NO: 133490 - RNA, 1701 nt, Artificial Sequence; identical to SEQ ID NO: 133394
  derived and/or modified CDS sequence (opt3) from hemagglutinin__InfluenzaA__ADL28192

SEQ ID NO: 133491 - RNA, 1701 nt, Artificial Sequence; identical to SEQ ID NO: 133400
  derived and/or modified CDS sequence (opt3) from hemagglutinin__InfluenzaA__ADL28203

SEQ ID NO: 133492 - RNA, 1701 nt, Artificial Sequence; identical to SEQ ID NO: 131459
  derived and/or modified CDS sequence (opt3) from hemagglutinin__InfluenzaA__ADL28214

SEQ ID NO: 133493 - RNA, 1701 nt, Artificial Sequence
  derived and/or modified CDS sequence (opt3) from hemagglutinin__InfluenzaA__ADL28225
augaagaccaucauugcccugagcuacauacucugccuuguguucgcucagaaacugcccggcaacgacaauuccacagcaacuuuguguuuagggcaccaugccgucccuaacggaacgaucguuaagaccauuacaaaugaucaaaucgaggugacuaacgcgaccgaacugguacagucuucaaguacaggugagauuugcgacagcccacaccagauccuagauggcgaaaauuguacccucauagacgcucugcuuggggauccgcagugcgacggauuucaaaacaaaaagugggaucuguucguggagagauccaaagccuauucuaauuguuaccccuaugacgucccugauuacgcaucguugaggucacucguggccagcaguggcacucuggaauuuaacaaugaguccuucaacuggacagguguuacccagaaugggacgucuagcgcuugcauccggcgcuccaacaauucauuuuucagucgacugaacuggcucacucauuuaaaguuuaaguauccagcacugaaugugaccaugcccaacaacgagcaguucgacaaacuuuacauuuggggaguccaccauccuggcacagauaaugaccagaucuuuuuguauagccaagccucuggccguauuacuguguccaccaagagaucacagcagacaguaaucccaaacauagggagcaggccccggguucgcaauauuccuaguagaaucucuauuuacuggaccaucgugaaaccaggagauauccugcuaauuaacuccacggguaaucucauagcuccgaggggcuacuucaagauccggagcgggaaaucgucuauuaugcgcuccgacgcccccaucggaaaguguaacucagaaugcauaacuccuaauggcaguauuccaaacgacaagcccuuucagaaugucaaccgaaucacauauggugcguguccuagauacgugaaacaaaauacccugaaacuugcaacugggaugaggaacgugccagagaagcagacacggggaaucuucggcgccauugcuggcuuuaucgaaaaugggugggagggaauggucgaugguugguauggcuuccgucaccagaacagcgaggggcgcggacaagccgcagaccugaaguccacccaggcugccauugaucagauaaauggcaaauugaacagacucaucgguaagacgaacgaaaaauuccaccagauugagaaggaauuuucugagguugaagggaggauccaagaccuggagaaguacguggaggauaccaaaacagacuuauggagcuauaaugcggaacugcucguagcccuugagaaccagcauacuaucgaucugaccgacucagaaaugaauaaguuguucgagaaaacaaagaaacagcuacgggaaaacgcagaggauaugggcaauggaugcuuuaagauuuaccacaagugugacaacgcuugcauaggcaguauccgaaaugggacuuaugaucaugacguguaccgcgacgaggcccugaacaauagauuccagauuaaaggagucgaacucaaguccgguuacaaagauuggauccuguggauuagcuuugcuaucucuugcuuccuucuguguguggccuugcucggcuuuauaaugugggcaugccaaaaggggaacaucagguguaauauuugcaucuga

SEQ ID NO: 133494 - RNA, 1701 nt, Artificial Sequence; identical to SEQ ID NO: 133399
  derived and/or modified CDS sequence (opt3) from hemagglutinin__InfluenzaA__ADL28236

SEQ ID NO: 133495 - RNA, 1701 nt, Artificial Sequence; identical to SEQ ID NO: 130482
  derived and/or modified CDS sequence (opt3) from hemagglutinin__InfluenzaA__ADL28247

SEQ ID NO: 133496 - RNA, 1701 nt, Artificial Sequence; identical to SEQ ID NO: 133412
  derived and/or modified CDS sequence (opt3) from hemagglutinin__InfluenzaA__ADL28258

SEQ ID NO: 133497 - RNA, 1701 nt, Artificial Sequence; identical to SEQ ID NO: 130482
  derived and/or modified CDS sequence (opt3) from hemagglutinin__InfluenzaA__ADL28370

SEQ ID NO: 133498 - RNA, 1701 nt, Artificial Sequence; identical to SEQ ID NO: 130717
  derived and/or modified CDS sequence (opt3) from hemagglutinin__InfluenzaA__ADL29672

SEQ ID NO: 133499 - RNA, 1701 nt, Artificial Sequence; identical to SEQ ID NO: 130959
  derived and/or modified CDS sequence (opt3) from hemagglutinin__InfluenzaA__ADL29682

SEQ ID NO: 133500 - RNA, 1701 nt, Artificial Sequence; identical to SEQ ID NO: 130717
  derived and/or modified CDS sequence (opt3) from hemagglutinin__InfluenzaA__ADL29692

SEQ ID NO: 133501 - RNA, 1701 nt, Artificial Sequence
  derived and/or modified CDS sequence (opt3) from hemagglutinin__InfluenzaA__ADL29702
augaaggccauccuggugguccuccuuuacaccuucgcuacagcaaacgccgacacucugugcauuggcuaucacgcgaauaacagcacggauaccguugacacaguguuggagaagaauguaacugugacccauuccgucaacuuacuggaagauaagcacaaugggaaacuauguaagcucagaggaguggcuccccugcaucuugguaaaugcaacauagccggcuggauccuggggaauccugagugugaaucuuugucaacagcaaguagcugguccuacauuguugagaccucuucgucagacaacggaacuugcuauccaggcgauuuuaucgacuacgaggagcucagggagcagcugagcaguguguccucuuucgaacgguuugagauuuucccgaagacaagcuccuggcccaaucacgauucaaacaagggugucaccgccgcuuguccucaugcaggggccaaaaguuuuuauaagaaucugaucuggcucgugaaaaagggaaacagcuacccaaaauuaucuaaguccuauauaaaugacaagggcaaagaaguacugguucuuuggggcauccaccaccccucaacgagcgcugaucaacagaguuuguaccagaacgccgacacuuacguguucgucgggaccucucgcuauuccaagaaauuuaagccugagauugcgauccgaccaaaagugcgugaucaggagggaagaaugaauuacuauuggacacugguggaacccggugacaagauuacuuucgaggcaaccggcaaccuagucguuccuagguacgccuuugcuauggaacggaacgccgggagcggaaucauaauuucggauacaccagugcaugacugcaauaccacgugucaaacuccgaaaggcgcaaucaacacaucucuccccuuccagaauauucacccuaucaccaucgguaagugcccaaaguauguaaaauccacuaagcugcgccuugcuacagggcugagaaacgugcccucaauucagaguaggggauuguuuggcgccauagcgggcuucaucgaagggggauggaccgguauggucgacggcugguacggguaucaucaccagaaugaacaaggaagcggcuacgccgcagaucucaaauccacgcagaacgcuauugacgagaucaccaauaaggugaacucuguuauagagaaaaugaauacacaguuuacugccguggguaaggaguucaaccaccuggaaaagcggauugaaaauuuaaacaaaaagaucgaugacggguuccuggauaucuggaccuacaaugcugagcuccuuguccuguuggaaaacgagcgcacacuagacuaucaugauagcaaugugaaaaaccuguacgagaagguacgaaaccagcucaaaaauaacgccaaggaaauuggcaauggauguuuugaguucuaucacaagugcgacaacacuuguauggaaucaguuaaaaauggcaccuacgauuauccuaaguacagugaggaagcaaaacugaacagagaggagaucgacggggugaaacuugaauccacaaggauuuaucaaauacuggccaucuacagcaccgucgcuucuucauuggugcucgucgugagucugggagcgauuagcuuuuggaugugcuccaaugguucuuuacagugccggaucuguaucuga

SEQ ID NO: 133502 - RNA, 1701 nt, Artificial Sequence; identical to SEQ ID NO: 130717
  derived and/or modified CDS sequence (opt3) from hemagglutinin__InfluenzaA__ADL29730

SEQ ID NO: 133503 - RNA, 1701 nt, Artificial Sequence; identical to SEQ ID NO: 130717
  derived and/or modified CDS sequence (opt3) from hemagglutinin__InfluenzaA__ADL29740

SEQ ID NO: 133504 - RNA, 1701 nt, Artificial Sequence; identical to SEQ ID NO: 130717
  derived and/or modified CDS sequence (opt3) from hemagglutinin__InfluenzaA__ADL29750

SEQ ID NO: 133505 - RNA, 1701 nt, Artificial Sequence
  derived and/or modified CDS sequence (opt3) from hemagglutinin__InfluenzaA__ADL29760
augaaggccauccuggugguccuccuuuacaccuucgcuacagcaaacgccgacacucugugcauuggcuaucacgcgaauaacagcacggauaccguugacacaguguuggagaaaaauguaacugugacccauuccgucaacuuacuggaauacaagcacaaugggaaacuauguaagcucagaggaguggcuccccugcaucuugguaaaugcaacauagccggcuggauccuggggaauccugagugugaaucuuugucaacagcaaguagcugguccuauauuguugagaccucuucgucagauaacggaacuugcuacccaggcgacuuuaucgauuaugaggagcucagggagcagcugagcaguguguccucuuucgaacgguuugagauuuucccgaagacaagcuccuggcccaaucacgacucaaacaagggugucaccgccgcuuguccucaugcaggggccaaaaguuuuuacaagaaucugaucuggcucgugaaaaagggaaacagcuauccaaaauuaucuaaguccuacauaaaugauaagggcaaagaaguacugguucuuuggggcauccaccaccccucaacgagcgcugaccaacagaguuuguaccagaacgccgaugcguauguguucgucgggacuucucgcuacuccaagaaauuuaagccugagauugcaauccgaccaaaagugcgugaccaggagggaagaaugaauuauuacuggacccugguggaacccggugauaagauuacauucgaggccacuggcaaccuagucguuccuagguaugcuuuugccauggaacggaacgcagggagcggaaucauaauuucggacaccccagugcaugauugcaauacaaccugucaaacgccgaaaggcgcuaucaacacuucucuccccuuccagaauauucacccuaucacaaucgguaagugcccaaaguacguaaaauccaccaagcugcgccuugccacugggcugagaaacgugcccucaauucagaguaggggauuguuuggcgcgauagccggcuucaucgaagggggauggacagguauggucgacggcugguauggguaccaucaccagaaugaacaaggaagcggcuacgcagcugaccucaaauccacccagaacgccauugaugagaucacgaauaaggugaacucuguuauagagaaaaugaauacccaguuuacagcuguggguaaggaguucaaccaccuggaaaagcggauugaaaauuuaaacaaaaaggucgacgauggguuccuggacaucuggacuuauaaugccgagcuccuugugcuguuggaaaacgagcgcacccuagauuaccaugacagcaauguaaagaaccuguaugagaagguucgaucacagcucaaaaacaaugcaaaggaaaucggcaacggauguuuugaguucuaccacaagugcgauaauacauguauggaaagugugaaaaacggcacuuaugacuacccuaaguauuccgaggaagccaaacugaauagagaggagauugauggggucaaacuugaaagcaccaggaucuaccaaauucuggcuauauacucuacaguggcgucaaguuugguccucgugguuagccugggagcaaucuccuuuuggaugugcucuaacgguucguuacagugccggauuuguaucuga

SEQ ID NO: 133506 - RNA, 1701 nt, Artificial Sequence; identical to SEQ ID NO: 130717
  derived and/or modified CDS sequence (opt3) from hemagglutinin__InfluenzaA__ADL29770

SEQ ID NO: 133507 - RNA, 1701 nt, Artificial Sequence; identical to SEQ ID NO: 132217
  derived and/or modified CDS sequence (opt3) from hemagglutinin__InfluenzaA__ADL29780

SEQ ID NO: 133508 - RNA, 1701 nt, Artificial Sequence
  derived and/or modified CDS sequence (opt3) from hemagglutinin__InfluenzaA__ADL29879
augaaggccauccuggugguccuccuuuacaccuucgcuacagcaaacgccgacacucugugcauuggcuaucacgcgaauaacagcacggauaccguugacacaguguuggagaaaaauguaacugugacccauuccgucaacuuacuggaagauaagcacaaugggaaacuauguaagcucagaggaguggcuccccugcaucuugguaaaugcaacauagccggcuggauccuggggaauccugagugugaaucuuugucaacagcaaguagcugguccuacauuguugagaccucuucgucagacaacggaacuugcuauccaggcgauuuuaucgacuacgaggagcucagggagcagcugagcaguguguccucuuucgaacgguuugagauuuucccgaagacaagcuccuggcccaaucacgauucaaacaagggugucaccgccgcuuguccucaugcaggggccaaaaguuuuuauaagaaucugaucuggcucgugaaaaagggaaacagcuacccaaaauuaucuaaguccuauauaaaugacaagggcaaagaaguacugguucuuuggggcauccaccaccccucaacgagcgcugaucaacagaguuuguaccagaacgccgacucuuacguguucgucgggacuuccaaguauagcaaaaaguuuaaaccugagauugcgauccgcccaaaggugcgagaucaggagggacguaugaauuacuauuggacccugguggaacccggugacaaaauuacauucgaggcaacuggcaaccuagucguuccuagauacgccuuugcuauggaaaggaacgccgggucgggaaucauaauuucugauaccccagugcaugacugcaauacaaccugucaaacgccgaagggcgcaaucaacacuucccuccccuuccagaauauucacccuaucacaaucgguaagugcccaaaauauguaaagucaaccaaacugcggcuugcuacugggcugcgcaacgugcccaguauucagagcagaggauuguuuggcgccauagcgggcuucaucgaagggggauggacagguauggucgacggcugguacggguaucaucaccagaaugaacaaggauccggcuacgccgcagaucucaagucuacccagaacgcuauugacgagaucacgaauaaagugaacagcguuauagagaagaugaauacccaguuuacagccguggguaaggaauuuaaccaccuggagaaaaggauugaaaauuuaaacaagaaagucgaugacggguuccuggauaucuggacuuacaaugcugagcuccuugugcuguuggaaaacgagcggacccuagacuaucaugauucaaauguaaagaaccuguacgagaaaguucgcagucagcucaagaacaaugccaaggaaaucggcaacggauguuucgaguucuaucacaaaugcgacaauacauguauggaauccgugaagaacggcacuuacgauuauccuaaauacagcgaggaagcaaagcugaaucgagaggagauugacggggucaaacuugaaucuaccagaaucuaucaaauucuggccauauacucaacaguggcuaguagcuugguccucgugguuucccugggagcgaucucuuuuuggaugugcucgaacgguagcuuacagugcaggauuuguaucuga

SEQ ID NO: 133509 - RNA, 1701 nt, Artificial Sequence
  derived and/or modified CDS sequence (opt3) from hemagglutinin__InfluenzaA__ADL32017
augaaggccauccuggugguccuccuuuacaccuucgcuacagcaaacgccgacacucugugcauuggcuaucacgcgaauaacagcacggauaccguugacacaguguuggagaaaaauguaacugugacccauuccgucaacuuacuggaagauaagcacaaugggaaacuaugucagcucagaggaguggcuccccugcaucuugguaagugcaacauagccggcuggauccuggggaauccugagugugaaucuuugucaacagcaaguagcugguccuacauuguugagaccucuucgucagacaacggaacuugcuauccaggcgauuuuaucgacuacgaggagcucagggagcaacugagcaguguguccucuuucgaacgguuugagauuuucccgaaaacaagcuccuggcccaaucacgauucaaacaagggugucaccgccgcuuguccucaugcaggggccaagaguuuuuauaaaaaucugaucuggcucgugaagaaaggaaacagcuacccaaaguuaucuaaauccuauauaaaugacaagggcaaggaaguacugguucuuuggggcauccaccaccccucaacgagcgcugaucagcagaguuuguaccagaacgccgacacuuacguguucgucgggaccucucgcuauuccaaaaaguuuaaaccugagauugcgauccgaccaaaggugcgugaucaagagggaagaaugaauuacuauuggacacugguggaacccggugacaaaauuacuuucgaggcaaccggcaaccuagucguuccuagguacgccuuugcuauggaacggaacgccgggagcggaaucauaauuucggauacaccagugcaugacugcaauaccacgugucagacuccgaagggcgcaaucaacacaucucuccccuuccagaauauucacccuaucaccaucgguaaaugcccaaaguauguaaaguccacuaaacugcgccuugcuacagggcugagaaacgugcccucaauucagaguaggggauuguuuggcgccauagcgggcuucaucgaagggggauggaccgguauggucgacggcugguacggguaucaucaccaaaaugaacagggaagcggcuacgccgcagaucucaaguccacgcagaacgcuauugacgagaucaccaauaaagugaacucuguuauagagaagaugaauacacaguuuacugccguggguaaagaguucaaccaccuggaaaagcggauugaaaauuuaaacaagaaaaucgaugacggguuccuggauaucuggaccuacaaugcugagcuccuuguccuguuggaaaacgagcgcacacuagacuaucaugauagcaaugugaagaaccuguacgagaaaguacgaucacaacucaagaacaaugccaaagaaauuggcaacggauguuuugaguucuaucacaagugcgacaauacuuguauggaaaguguuaagaacggcaccuacgauuauccuaaauacuccgaggaagcaaagcugaauagagaggagaucgacggggugaaacuugaaagcacaaggauuuaucagauacuggccaucuacucuaccgucgcuucaaguuuggugcucgucgugagccugggagcgauuuccuuuuggaugugcucuaacgguucguuacagugccggaucuguaucuga

SEQ ID NO: 133510 - RNA, 1701 nt, Artificial Sequence
  derived and/or modified CDS sequence (opt3) from hemagglutinin__InfluenzaA__ADL32037
augaaggccauccuggugguccuccuuuacaccuucgcuacagcaaacgccgacacucugugcauuggcuaucacgcgaauaacagcacggauaccguugacacaguguuggagaagaauguaacugugacccauuccgucaacuuacuggaagauaagcacaaugggaaacuauguaagcucagaggaguggcuccccugcaucuugguaaaugcaacauagccggcuggauccuggggaauccugagugugaaucuuugucaacagcaaguagcugguccuacauuguugagaccucuucgucagacaacggaacuugcuauccaggcgauuuuaucgacuacgaggagcucagggagcagcugagcaguguguccucuuucgaacgguuugagauuuucccgaagacaagcuccuggcccaaucacgauucaaacaagggugucaccgccgcuuguccucaugcaggggccaaaaguuuuuauaagaaucugaucuggcucgugaaaaagggaaacagcuacccaaaauuaucuaaguccuauauaaaugacaagggcaaagaaguacugguucuuuggggcauccaccaccccucaacgagcguggaucaacagaguuuguaccagaacgcugacgccuacgucuucguggggacuucucgcuauuccaagaaauuuaagccugagauugcgauccgaccaaaagugcgugaucaggagggaagaaugaauuacuauuggacccuggucgaacccggugacaagauuacauucgaggcaacuggcaaccuaguugugccuagguacgccuuugcuauggaacggaacgccgggagcggaaucauaauuucggauaccccaguacaugacugcaauacaaccugucaaacgccgaaaggcgcaaucaacacuucucuccccuuccagaauauucacccuaucacaaucgguaagugcccaaaguaugugaaauccaccaagcugcgccuugcuacugggcugagaaacguccccucaauucagaguaggggauuguuuggcgccauagcgggcuucaucgaagggggauggacagguaugguggacggcugguacggguaucaucaccagaaugaacaaggaagcggcuacgccgcagaucucaaauccacccagaacgcuauugacgagaucacgaauaagguuaacucugugauagagaaaaugaauacccaguuuacagccgucgguaaggaguucaaccaccuggaaaagcggauugaaaauuuaaacaaaaagguggaugacggguuccuggauaucuggacuuacaaugcugagcuccuuguacuguuggaaaacgagcgcacccuagacuaucaugauagcaauguuaaaaaccuguacgagaaggugcgaucacagcucaaaaacaaugccaaggaaaucggcaacggauguuuugaguucuaucacaagugcgacaauacauguauggaaagugucaaaaacggcacuuacgauuauccuaaguacuccgaggaagcaaaacugaauagagaggagauugacggggugaaacuugaaagcaccaggaucuaucaaauucuggccauauacucuacagucgcuucaaguuuggugcucguugugagccugggagcgaucuccuuuuggaugugcucuaacgguucguuacagugccggauuuguaucuga

SEQ ID NO: 133511 - RNA, 1701 nt, Artificial Sequence; identical to SEQ ID NO: 130717
  derived and/or modified CDS sequence (opt3) from hemagglutinin__InfluenzaA__ADL32047

SEQ ID NO: 133512 - RNA, 1701 nt, Artificial Sequence
  derived and/or modified CDS sequence (opt3) from hemagglutinin__InfluenzaA__ADL32057
augaaggccauccuggugguccuccuuuacaccuucgcuacagcaaacgccgacacucugugcauuggcuaucacgcgaauaacagcacggauaccguugacacaguguuggagaaaaauguaacugugacccauuccgucaacuuacuggaagauaagcacaaugggaaacuauguaagcucagaggaguggcuccccugcaucuugguaaaugcaacauagccggcuggauccuggggaauccugagugugaaucuuugucaacagcaaguagcugguccuacauuguugagaccucuucgucagacaacggaacuugcuauccaggcgauuuuaucgacuacgaagaacucagggagcagcugagcaguguguccucuuucgaacgguuugagauuuucccgaagacaagcuccuggcccaaucacgauucaaacaagggugucaccgccgcuuguccucaugcaggggccaaaaguuuuuauaagaaucugaucuggcucgugaaaaagggaaacagcuacccaaaauuaucuaaguccuauauaaaugacaagggcaaagaaguacugguucuuuggggcauccaccaccccucaacgagcgcugaucaacagggguuguaccagaacgccgacgcguacguguucgucggaaccagucgcuauucuaagaaauuuaagccugagauugcaauccgaccaaaagugcgugaucaggaggguagaaugaauuacuauuggacucugguggaacccggcgacaagauuacauucgaggccacugggaaccuagucguuccuagguacgcuuuugccauggaacggaacgcaggauccggcaucauaauuagcgauaccccagugcaugacugcaauacaaccugucaaacgccgaaaggugcuaucaacacuucgcuccccuuccagaauauucacccuaucacaaucgggaagugcccaaaguauguaaaaggaaccaagcugcgccuugccacuggccugagaaacgugcccucuauucaguccaggggcuuguuuggggcgauagccggauucaucgaggguggcuggacagggauggucgacggaugguacggcuaucaucaccagaaugaacaagguucaggguacgcagcugaucucaaaaguacccagaacgccauugacgagaucacgaauaaggugaacagcguuauagagaaaaugaauacccaguuuacagcugugggcaaggaguucaaccaccuggagaagcggauugaaaauuuaaacaaaaaggucgaugacggauuccuggauaucuggacuuacaaugccgagcuccuugugcuguuggaaaacgagcgcacccuagacuaucaugauuccaauguaaagaaccuguacgagaagguucgaucucagcucaaaaacaaugcaaaggaaaucggcaacggguguuuugaguucuaucacaagugcgacaauacauguauggaaagcgugaaaaacggaacuuacgauuauccuaaguacucagaggaagccaaacugaauagagaggagauugacggugucaaacuugaaaguaccaggaucuaucaaauucuggcuauauacuccacaguggcgagcucuuugguccucgugguuucacugggcgcaaucaguuuuuggaugugcagcaacggguccuuacagugccggauuuguaucuga

SEQ ID NO: 133513 - RNA, 1701 nt, Artificial Sequence; identical to SEQ ID NO: 130717
  derived and/or modified CDS sequence (opt3) from hemagglutinin__InfluenzaA__ADL32090

SEQ ID NO: 133514 - RNA, 1701 nt, Artificial Sequence; identical to SEQ ID NO: 130717
  derived and/or modified CDS sequence (opt3) from hemagglutinin__InfluenzaA__ADL32114

SEQ ID NO: 133515 - RNA, 1701 nt, Artificial Sequence; identical to SEQ ID NO: 130717
  derived and/or modified CDS sequence (opt3) from hemagglutinin__InfluenzaA__ADL32344

SEQ ID NO: 133516 - RNA, 1701 nt, Artificial Sequence; identical to SEQ ID NO: 131164
  derived and/or modified CDS sequence (opt3) from hemagglutinin__InfluenzaA__ADL32354

SEQ ID NO: 133517 - RNA, 1701 nt, Artificial Sequence
  derived and/or modified CDS sequence (opt3) from hemagglutinin__InfluenzaA__ADL32364
augaaggccauccuggugguccuccuuuacaccuucgcuacagcaaacgccgacacucugugcauuggcuaucacgcgaauaacagcacggauaccguugacacaguguuggagaagaauguaacugugacccauuccgucaacuuacuggaagauaagcacaaugggaaacuauguaagcucagaggaguggcuccccugcaucuugguaaaugcaacauagccggcuggauccuggggaauccugagugugaaucuuugucaacagcaauuaguuggagcuacaucguugagaccuccucuucggacaacggaacuugcuauccaggcgauuuuauugacuacgaggagcucagggagcagcugucaagcgugaguuccuucgaacgguuugagaucuucccgaagacaucuagcuggcccaaucacgauuccaacaagggugucaccgccgcuuguccucaugcaggggccaaaucauuuuauaagaaucugauauggcucgugaaaaagggaaacaguuacccaaaauuaagcaagucuuauaucaaugacaagggcaaagaaguacugguucuuuggggcauucaccaccccuccacgucagcugaucaacagagcuuguaccagaacgccgacacuuacguguucgucgggaccagucgcuauucuaagaaauuuaagccugagaucgcgauucgaccaaaagugcgugaucaggagggaagaaugaauuacuauuggacacugguggaacccggugacaagaucacuuucgaggcaaccggcaaccuagucguuccuagguacgccuuugcuauggaacggaacgccggguccggaauaauuaucagcgauacaccagugcaugacugcaauaccacgugucaaacuccgaaaggcgcaauuaacacaucgcuccccuuccagaauauccacccuaucaccauugguaagugcccaaaguauguaaaaucuacuaagcugcgccuugcuacagggcugagaaacgugcccuccauacagucaaggggauuguuuggcgccaucgcgggcuucauugaagggggauggaccgguauggucgacggcugguacggguaucaucaccagaaugaacaaggaaguggcuacgccgcagaucucaaaagcacgcagaacgcuaucgacgagauaaccaauaaggugaacuccguuauugagaaaaugaauacacaguuuacugccguggguaaggaguucaaccaccuggaaaagcggaucgaaaauuuaaacaaaaagaucgaugacggguuccuggauauuuggaccuacaaugcugagcuccuuguccuguuggaaaacgagcgcacacuagacuaucaugauucuaaugugaaaaaccuguacgagaagguacgaagccagcucaaaaacaaugccaaggaaaucggcaacggauguuuugaguucuaucacaagugcgacaauacuuguauggaaucaguuaaaaacggcaccuacgauuauccuaaguacagugaggaagcaaaacugaauagagaggagauugacggggugaaacuugaauccacaaggauauaucaaauccuggccauuuacagcaccgucgcuucuucauuggugcucgucgugagucugggagcgaucagcuuuuggaugugcuccaacgguucuuuacagugccggaucuguauuuga

SEQ ID NO: 133518 - RNA, 1701 nt, Artificial Sequence; identical to SEQ ID NO: 130717
  derived and/or modified CDS sequence (opt3) from hemagglutinin__InfluenzaA__ADL32374

SEQ ID NO: 133519 - RNA, 1701 nt, Artificial Sequence
  derived and/or modified CDS sequence (opt3) from hemagglutinin__InfluenzaA__ADL32384
augaaggccauccuggugguccuccuuuacaccuucgcuacagcaacugccgacacgcugugcauuggcuaucacgcgaacaauagcaccgauacaguugacacuguguuggagaagaacguaaccgugacacauuccgucaauuuacuggaagauaagcacaacgggaaacuauguaagcucagaggaguggcuccccugcaucuugguaaaugcaauauagccggcuggauccuggggaacccugagugugaaucuuugucaaccgcaaguagcugguccuacauuguugagacuucuucgucagacaauggaacaugcuauccaggcgauuuuaucgacuacgaggagcucagggagcagcugagcaguguguccucuuucgaacgguuugagauuuucccgaagaccagcuccuggcccaaccacgauucaaauaagggugucacggccgcuuguccucaugcaggggccaaaaguuuuuauaagaaccugaucuggcucgugaaaaagggaaauagcuacccaaaauuaucuaaguccuauauaaacgacaagggcaaagaaguacugguucuuuggggcauccaccaccccucaacuagcgcugaucaacagaguuuguaccagaaugccgacgcguacguguucgucgggaccucucgcuauuccaagaaauuuaagccugagauugcaauccgaccaaaagugcgugaucaggagggaagaaugaacuacuauuggacacugguggaacccggugacaagauuacuuucgaggccaccggcaaucuagucguuccuagguacgcuuuugccauggaacggaacgcagggagcggaaucauaauuucggauacaccagugcaugacugcaacaccacgugucaaacuccgaaaggcgcuaucaauacaucucuccccuuccagaacauucacccuaucaccaucgguaagugcccaaaguauguaaaauccacuaagcugcgccuugccacagggcugagaaaugugcccucaauucagaguaggggauuguuuggcgcgauagccggcuucaucgaagggggauggaccgguauggucgacggcugguacggguaucaucaccagaacgaacaaggaagcggcuacgcagcugaucucaaauccacgcagaaugccauugacgagaucaccaacaagguaaauucuguuauagagaaaaugaacacacaguuuacugcuguggguaaggaguucaaucaccuggaaaagcggauugaaaacuuaaauaaaaaggucgaugacggguuccuggauaucuggaccuacaacgccgagcuccuugugcuguuggaaaaugagcgcacacuagacuaucaugauagcaacgugaaaaaucuguacgagaagguucgaucacagcucaaaaacaacgcaaaggaaaucggcaauggauguuuugaguucuaucacaagugcgacaacacuuguauggaaagugugaaaaauggcaccuacgauuauccuaaguacuccgaggaagccaaacugaacagagaggagauugacggggucaaacuugaaagcacaaggaucuaucaaauucuggcuauauacucuaccguggcgucaaguuugguccucgugguuagccugggagcaaucuccuuuuggaugugcucuaaugguucguuacagugccggauuuguaucuga

SEQ ID NO: 133520 - RNA, 1701 nt, Artificial Sequence
  derived and/or modified CDS sequence (opt3) from hemagglutinin__InfluenzaA__ADL32394
augaaggccauccuggugguccuccuuuacaccuucgcuacagcaaacgccgacacucugugcauuggcuaucacgcgaauaacagcacggauaccguugacacaguguuggagaaaaauguaacugugacccauuccgucaacuuacuggaagauaagcacaaugggaaacuauguaagcucagaggaguggcuccccugcaucuugguaaaugcaacauagccggcuggauccuggggaauccugagugugaaucuuuuucaacaaccaguagcugguccuacauuguugagacuucuucgucagacaacggaacaugcuauccaggcgauuucaucgacuacgaagaguugagggagcagcucagcaguguguccucuuuugaacgguucgagauuuuuccgaagaccagcuccuggcccaaucacgauucaaacaagggugucacggcagccuguccucaugcuggggcaaaaaguuucuauaagaaucugaucuggcuggugaaaaagggaaacagcuacccaaaacucucuaaguccuauauaaaugacaagggcaaagaaguauuaguucuguggggcauccaccaccccucaacuagcgccgaucaacagagucuuuaccagaacgcugacaccuacguguuugucgggacaucucgcuauuccaagaaauucaagccugagauugccauccgaccaaaagugcgugaucaggagggaagaaugaauuacuauuggacuuugguggaacccggugacaagauuaccuuugaggcgacaggcaaccuggucguuccuagguacgcauucgccauggaacggaacgcugggagcggaaucauaauuucggauaccccagugcaugacugcaauacgacuugucaaacaccgaaaggcgccaucaacaccucucuacccuuucagaauauucacccuaucacuaucgguaagugcccaaaguauguaaaauccacaaagcuccgccuggcaaccgggcuuagaaacgugcccucaauucagaguaggggacuguucggcgcuauagccggcuuuaucgaagggggauggacggguauggucgacggcugguacggguaucaucaccagaaugaacaaggaagcggcuacgcggccgauuugaaauccacccagaacgcaauugacgagaucacaaauaaggugaacucuguuauagagaaaaugaauacucaguucaccgcuguggguaaggaguucaaccaccucgagaagcggauugaaaaucugaacaaaaagaucgaugacggguuuuuagauaucuggacauacaaugccgagcugcucguccuucuggaaaacgagcgcacuuuggacuaucaugauagcaaugugaaaaaccuauacgagaagguacgaucacagcugaaaaacaaugcuaaggaaauuggcaacggauguuucgaguuuuaucacaagugcgacaauaccuguauggaaaguguuaaaaacggcacauacgauuauccuaaguacuccgaggaagccaaacucaauagagaggagaucgacggggugaagcuggaaagcaccaggauuuaucaaauacuugcaaucuacucuacugucgccucaagucugguguuggucgugagccucggagcuauuuccuucuggaugugcucuaacgguucgcugcagugccggaucuguaucuga

SEQ ID NO: 133521 - RNA, 1701 nt, Artificial Sequence; identical to SEQ ID NO: 130717
  derived and/or modified CDS sequence (opt3) from hemagglutinin__InfluenzaA__ADL32404

SEQ ID NO: 133522 - RNA, 1701 nt, Artificial Sequence
  derived and/or modified CDS sequence (opt3) from hemagglutinin__InfluenzaA__ADL32414
augaaggccauccuggugguccuccuuuacaccuucgcuacagcaaacgccgacacucugugcauuggcuaucacgcgaauaacagcacggauaccguugacacaguguuggagaagaauguaacugugacccauuccgucaacuuacuggaagauaagcacaaugggaaacuauguaagcucagaggaguggcuccccugcaucuugguaaaugcaacauagccggcuggauccuggggaauccugagugugaaucuuugucaacagcaaguagcugguccuacauuguugagaccucuucgucagacaacggaacuugcuauccaggcgauuuuaucgacuacgaggagcucagggagcagcugagcaguguguccucuuucgaacgguuugagauuuucccgaagacaagcuccuggcccaaucacgauucaaacaagggugucaccgccgcuuguccucaugcaggggccaaaaguuuuuauaagaaucugaucuggcucgugaaaaagggaaacagcuacccaaaauuaucuaaguccuauauaaaugacaagggcaaagaaguacugguucuuuggggcauccaccaccccucaacgagcgcugaucaacagaguuuguaccagaacgccgacgcguacguguucgucgggacuucucgcuauuccaagaaauuuaagccugagauugcaauccgaccaaaagugcgugcccaggagggaagaaugaauuacuauuggacccugguggaacccggugauaagauuacauucgaggcuacuggcaaccuagucguuccuagguacgccuuugcaauggaacggaacgcugggagcggaaucauaauuucggacaccccagugcaugauugcaauacaaccugucaaacgccgaaaggcgccaucaacacuucucuccccuuccagaauauucacccuaucacaaucgguaagugcccaaaguauguaaaauccaccaagcugcgccuugcgacugggcugagaaacgugcccucaauucagaguaggggauuguuuggcgccauagcaggcuucaucgaagggggauggacagguauggucgacggcugguacggguaucaucaccagaaugaacaaggaagcggcuacgcugccgaccucaaauccacccagcacgcuauugaugagaucacgaacaagguaaauucuguuauagagaaaaugaacacccaguuuacagccguggguaaggaguucaaucaucuggaaaagcggauugaaaacuuaaauaaaaaggucgacgauggguuccuggacaucuggacuuacaacgcagagcuccuugugcuguuggaaaaugagcgcacccuagauuaucacgacagcaacgugaaaaaucuguacgagaagguucgaucacagcucaaaaacaacgccaaggaaaucggcaauggauguuuugaguucuaucauaagugcgauaacacauguauggaaagugugaaaaauggcacuuacgacuauccuaaguacuccgaggaagcuaaacugaacagagaggagauugauggggucaaacuugaaagcaccaggaucuaucaaauucuggcgauauacucuacaguggcaucaaguuugguccucgugguuagccugggagccaucuccuuuuggaugugcucuaaugguucguuacagugccggauuuguaucuga

SEQ ID NO: 133523 - RNA, 1701 nt, Artificial Sequence
  derived and/or modified CDS sequence (opt3) from hemagglutinin__InfluenzaA__ADL32424
augaaggccauccuggugguccuccuuuacaccuucgcuauugcaaacgccgacacacugugcauaggcuaucacgcgaauaacagcacugauacgguugacaccguguuggagaagaauguaacagugacucauuccgucaacuuacuggaagauaagcacaaugggaaacuauguaagcucagaggaguggcuccccugcaucuugguaaaugcaacaucgccggcuggauucuggggaauccugagugugaaucuuugucaaccgcaaguagcugguccuacaucguugagacaucuucgucagacaacggaaccugcuauccaggcgauuuuauugacuacgaggagcucagggagcagcugagcaguguguccucuuucgaacgguuugagaucuucccgaagacuagcuccuggcccaaucacgauucaaacaagggugucacagccgcuuguccucaugcaggggccaaaaguuuuuauaagaaucugauauggcucgugaaaaagggaaacagcuacccaaaauuaucuaaguccuauaucaaugacaagggcaaagaaguacugguucuuuggggcauucaccaccccucaaccagcgcugaucaacagaguuuguaccagaacgccgacgcguacguguucgucgggacgucucgcuauuccaagaaauuuaagccugagaucgcaauucgaccaaaagugcgugaucaggagggaagaaugaauuaccauuggacucugguggaacccggugacaagaucaccuucgaggccacaggcaaccuagucguuccuagguaugcuuuugccauggaacggaacgcagggagcggaauaauuaucucggauacuccagugcacgacugcaauaccacaugucaaaccccgaaaggcgcuauuaacacgucucuccccuuccagaauauccauccuaucacuauugguaagugcccaaaguacguaaaauccacaaagcugcgccuugccaccgggcugagaaacgugcccucaauacagaguaggggauuguuuggcgcgaucgccggcuucauugaagggggauggacugguauggucgacggcugguauggguaccaccaccagaaugaacaaggaagcggcuaugcagcugaucucaaauccacacagcaugccaucgacgagauaaccaacaagguaaauucuguuauugagaaaaugaacacgcaguuuaccgcuguggguaaggaguucaaucaccuggaaaagcggaucgaaaacuuaaauaaaaaggucgaugacggguuccuggauaucuggacauacaacgccgagcuccuugugcuguuggaaaaugagcgcacucuagacuaccaugauagcaacgugaaaaaucuguaugagaagguucgaucacagcucaaaaacaacgcaaaggaaauuggcaauggauguuuugaguucuaccacaagugcgacaacaccuguauggaaagugugaaaaauggcacauaugauuacccuaaguauuccgaggaagccaaacugaacagagaggagaucaauggggucaaacuugaaagcacuaggauuuaccaaauacuggcuaucuauucuaccguggcgucaaguuugguccucgugguuagccugggagcaauuuccuuuuggaugugcucuaacgguucguuacagugccggaucuguaucuga

SEQ ID NO: 133524 - RNA, 1701 nt, Artificial Sequence
  derived and/or modified CDS sequence (opt3) from hemagglutinin__InfluenzaA__ADL32434
augaaggccauccuggugguccuccuuuacaccuucgcuacagcaaacgccgacacucugugcauuggcuaucacgcgaauaacagcacggauaccguugacacaguguuggagaaaaauguaacugugacccauuccgucaacuuacuggaagauaagcacaaugggaaacuauguaagcucagaggaguggcuccccugcaucuugguaaaugcaacauagccggcuggauccuggggaauccugagugugaaucuuugucaacagcaaguagcugguccuacauuguugagaccucuucgucagacaacggaacuugcuauccaggcgauuuuaucgacuacgaggagcucagggagcagcugagcaguguguccucuuucgaacgguuugagauuuucccgaagacaagcuccuggcccauccacgauucaaauaagggugucaccgccgcuuguccucaugcaggggccaaaaguuuuuauaagaaccugauauggcucgugaaaaagggaaauagcuacccaaaauuaucuaaguccuauaucaacgacaagggcaaagaaguacugguucuuuggggcauucaccaccccucaacgagcgcugaucaacagaguuuguaccagaaugccgacgcguacguguucgucgggacuucucgcuauuccaagaaauuuaagccugagaucgcaauucgaccaaaagugcgugaucaggagggaagaaugaacuacuauuggauccugguggaacccggugacaagauaaccuucgaggccacaggcaaucuagucguuccuagguacgcuuuugccauggaacggaacgcagggagcggaauuaucauuucggauacuccagugcaugacugcaacaccacaugucaaaccccgaaaggcgcuaucaauacgucucuccccuuccagaacauccacccuauuacuauagguaagugcccaaaguauguaaaauccacaaagcugcgccuugccaccgggcugagaaaugugcccucaauccagaguaggggauuguuuggcgcgauugccggcuucaucgaagggggauggacugguauggucgacggcugguacggguaucaucaccagaacgaacaaggaagcggcuacgcagcugaucucaaauccacacagcacgccauagacgagauuaccaauaaggugaacucuguuaucgagaaaaugaauacgcaguuuaccgcuguggguaaggaguucaaccaucuggaaaagcggaucgaaaauuuaaacaaaaaggucgaugacggguuccuggauauuuggacauacaaugccgagcuccuugugcuguuggaaaacgagcgcacucuagacuaucacgauagcaauguaaagaaccuguacgagaagguucgaucacagcucaaaaauaacgcaaaggaaaucggcaacggauguuuugaguucuaucauaagugcgacaauaccuguauggaaagugugaaaaacggcacauacgauuauccuaaguacuccgaggaagccaaacugaauagagaggagauugacggggucaaacuugaaagcacuaggauauaucaaauccuggcuauuuacucuaccguggcgucaaguuugguccucgugguuagccugggagcaaucuccuuuuggaugugcucuaacgguucguuacagugccggaucuguauuuga

SEQ ID NO: 133525 - RNA, 1701 nt, Artificial Sequence; identical to SEQ ID NO: 132137
  derived and/or modified CDS sequence (opt3) from hemagglutinin__InfluenzaA__ADL32444

SEQ ID NO: 133526 - RNA, 1701 nt, Artificial Sequence
  derived and/or modified CDS sequence (opt3) from hemagglutinin__InfluenzaA__ADL32454
auggaggccauccuggugguccuccuuuacaccuucgcuacagcaaacgccgacacucugugcauuggcuaucacgcgaauaacagcacggauaccguugacacaguguuggaaaagaauguaacugugacccauuccgucaacuuacuggaggauaaacacaaugggaagcuauguaaacucagaggaguggcuccccugcaucuugguaagugcaacauagccggcuggauccuggggaauccugaaugugagucuuugucaacagcaaguagcugguccuacauuguugaaaccucuucgucagacaacggaacuugcuauccaggcgauuuuaucgacuacgaggagcucagggaacagcugagcaguguguccucuuucgagcgguuugaaauuuucccgaaaacaagcuccuggcccaaucacgauucaaacaagggugucaccgccgcuuguccucaugcaggggccaagaguuuuuauaaaaaucugaucuggcucgugaagaaaggaaacagcuacccaaaguuaucuaaauccuauauaaaugacaagggcaaggagguacugguucuuuggggcauccaccaccccucaacgagcgcugaucaacagaguuuguaccagaacgccgacgcguacguguucgucgggucuucccgcuauagcaaaaaguuuaaaccugagauugcaauccgaccaaaggugcgugaucaggaaggaagaaugaauuacuauuggacucugguggagcccggugacaaaauuaccuucgaagccacaggcaaccuagucguuccuagguacgcuuuugccauggagcggaacgcagggucgggaaucauaauuucugauacuccagugcaugacugcaauaccacaugucaaaccccgaagggcgcuaucaacacgucccuccccuuccacaauauucauccuaucacuaucgguaaaugcccaaaguauguaaagucaacaaaacugcgccuugccaccgggcugagaaacgugcccaguauucagagcaggggauuguuuggcgcgauagccggcuucaucgaagggggauggacugguauggucgacggcugguacggguaucaccaccagaaugagcagggauccggcuacgcagcugaucucaagucuacacaaaacgccauugacgagaucaccaauaaagugaacagcguuauagaaaagaugaauacgcaguuuaccgcuguggguaaagaguucaaccaucuggaaaagcggauugagaauuuaaacaagaaagucgaugacggguuccuggauaucuggacauacaaugccgaacuccuugugcuguuggagaacgagcgcacucuagacuaucacgauucaaauguaaagaaccuguacgaaaaaguucgaagucagcucaagaacaaugcaaaagagcugggcaacggauguuuugaguucuaucauaagugcgacaauaccuguauggaauccgugaagaacggcacauacgauuauccuaaauacagcgaagaggccaaacuuaauagagaggaaaucgacggggucaagcuggagucuacuaggauuuaucagaucuuggcuauuuacucaaccguggcgaguagccucguccuggugguuuccuuaggagcaauaucuuuuuggaugugcucgaacgguagccugcaaugccggaucuguauuuga

SEQ ID NO: 133527 - RNA, 1701 nt, Artificial Sequence; identical to SEQ ID NO: 132884
  derived and/or modified CDS sequence (opt3) from hemagglutinin__InfluenzaA__ADL32464

SEQ ID NO: 133528 - RNA, 1701 nt, Artificial Sequence; identical to SEQ ID NO: 132884
  derived and/or modified CDS sequence (opt3) from hemagglutinin__InfluenzaA__ADL32484

SEQ ID NO: 133529 - RNA, 1701 nt, Artificial Sequence
  derived and/or modified CDS sequence (opt3) from hemagglutinin__InfluenzaA__ADL32504
augaaggccauccuggugguccuccuuuacaccuucgcuacagcaaacgccgacacucugugcauuggcuaucacgcgaauaacagcacggauaccguugacacaguguuggagaagaauguaacugugacccauuccgucaacuuacuggaagauaagcacaaugggaaacuauguaagcucagaggaguggcuccccugcaucuugguaaaugcaacauagccggcuggauccuggggaauccugagugugaaucuuugucaacagcaaguagcugguccuacauuguugagaccucuucgucagacaacggaaugugcuauccaggcgauuuuaucgacuacgaggagcucagggagcagcugagcaguguguccucuuucgaacgguuugagauuuucccgaagacuagcuccuggcccaaucacgauucaaacaagggugucacagccgcuuguccucaugcaggggccaaaaguuuuuauaagaaucugaucuggcucgugaaaaagggaaacagcuacccaaaauuaucuaaguccuauauaaaugacaagggcaaagaaguacugguucuuuggggcauccaccaccccucaaccagcgcugaucaacagaguuuguaccagaacgccgacgcguacguguucgucgggacgucucgcuauuccaagaaauuuaagccugagauugcaauccgaccaaaagugcgugaucaggagggaagaaugaauuacuauuggacucugguggaacccggugacaagauuaccuucgaggccacaggcaaccuagucguuccuagguacgcuuuugccauggaacggaacgcagggagcggaaucauaauuucggauacuccagugcaugacugcaauaccacaugucaaaccccgaaaggcgcuaucaacacgucucuccccuuccagaauauucacccuaucacuaucgguaagugcccaaaguauguaaaauccacaaagcugcgccuugccaccgggcugagaaacgugcccucaauucagaguaggggauuguuuggcgcgauagccggcuucaucgaagggggauggacugguauggucgacggcugguacggguaucaucaccagaaugaacaaggaagcggcuacgcagcugaucucaaauccacacagcacgccauugacgagaucaccaacaagguaaauucuguuauagagaaaaugaacacgcaguuuaccgcuguggguaaggaguucaaucaucuggaaaagcggauugaaaacuuaaauaaaaaggucgaugacggguuccuggauaucuggacauacaacgccgagcuccuugugcuguuggaaaaugagcgcacucuagacuaucacgauagcaacgugaaaaaucuguacgagaagguucgaucacagcucaaaaacaacgcaaaggaaaucggcaauggauguuuugaguucuaucauaagugcgacaacaccuguauggaaagugugaaaaauggcacauacgauuauccuaaguacuccgaggaagccaaacugaacagagaggagauugacggggucaaacuugaaagcacuaggaucuaucaaauucuggcuauauacucuaccguggcgucaaguuugguccucgugguuagccugggagcaaucuccuuuuggaugugcucuaaugguucguuacagugccggauuuguaucuga

SEQ ID NO: 133530 - RNA, 1701 nt, Artificial Sequence; identical to SEQ ID NO: 132137
  derived and/or modified CDS sequence (opt3) from hemagglutinin__InfluenzaA__ADL32514

SEQ ID NO: 133531 - RNA, 1701 nt, Artificial Sequence; identical to SEQ ID NO: 132884
  derived and/or modified CDS sequence (opt3) from hemagglutinin__InfluenzaA__ADL32524

SEQ ID NO: 133532 - RNA, 1701 nt, Artificial Sequence
  derived and/or modified CDS sequence (opt3) from hemagglutinin__InfluenzaA__ADL32544
augaaggccauccuggugguccuccuuuacaccuucgcuacaagcaacgcagacacucugugcauuggcuaucacgccaauaacuccacggauaccguugacacaguguuggagaaaaauguaacugugacccauucugucaacuuacuggaagauaagcacaaugggaaacuauguaagcucagaggaguggcgccccugcaucuugguaaaugcaacauagcuggcuggauccuggggaauccugagugugaaucauugaguacagccagcuccuggucuuacauuguugagaccucgucaagcgacaacggaacuugcuauccaggcgauuuuaucgacuacgaggagcucagggagcagcugaguuccgugucuagcuucgaacgguuugagauuuucccgaagacauccucauggcccaaucacgauaguaacaagggugucaccgcagccuguccucaugcuggggcaaagagcuuuuauaagaaucugaucuggcucgugaaaaagggaaacucuuacccaaaauuacgcaaguccuauauaaaugacaagggcaaagaaguacugguucuuuggggcauccaccaccccucaacgagcgccgaucaacagaguuuguaccagaacgcugacgccuacguguucgucgggacuucucgauauuccaagaaauuuaagccugagauugcgauccguccaaaagugagagaucaggagggaaggaugaauuacuauuggacccugguggaacccggugacaagauuacauucgaggcaacuggcaaccuagucguuccucgguacgccuuugcuauggaacgcaacgccgggagcggaaucauaauuucggauaccccagugcaugacugcaauacaaccugucaaacgccgaaaggcgcaaucaacacuucucuccccuuccagaauauucacccuaucacaaucgguaagugcccaaaguauguaaaauccaccaagcugagacuugcuacugggcugaggaacgugcccucaauucagagucggggauuguuuggcgccauagcgggcuucaucgaagggggauggacagguauggucgacggcugguacggguaucaucaccagaaugaacaaggaagcggcuacgccgcagaucucaaauccacccagcacgcuauugacgagaucacgaacaagguaaauucuguuauagagaaaaugaacacccaguuuacagccguggguaaggaguucaaucaucuggaaaagcgcauugaaaacuuaaauaaaaaggucgaugacggguuccuggauaucuggacuuacaacgcugagcuccuugugcuguuggaaaaugagcgaacccuagacuaucacgauagcaacgugaaaaaucuguacgagaagguuagaucacagcucaaaaacaacgccaaggaaaucggcaauggauguuuugaguucuaucauaagugcgacaacacauguauggaaagugugaaaaauggcacuuacgauuauccuaaguacuccgaggaagcaaaacugaacagggaggagauugacggggucaaacuugaaagcacccggaucuaucaaauucuggccauauacucuacaguggcuucaaguuugguccucgugguuagccugggagcgaucuccuuuuggaugugcucuaaugguucguuacagugccguauuuguaucuga

SEQ ID NO: 133533 - RNA, 1701 nt, Artificial Sequence; identical to SEQ ID NO: 133318
  derived and/or modified CDS sequence (opt3) from hemagglutinin__InfluenzaA__ADL32554

SEQ ID NO: 133534 - RNA, 1701 nt, Artificial Sequence; identical to SEQ ID NO: 132330
  derived and/or modified CDS sequence (opt3) from hemagglutinin__InfluenzaA__ADL32670

SEQ ID NO: 133535 - RNA, 1701 nt, Artificial Sequence
  derived and/or modified CDS sequence (opt3) from hemagglutinin__InfluenzaA__ADL32690
augaaggccauccuggugguccuccuuuacaccuucgcuacagcaaacgccgacacucugugcauuggcuaucacgcgaauaacagcacggauaccguugacacaguguuggagaaaaauguaacugugacccauuccgucaacauauuagaagauaagcacaaugggaaacuguguaagcuaagaggaguggcuccccuccaucuggguaaaugcaacaucgccggcuggauucuugggaauccugagugugaaucucugucaacagcaaguagcugguccuacaucguugagaccucuucgucagacaacggaacuugcuauccaggcgauuuuauugacuacgaagaguugagggagcagcucagcaguguguccucuuucgaacgguuugagaucuucccgaagacaagcuccuggcccaaucacgauucaaacaagggugucaccgccgcuuguccucaugcaggggccaaaaguuuuuauaagaaucugauguggcuggugaaaaagggaaacagcuacccaaaacucucuaaguccuauauaaaugacaagggcaaagaaguauuaguucuguggggcauccaccaccccucaacgagcgcugaucaacagagucuuuaccagaacgccgacgcguacguguucgucgggucuucccgcuauagcaagaaauuuaagccugagauugcaauccgaccaaaagugcgugaucaggagggaagaaugaauuacuauuggacuuugguggaacccggugacaagauuaccuucgaggccacaggcaaccuggucguuccuagguacgcuuuugccauggaacggaacgcagggucgggaaucauaauuucugauacuccagugcaugacugcaauaccacaugucaaaccccgaaaggcgcuaucaacacgucccuacccuuccagaauauucacccuaucacuaucgguaagugcccaaaguauguaaaaucaacaaagcuccgccuggccaccgggcuuagaaacgugcccaguauucagagcaggggacuguuuggcgcgauagccggcuucaucgaagggggauggacugguauggucgacggcugguacggguaucaucaccagaaugaacaaggauccggcuacgcagcugauuugaaaucuacacagaacgccauugacgagaucaccaauaaggugaacagcguuauagagaaaaugaauacgcaguuuaccgcuguggguaaggaguucaaccaccucgagaagcggauugaaaaucugaacaaaaaggucgaugacggguucuuagauaucuggacauacaaugccgagcugcucgugcuucuggaaaacgagcgcacuuuggacuaucaugauucaaauguuaaaaaccuauacgagaagguacgaagucagcugaaaaacaaugcaaaggaaaucggcaacggauguuuugaguucuaucacaagugcgacaauaccuguauggaauccgugaaaaacggcacauacgauuauccuaaguacagcgaggaagccaaacucaauagagaggagauugacggggucaagcuggaaucuacuaggaucuaucaaauucuugcuauauacucaaccguggcgaguagccuggucuuggugguuucccucggagcaaucucuuuuuggaugugcucgaacgguagccugcagugccggauuuguaucuga

SEQ ID NO: 133536 - RNA, 1701 nt, Artificial Sequence; identical to SEQ ID NO: 130897
  derived and/or modified CDS sequence (opt3) from hemagglutinin__InfluenzaA__ADL32710

SEQ ID NO: 133537 - RNA, 1701 nt, Artificial Sequence; identical to SEQ ID NO: 130717
  derived and/or modified CDS sequence (opt3) from hemagglutinin__InfluenzaA__ADL32720

SEQ ID NO: 133538 - RNA, 1701 nt, Artificial Sequence; identical to SEQ ID NO: 132489
  derived and/or modified CDS sequence (opt3) from hemagglutinin__InfluenzaA__ADL32730

SEQ ID NO: 133539 - RNA, 1701 nt, Artificial Sequence; identical to SEQ ID NO: 132489
  derived and/or modified CDS sequence (opt3) from hemagglutinin__InfluenzaA__ADL32740

SEQ ID NO: 133540 - RNA, 1701 nt, Artificial Sequence; identical to SEQ ID NO: 131661
  derived and/or modified CDS sequence (opt3) from hemagglutinin__InfluenzaA__ADL39137

SEQ ID NO: 133541 - RNA, 1698 nt, Artificial Sequence
  derived and/or modified CDS sequence (opt3) from hemagglutinin__InfluenzaA__ADL39148
augaaggugaaacugcucguccuucugugcaccuucacagccacuuacgcugacacgaucuguauuggcuaucacgcaaacaauagcaccgauacaguugacacuguguuggagaagaacguaaccgugacacauuccgucaauuuacuggaaaacucucacaaugggaaacuaugccuccugaagggaauagcgccccuucagcuggguaacuguucaguggccggcuggaucuuggggaauccugagugcgaacuccugauuaguaaagagagcugguccuacaucguugaaaagccaaacccggagaauggaaccuguuaucccggccauuuugcugauuacgaggaacugagagagcaacucucuucggugagcucauucgaaagguuugagauuuucccuaaggagaguuccuggccaaaccacacugucacaggugugucugccagcugcucccauaauggggaaucaaguuuuuaucggaacuuacuguggcuuaccggcaaaaauggauuguaccccaaccugagcaagucuuaugcaaauaacaaagagaaggaaguucuaguacucuggggcgugcaccacccuccaaacaucgucgaccagaaaacgcuguaccgcacugagaaugccuacguguccguggucucaagccauuauagucgaaaguucacccccgaaauagcuaagcguccuaaaguuagagaucaggaggggaggaucaacuacuauuggacacuucuggagccaggagacacuauuaucuuugaagcaaaugguaacuugauugccccgcgguacgcuuucgcccucucucgcgauuuuggcuccgggaucauaaauagcaacgcgcccauggacaagugugaugcaaaaugccagaccccucaaggagccauuaauucgucucugccauuccagaacgugcaccccguaacaaucggcgaguguccuaaguaugugagauccgcuaaauuaaggauggucaccggucugcggaauauuccaucaauccagagucgcgggcucuuuggagccaucgcaggcuucauugaaggcggguggacgggaaugguggacgguugguacggcuaucaucaccagaacgagcaagggagcggauacgcugccgaucagaaguccacucagaaugcgauaaacggcaucacaaauaaaguuaacucugugauugaaaagaugaauacccaguuuacugccgucgguaaggaguucaacaaacuugagcgaagaauggaaaaccugaauaagaaaguggacgauggguucaucgacauauggacauacaacgcagaguugcuaguacugcucgaaaaugagaggacccuggacuuucacgauagcaacguuaagaaucuuuaugaaaaagugaagucacaacugaagaacaaugcuaaagagauuggcaacggaugcuucgaguuuuaccauaaguguaaugacgaaugcauggagagugucaaaaacggcacguaugauuaccccaaguauuccgaagagagcaaauugaaucgggagaagaucgacggggugaagcucgaaucuaugggagucuaccagauccuggccauuuauucaaccguggcuaguagcuuaguucugcuagugucccucggugccaucucuuucuggaugugcucgaacggcagccugcagugucguauuugcauauga

SEQ ID NO: 133542 - RNA, 1701 nt, Artificial Sequence
  derived and/or modified CDS sequence (opt3) from hemagglutinin__InfluenzaA__ADL39159
augaagaccaucauugcccugagcuacauacucugccuuguguucgcucagaaacugcccggcaacgacaauuccacagcaacuuuguguuuagggcaccaugccgucccuaacggaacgaucguuaagaccauuacaaaugaucaaaucgaggugacuaacgcgaccgaacugguacagucuucaaguacaggugagauuugcgacagcccacaccagaucauagauggcgaaaauuguacccuaaucgacgcucuccugggggauccgcagugcgacggauuucaaaacaaaaagugggaucuuuucguggagagauccaaagccuauucuaauuguuaccccuaugacgucccugauuacgcaucgcugaggucauugguggccagcaguggcacucucgaauuuaacaaugaguccuucaacuggacagguguuacccagaaugggacgucuagcgcuugcauucggcgcuccaacaauucauuuuucagucgacugaacuggcugacucaucucaaguuuaaguauccagcauuaaaugugaccaugcccaacaacgagcaguucgacaaacuguacaucuggggaguccaccauccuggcacagauaaugaccagauuuuucuuuaugcccaagcuagcggccguaucacugugucuaccaagagaucccagcagacaguaauaccaaacauugggucaaggccccggguucgcaauaucccuagcagaauuaguaucuacuggaccaucgugaaaccaggagauauuuugcugauaaacucuacggguaaucuaaucgccccgaggggcuacuucaagauucgguccgggaaaagcucgaucaugcgcucugacgcgcccauaggaaaguguaacuccgaaugcauuacuccuaauggcucaaucccaaacgacaagcccuuucagaaugucaaccgaaucacauauggugcauguccuagauacgugaaacaaaauacccucaagcuggccacugggaugaggaacgugccagagaaacagacacggggaauuuucggcgcuaucgccggcuuuauugaaaaugggugggagggaauggucgaugguugguauggcuuccgucaccagaacagugaggggcgcggacaagcagcugaccuuaagagcacccaggccgcgauagaucagaucaauggcaaacugaacagauugauugguaagacgaacgaaaaauuccaccagaucgagaaggaauuuuccgagguugaagggaggauccaagaccucgagaaguacguggaggauaccaaaauugaccuguggucuuauaaugccgaauuacugguagcacucgagaaccagcauacaauagaucuuacugacagcgaaaugaauaagcuguucgagaaaaccaagaaacaguugcgggaaaacgcugaggauaugggcaauggaugcuuuaagaucuaccacaagugugacaacgccugcauucgaucaauccgcaauggcacauaugaucaugacguguacagagacgaggcucuaaacaauagguuccagauuaaaggggucgaacugaagaguggauacaaagauuggauccucuggauauccuuugccaucagcugcuuccugcuuuguuuugcacuguuggguuucauuaugugggccugccaaaagggcaacauccgguguaauauuugcaucuga

SEQ ID NO: 133543 - RNA, 1701 nt, Artificial Sequence
  derived and/or modified CDS sequence (opt3) from hemagglutinin__InfluenzaA__ADL39170
augaagaccaucauugcccugagcuacauacucugccuuguguucgcucagaaacugcccggcaacgacaauuccacagcaacuuuguguuuagggcaccaugccgucccuaacggaacgaucguuaagaccauuacaaaugaucaaaucgaggugacuaacgcgaccgaacugguacagucuucaaguacaggugagauuugcgacagcccacaccagauccuagauggcaaaaauuguacccucauagacgcucugcuuggggauccgcagugcgacggauuucaaaacaagaaaugggaucuguucguggaaagauccaaggccuauucuaauuguuaccccuaugacgucccugauuacgcaucguugaggucacucguggccagcaguggcacucuggaguuuaacaaugaauccuucaacuggacagguguuacccagaaugggacgucuagcgcuugcauccggcgcuccaagaacucauuuuucagucgacugaauuggcucacucauuuaaacuuuaaauauccagcacugaaugugaccguccccaacaacgagcaguucgacaagcuguacauuuggggagugcaccauccuggcacagauaaagaccagaucuuuuuguaugcccaagcuagcggccguauuacuguaucuaccaagagaucccagcagacaguuaucccaaauauagggucaaggccccgggugcgcaacauuccuagcagaaucaguauuuacuggaccaucgucaaaccaggagaugugcugcuaaucaauucuacggguaaccucauugccccgaggggcuacuucaagauacgguccggaaagagcucgaucaugcgcucugacgcgcccauugggaaauguaauuccgagugcaucacuccuaacggcucaauaccaaaugacaagcccuuucagaacgugaaucgaauuacauauggugcauguccuagauacgucaaacaaaacacccugaaacuugccacugggaugaggaauguuccagaaaaacagacacggggaaucuucggcgcuaucgccggcuuuauugagaacgggugggaaggaaugguggaugguugguauggcuuccgucaccagaauagugaggggcgcggacaagcagcugaccuuaagagcacccaggccgcgaucgaucagauuaacggcaaauugaauagacucauagguaagacgaacgagaaguuccaccagaucgaaaaagaguuuuccgaaguagaggggaggauucaagaccuggaaaaguacguggaggauaccaaaaucgacuuauggucuuauaacgccgagcugcucgucgcacuugaaaaucagcauacaaucgaucugacugacagcgagaugaacaaguuguucgaaaagaccaagaagcagcuacgggagaaugcugaagauaugggcaacggaugcuuuaaaauuuaccacaagugugacaaugccugcauaggcucaauccgaaacgggacauaugaucaugacguguaccgcgacgaggcucugaauaacagauuccagauuaaaggaguugagcucaagagugguuacaaagauuggauccuguggauuuccuuugccaucagcugcuuccuucuguguguggcauugcucggcuuuauaaugugggccugccaaaaggggaauaucagguguaacauuugcaucuga

SEQ ID NO: 133544 - RNA, 1701 nt, Artificial Sequence; identical to SEQ ID NO: 131661
  derived and/or modified CDS sequence (opt3) from hemagglutinin__InfluenzaA__ADL39203

SEQ ID NO: 133545 - RNA, 1701 nt, Artificial Sequence; identical to SEQ ID NO: 130482
  derived and/or modified CDS sequence (opt3) from hemagglutinin__InfluenzaA__ADL39214

SEQ ID NO: 133546 - RNA, 1698 nt, Artificial Sequence
  derived and/or modified CDS sequence (opt3) from hemagglutinin__InfluenzaA__ADL39225
augaaggugaaacugcucguccuucugugcaccuucacagccacuuacgcugacacgaucuguauuggcuaucacgcaaacaauagcaccgauacaguugacacuguguuggagaagaacguaaccgugacacauuccgucaauuuacuggaaaacucucacaaugggaaacuaugccuccugaagggaauagcgccccuucagcuggguaacuguucaguggccggcuggaucuuggggaauccugagugcgaacuccugauuaguaaagagagcugguccuacaucguugaaaagccaaacccggagaauggaaccuguuaucccggcuacuuugcugauuaugaggaacugagagagcaacucucuucggugagcucauucgaaagguuugagauuuucccuaaggagaguuccuggccaaaccauacugucacaggugccucugcaagcugcucccacaauggggaaaacucauuuuaccggaauuuacuguggcuuaccggaaagaacggcuuguaucccaaucugaguaagagcuacgccaacaacaaagagaaggaagugcuaguacucuggggcguucaucacccuccaaauaucgcugaccagaaaacgcuguaccacacugagaacgcauaugugucugucguguccucacauuacagccgcaaguucacccccgaaauagccaagcgaccuaaagugcgugaucaggaggggagaaucaauuauuacuggacacuucuggagccaggagacacuauuaucuuugaagcuaacgguaauuugauugccccgagguaugcguucgcacucagucggggcuuugggucuggaaucauaaacuccaaugcccccauggauaagugugacgcuaaaugccagaccccucaaggcgccauuaacagcucgcugccauuccagaauguccaccccguuacaaucggugaguguccuaaguacgugcgcucugcaaaauuaagaaugguaaccgggcugaggaacauuccauccauccagucacggggacucuuuggcgcuaucgccggcuucauugaagggggauggacggguaugguggauggcugguauggguaccaucaccagaaugagcaaggaaguggcuacgcggccgaccagaaaagcacucagaacgcaauaaaugguaucacaaacaaagucaauuccgugauugaaaagaugaacacccaguuuacugcuguugggaaggaguucaacaaacuugagcgccgaauggaaaaucugaacaagaaaguggaugacggcuucaucgauauauggacauauaaugccgaguugcuaguccugcucgaaaacgagagaacccuggacuuucacgacucuaaugugaagaaccuuuacgaaaaaguaaagagccaacugaagaauaacgcuaaagagauuggaaauggcugcuucgaguuuuaucauaaguguaacgaugaaugcauggagucaguuaaaaaugggacguacgacuaucccaaguacagugaagaguccaaauugaacagggagaagaucgauggagugaagcucgaaagcaugggugucuaucagauccuggccauuuacucuaccguggcaucaaguuuaguccugcuagugagccucggcgccaucuccuucuggaugugcucuaaugggucgcugcagugucggauuugcauauga

SEQ ID NO: 133547 - RNA, 1698 nt, Artificial Sequence
  derived and/or modified CDS sequence (opt3) from hemagglutinin__InfluenzaA__ADL39236
augaaggugaaacugcucguccuucugugcaccuucacagccacuuacgcugacacgaucuguauuggcuaucacgcaaacaauagcaccgauacaguugacacuguguuggagaagaacguaaccgugacacauuccgucaauuuacuggaaaacucucacaaugggaaacuaugccuccugaagggaauagcgccccuucagcuggguaacuguucaguggccggcuggaucuuggggaauccugagugcgaacuccugauuaguaaagagagcugguccuacaucguugaaaagccaaacccggagaauggaaccuguuaucccggcuacuuugcugauuaugaggaacugagagagcaacucucuucggugagcucauucgaaagguuugagauuuucccuaaggagaguuccuggccaaaccauacugucacaggugugucugccagcugcucccacaauggggaaucaaguuuuuaccggaacuuacuguggcuuaccggcaaaaauggauuguaucccaaccugagcaagucuuacacgaauaacaaagagaaggaaguucuaguacucuggggcgugcaucacccuccaaacaucgucgaccagaaaacucuguaccgcaccgagaaugcauauguguccguggucucaagccacuacagucgaaaguucacacccgaaauagccaagcguccuaaaguuagagaucaggaggggaggaucaacuauuacuggacucuucuggagccaggagacaccauuaucuuugaagcuaaugguaacuugauugcaccgcgguaugccuucgcucucucucgcggcuuuggguccggaaucauaaauagcaacgcccccaugggcaagugugaugcgaaaugccagacaccucaaggugcaauuaauucgucucugccauuccagaacgugcaucccguaaccaucggggaguguccuaaguacgugagauccgccaaauuaaggauggucacgggacugcggaauauuccaucaauccagagucgcggccucuuuggcgcuaucgccggguucauugaaggagguuggacuggcaugguggacgggugguauggauaccaccaucagaacgagcaaggcagcgguuacgcagcugaucagaaguccacacagaaugccauaaacgggaucaccaauaaaguuaacucugugauugaaaagaugaauacucaguuuacagcggucggcaaggaguucaacaaacuugagcgaagaauggaaaaccugaauaagaaaguggacgauggauucaucgacauauggaccuauaacgccgaguugcuaguacugcucgaaaaugagaggacgcuggauuuucacgacagcaacguuaagaaucuuuacgaaaaagugaagucacaacugaagaacaaugcaaaagagauuggcaacgggugcuucgaguuuuaucacaaguguaaugacgaaugcauggagagugucaaaaacggaaccuacgauuaucccaaguacuccgaagagagcaaauugaaucgggagaagaucgacggugugaagcucgaaucuaugggcgucuaucagauccuggcuauuuacucaacaguggccaguagcuuaguucugcuagugucccucggggcuaucucuuucuggaugugcucgaacggaagccugcagugucguauuugcauauga

SEQ ID NO: 133548 - RNA, 1701 nt, Artificial Sequence
  derived and/or modified CDS sequence (opt3) from hemagglutinin__InfluenzaA__ADL39280
augaagaccaucauugcccugagcuacauacucugccuuguguucgcucagaaacugcccggcaacgacaauuccacagcaacuuuguguuuagggcaccaugccgucccuaacggaacgaucguuaagaccauuacaaaugaucaaaucgaggugacuaacgcgaccgaacugguacagucuucaaguacaggugagauuugcgacagcccacaccagauccuagauggcgaaaauuguacccucauagacgcucugcuuggggauccgcagugcgacggauuucaaaacaaaaagugggaucuguucguggagagauccaaagccuauucuaauuguuaccccuaugacgucccugauuacgcaucguugaggucacucguggccagcaguggcacucuggaauuuaacaaugaguccuucaacuggacagguguuacccagaaugggacgucuagcgcuugcauccggcgcuccaacaauucauuuuucagucgacugaacuggcucacucauuuacguuuuaaguauccagcacugaaugugaccaugcccaacaacgagcaguucgacaaacuuuacauuuggggaguccaccauccuggcacagauaaugaccagaucuuuuuguaugcccaagcuagcggcagaauuacugugucuaccaagaggucccagcagacaguaaucccaaacauagggucacggccccgcguuagaaauauuccuagcaggaucaguauuuacuggaccaucgugaagccaggagauauccugcuaauuaacucuacggguaaucucauagccccgcggggcuacuucaaaauccgcuccggaaagagcucgauuaugcgaucugacgcgcccaucgggaaauguaacuccgaaugcauaacuccuaauggcucaauuccaaacgacaagcccuuucagaaugucaacagaaucacauauggugcauguccuagguacgugaagcaaaauacccugaaacuugccacugggaugcggaacgugccagagaagcagacacguggaaucuucggcgcuauugccggcuuuaucgaaaaugggugggagggaauggucgaugguugguauggcuuccgccaccagaacagugaggggagaggacaagcagcugaccugaaaagcacccaggccgcgauugaucagauaaauggcaaguugaacaggcucaucgguaaaacgaacgaaaaguuccaccagauugagaaagaauuuuccgagguugaagggcggauccaagaccuggagaaguacguggaggauaccaagaucgacuuauggucuuauaaugccgaacugcucguagcacuugagaaccagcauacaauugaucugacugacagcgaaaugaauaaauuguucgagaagaccaaaaagcagcuacgagaaaacgcugaggauaugggcaauggaugcuuuaaaauauaccacaagugugacaacgccugcaucggcucaauucgcaaugggacauaugaucaugacguguacagagacgaggcucugaacaauagguuccagaucaagggagucgaacucaaaagugguuacaaggauuggauucuguggaucuccuuugccauaagcugcuuccuucuguguguggcauugcucggcuuuaucaugugggccugccaaaaagggaacauucgguguaauaucugcauuuga

SEQ ID NO: 133549 - RNA, 1698 nt, Artificial Sequence
  derived and/or modified CDS sequence (opt3) from hemagglutinin__InfluenzaA__ADL39291
augaaggugaaacugcucguccuucugugcaccuucacagccacuuacgcugacacgaucuguauuggcuaucacgcaaacaauagcaccgauacaguugacacuguguuggagaagaacguaaccgugacacauuccgucaauuuacuggaaaacucucacaaugggaaacuaugccuccugaagggaauagcgccccuucagcuggguaacuguucaguggccggcuggaucuuggggaauccugagugcgaacuccugauuaguaaagagagcugguccuacaucguugaaaagccaaacccggagaauggaaccuguuaucccggccauuuugcugauuacgaggaacugagagagcaacucucuucggugagcucauucgaaagguuugagauuuucccuaaggagaguuccuggccaaaccacacugucacaggugugucugccagcugcucccauaauggggaaucaaguuuuuaucggaacuuacuguggcuuaccgagaaaaauggauuguaccccaaccugagcaagucuuaugcaaauaacaaagaaaaggagguucuaguacucuggggcgugcaccacccuccaaacaugggcgaccagaaaacgcuguaccauacugaaaaugccuacgucuccguggugucaagccacuauagucgcaaguucacccccgagaucgcuaagcgaccuaaaguccgugaucaggaggggagaauaaacuacuauuggacacuucuggaaccaggagacacuaucauuuuugaggcaaaugguaacuugaucgccccgagguacgcuuucgcccucucucggggcuuuggguccggaauuaucaauagcaacgcgcccauggauaagugugacgcaaaaugccagaccccucaaggcgccauaaauucgucucugccauuccagaacguucaucccgugacaauuggugaauguccuaaguauguacgcuccgcuaaauuaagaauggugaccgggcugaggaauaucccaucaauucagagucggggacucuuuggcgccaucgcaggcuucaucgaagggggauggacggguauggucgauggcugguacggguaucaccaccagaacgagcaaggaagcggcuacgcugccgaccagaaguccacucagaaugcgauuaacgguauaacaaauaaagugaacucuguuaucgagaagaugaauacccaguuuacugccguggggaaggaguucaacaaacuugaacgccgaauggagaaccugaauaagaaagucgaugacggcuucauugauaucuggacauacaacgcagaauugcuagugcugcucgagaaugaaagaacccuggacuuucaugacagcaacguaaagaaucuuuaugagaaaguuaagucacaacugaagaacaaugcuaaagagauaggaaacggcugcuucgaauuuuaccacaaguguaaugaugagugcauggaaagugugaaaaacgggacguaugacuaccccaaguauuccgaggagagcaaauugaauagggaaaagauugauggagucaagcucgagucuauggguguguaccagauccuggccaucuauucaaccgucgcuaguagcuuagugcugcuaguuucccucggcgccauuucuuucuggaugugcucgaacgggagccugcagugucggaucugcauuuga

SEQ ID NO: 133550 - RNA, 1701 nt, Artificial Sequence; identical to SEQ ID NO: 130482
  derived and/or modified CDS sequence (opt3) from hemagglutinin__InfluenzaA__ADL39302

SEQ ID NO: 133551 - RNA, 1701 nt, Artificial Sequence; identical to SEQ ID NO: 133548
  derived and/or modified CDS sequence (opt3) from hemagglutinin__InfluenzaA__ADL39313

SEQ ID NO: 133552 - RNA, 1701 nt, Artificial Sequence
  derived and/or modified CDS sequence (opt3) from hemagglutinin__InfluenzaA__ADL39335
augaagaccaucauugcccugagcuacauacucugccuuguguucgcucagaaacugcccggcaacgacaauuccacagcaacuuuguguuuagggcaccaugccgucccuaacggaacgaucguuaagaccauuacaaaugaucaaaucgaggugacuaacgcgaccgaacugguacagucuucaaguacaggugagauuugcgacagcccacaccagauccuagauggcgaaaauuguacccucauagacgcucugcuuggggauccgcagugcgacggauuucaaaacaaaaagugggaucuguucguggagagauccaaagccuauucuaauuguuaccccuaugacgucccugauuacgcaucguugaggucacucguggccagcaguggcacucuggaauuuaacaaugaguccuucaacuggacagguguuacccagaaugggacgucuagcgcuugcauccggcgcuccaacaauucauuuuucagucgacugaacuggcucacucauuuacguuuuaaguauccagcacugaaugugaccaugcccaacaacgagcaguucgacaaacuuuacauuuggggaguccaccauccuggcacagauaaugaccagaucuuuuuguaugcccaagcuagcggcagaauuacugugucuaccaagaggucccagcagacaguaaucccaaacauagggucacggccccgcguuagaaauauuccuagcaggaucaguauuuacuggaccaucgugaagccaggagauauccugcuaauuaacucuacggguaaucucauagccccgcggggcuacuucaaaauccgcuccggaaagagcucgauuaugcgaucugacgcgcccaucgggaaauguaacuccgaaugcauaacuccuaauggcucaauuccaaacgacaagcccuuucagaaugucaacagaaucacauauggugcauguccuagguacgugaagcaaaauacccugaaacuugccacugggaugcggaacgugccagagaagcagacacguggaaucuucggcgcuauugccggcuuuaucgaaaaugggugggagggaauggucgaugguugguauggcuuccgccaccagaacagugaggggagaggacaagcagcugaccugaaaagcacccaggccgcgauugaucagauaaauggcaaguugaacaggcucaucgguaaaacgaacgaaaaguuccaccagauugagaaagaauuuuccgagguugaagggcggauccaagaccuggagaaguacguggaggauaccaagaucgacuuauggucuuauaaugccgaacugcucguagcacuugagaaccagcauacaauucaccugacugauagcgaaaugaauaaauuguucgagaagaccaaaaagcagcuacgagaaaacgcugaggacaugggcaauggaugcuuuaaaauauaccauaagugugauaacgccugcaucggcucaauucgcaaugggacauaugaccacgauguguacagagacgaggcucugaacaauagguuccagaucaagggagucgaacucaaaagugguuacaaggacuggauucuguggaucuccuuugccauaagcugcuuccuucuguguguggcauugcucggcuuuaucaugugggccugccaaaaagggaacauucgguguaauaucugcauuuga

SEQ ID NO: 133553 - RNA, 1701 nt, Artificial Sequence; identical to SEQ ID NO: 130482
  derived and/or modified CDS sequence (opt3) from hemagglutinin__InfluenzaA__ADL39368

SEQ ID NO: 133554 - RNA, 1698 nt, Artificial Sequence
  derived and/or modified CDS sequence (opt3) from hemagglutinin__InfluenzaA__ADL39390
augaaggugaaacugcucguccuucugugcaccuucacagccacuuacgcugacacgaucuguauuggcuaucacgcaaacaauagcaccgauacaguugacacuguguuggagaagaacguaaccgugacacauuccgucaauuuacuggaaaacucucacaaugggaaacuaugccuccugaagggaauagcgccccuucagcuggguaacuguucaguggccggcuggaucuuggggaauccugagugcgaacuccugauuaguaaagagagcugguccuacaucguugaaaagccaaacccggagaauggaaccuguuaucccggccauuuugcugauuacgaggaacugagagagcaacucucuucggugagcucauucgaaagguuugagauuuucccuaaggagaguuccuggccaaaccacacugucacaggugugucugccagcugcucccauaauggggaaucaaguuuuuaucggaacuuacuguggcuuaccggcaaaaauggauuguaccccagccugucuaaguccuaugcaaacaauaaagagaaggaaguucuaguacucuggggcgugcaccacccuccaaacaucgucgaccagaaaacgcuguaccgcacugagaacgccuacgugucaguggucagcagucauuauucucgaaaguucacccccgaaauagcuaagcguccuaaaguuagagaucaggaggggaggaucaauuacuauuggacacuucuggagccaggagacacuauuaucuuugaagcaaacgguaauuugauugccccgcgguacgcuuucgcccucucccgcggcuuugggagcggaaucauaaacucgaaugcgcccaugggcaagugugaugcaaaaugccagaccccucaaggugccauuaacucuucccugccauuccagaaugugcaccccguaacaaucggggaguguccuaaguaugugagaucagcuaaauuaaggauggucaccggacugcggaacauuccaaguauccagagccgcggccucuuuggcgccaucgcaggguucauugaaggagguuggacgggcaugguggacgggugguacggauaucaucaccagaaugagcaaggcuccgguuacgcugccgaucagaagucuacucagaacgcgauaaaugggaucacaaacaaaguuaauagcgugauugaaaagaugaacacccaguuuacugccgucggcaaggaguucaauaaacuugagcgaagaauggaaaaccugaacaagaaaguggacgauggauucaucgacauauggacauacaaugcagaguugcuaguacugcucgaaaacgagaggacccuggauuuucacgacucaaauguuaagaaccuuuaugaaaaagugaagagucaacugaagaauaacgcuaaagagauuggcaaugggugcuucgaguuuuaccauaaguguaacgacgaaugcauggaguccgucaaaaauggaacguaugauuaccccaaguauagcgaagagucuaaauugaaccgggagaagaucgacggugugaagcucgaaucaaugggcgucuaccagauccuggccauuuauaguaccguggcuagcuccuuaguucugcuagugucucucggggccaucucguucuggaugugcagcaauggaucccugcagugucguauuugcauauga

SEQ ID NO: 133555 - RNA, 1701 nt, Artificial Sequence
  derived and/or modified CDS sequence (opt3) from hemagglutinin__InfluenzaA__ADL39401
augaagaccaucauugcccugagcuacauacucugccuuguguucgcucagaaacugcccggcaacgacaauuccacagcaacuuuguguuuagggcaccaugccgucccuaacggaacgaucguuaagaccauuacaaaugaucaaaucgaggugacuaacgcgaccgaacugguacagucuucaaguacaggugagauuugcgacagcccacaccagauccuagauggcgaaaauuguacccucauagacgcucugcuuggggauccgcagugcgacggauuucaaaacaaaaagugggaucuguucguggagagauccaaagccuauucuaauuguuaccccuaugacgucccugauuacgcaucguugaggucacucguggccagcaguggcacucuggaauuuaacaaugaguccuucaacuggacagguguuacccagaaugggacgucuagcuccugcaugcggcgcucaaacaauagcuuuuucagucgacugaacuggcucacucauuuaaaguuuaaguauccagcucugaaugugaccaugcccaacaacgagcaguucgacaaacuuuacaucuggggaguccaccauccuggcacagauaaugaccagauuuuucuuuaugcacaagccucuggccguaucacuguguccaccaagagaucacagcagacaguaauuccaaacaucgggagcaggccccggguucgcaauauaccuaguagaauuucuaucuacuggaccauugugaaaccaggagauauccugcuaaucaacuccacggguaaucucauugcuccgaggggcuacuucaagauacggagcgggaaaucgucuaucaugcgcuccgacgcccccauuggaaaguguaacucagaaugcaucacuccuaauggcaguauaccaaacgacaagcccuuucagaaugucaaccgaauuacauauggugcguguccuagauacgugaaacaaaauacccugaaguuggcaacugggaugaggaacgugccagagaaacagacacggggaaucuucggcgccaucgcuggcuuuauugaaaaugggugggagggaauggucgaugguugguauggcuuccgucaccagaacagcgaggggcgcggacaagccgcagaccugaaguccacccaggcugccaucgaucagauuaauggcaaauugaacagacucauagguaagacgaacgaaaaauuccaccagaucgagaaggaauuuucugagguugaagggaggauucaagaccuggagaaguacguggaggauaccaaaaucgacuuauggagcuauaaugcggaacugcucguagcccuugagaaccagcauacaaucgaucugacugacucagaaaugaauaaguuguucgagaaaaccaagaaacagcuacgggaaaacgcagaggauaugggcaauggaugcuuuaagauuuaccacaagugugacaacgcuugcauaggcaguauccgaaaugggacauaugaucaugacguguaccgcgacgaggcccugaacaauagauuccagauuaaaggagucgaacucaaguccgguuacaaagauuggauccuguggauuagcuuugcuaucucuugcuuccuucuguguguggccuugcucggcuuuauaaugugggcaugccaaaaggggaacaucagguguaauauuugcaucuga

SEQ ID NO: 133556 - RNA, 1701 nt, Artificial Sequence
  derived and/or modified CDS sequence (opt3) from hemagglutinin__InfluenzaA__ADL39412
augaagaccaucauugcccugagcuacauacucugccuuguguucgcucagaaacugcccggcaacgacaauuccacagcaacuuuguguuuagggcaccaugccgucccuaacggaacgaucguuaagaccauuacaaaugaucaaaucgaggugacuaacgcgaccgaacugguacagucuucaaguacaggugagauuugcgacagcccacaccagauccuagauggcgaaaauuguacccucauagacgcucugcuuggggauccgcagugcgacggauuucaaaacaaaaagugggaucuguucguggagagauccaaagccuauucuaauuguuaccccuaugacgucccugauuacgcaucguugaggucacucguggccagcaguggcacucuggaauuuaacaaugaguccuucaacuggacagguguuacccagaaugggacgucuagcgcuugcauccggcgcuccaacaauucauuuuucagucgacugaacuggcucacucauuuaaaguuuaaguauccagcacugaaugugaccaugcccaacaacgagcaguucgacaaacuuuacauuuggggaguccaccauccuggcacagauaaugaccagaucuuuuuguaugcccaagcuagcggccguauuacugugucuaccaagagaucccagcagacaguaaucccaaacauagggucaaggccccggguucgcaauauuccuagcagaaucaguauuuacuggaccaucgugaaaccaggagauauccugcuaauuaacucuacggguaaucucauagccccgaggggcuacuucaagauccgguccgaaaagagcucgauuaugcgcucugacgcgcccaucgggaaguguaacuccgagugcauaacuccuaauggaucaauuccaaacgacaagcccuuucagaaugucaaccgaaucacauauggcgcauguccuagauacgugaaacaaaauacccugaaacuugccacugguaugaggaacgugccagaaaaacagacacgggggaucuucggagcuauugccggcuuuaucgagaauggcugggaggggauggucgauggaugguaugguuuccgucaccagaacagugaaggccgcgggcaagcagcugaccugaaaagcacccaggccgcgauugaucagauaaauggaaaauugaacagacucaucggcaagacgaacgagaaauuccaccagauugaaaaggaguuuuccgaaguugaggguaggauccaagaccuggagaaguacguggaagauaccaaaaucgacuuauggucuuauaaugccgagcugcucguagcacuugaaaaccagcauacaauugaucugacugacagcgagaugaauaaguuguucgaaaagaccaagaaacagcuacgggagaacgcugaggauauggggaauggcugcuuuaagauauaccacaagugugacaacgccugcaucggaucaauucgaaauggcacauaugaucaugacguguaccgcgacgaagcucugaacaauagauuccagaucaaaggggucgagcucaagaguggauacaaagauuggauucuguggaucuccuuugccauaagcugcuuccuucuguguguggcauugcucgguuuuaucaugugggccugccaaaagggcaacauuagguguaauaucugcauuuga

SEQ ID NO: 133557 - RNA, 1698 nt, Artificial Sequence
  derived and/or modified CDS sequence (opt3) from hemagglutinin__InfluenzaA__ADL39423
augaaggugaaacugcucguccuucugugcaccuucacagccacuuacgcugacacgaucuguauuggcuaucacgcaaacaauagcaccgauacaguugacacuguguuggagaagaacguaaccgugacacauuccgucaauuuacuggaaaacucucacaaugggaaacuaugccuccugaagggaauagcgccccuucagcuggguaacuguucaguggccggcuggaucuuggggaauccugagugcgaacuccugauuaguaaagagagcugguccuacaucguugaaaagccaaacccggagaauggaaccuguuaucccggccauuuugcugauuacgaggaacugagagagcaacucucuucggugagcucauucgaaagguuugagauuuucccuaaggagaguuccuggccaucucacacugucacaggugugagcgccuccugcucacauaacggggaaaauaguuuuuaucggaacuuacuguggcuuaccggcaaaaauggauuguaccccaaccugagcaagucuuaugcaaauaacaaagagaaggaaguucuaguacucuggggcgugcaccacccuccaaacaucgccgaccagaaaacgcuguaccauacugagaaugcuuacgucuccguggugucaagccacuauagucgcaaguucacccccgaaauagcaaagcgaccuaaaguccgugaucaggaggggagaaucaacuacuauuggacacuucuggagccaggagacacuauuaucuuugaagccaaugguaacuugauugcuccgagguacgccuucgcgcucucucggggcuuuggguccggaaucauaaauagcaacgcacccauggauaagugugacgccaaaugccagaccccucaaggcgcuauuaauucgucucugccauuccagaacguucaucccgugacaaucggugaguguccuaaguauguacgcuccgccaaauuaagaauggugaccgggcugaggaauauuccaucaauccagagucggggacucuuuggcgcaaucgcuggcuucauugaagggggauggacggguauggucgauggcugguacggguaucaccaccagaacgagcaaggaagcggcuacgccgcggaccagaaguccacucagaaugccauaaacgguaucacaaauaaagugaacucuguuauugaaaagaugaauacccaguuuacugcaguggggaaggaguucaacaaacuugagcgccgaauggaaaaccugaauaagaaagucgaugacggcuucaucgauauauggacauacaacgcugaguugcuagugcugcucgaaaaugagagaacccuggacuuucaugacagcaacguaaagaaucuuuaugaaaaaguuaagaaccaacugaagaauaacgccaaagagauuggaaauggcugcuucgaguuuuaccacaaguguaacgaugaaugcauggagucagugaaaaaugggacguaugacuaccccaaguauagugaagaguccaaauugaacagggagaagaucgauggagucaagcucgaaagcauggguguguaccagauccuggcuauuuauucuaccgucgccucaaguuuagugcugcuaguuagccucggcgcaaucuccuucuggaugugcucuaaugggucgcugcagugucggauuugcauauga

SEQ ID NO: 133558 - RNA, 1701 nt, Artificial Sequence
  derived and/or modified CDS sequence (opt3) from hemagglutinin__InfluenzaA__ADL39434
augaagaccaucauugcccugagcuacauacucugccuuguguucgcucagaaacugcccggcaacgacaauuccacagcaacuuuguguuuagggcaccaugccgucccuaacggaacgaucguuaagaccauuacaaaugaucaaaucgaggugacuaacgcgaccgaacugguacagucuucaaguacaggugagauuugcgacagcccacaccagauccuagauggcgaaaauuguacccucauagacgcucugcuuggggauccgcagugcgacggauuucaaaacaaaaagugggaucuguucguggagagauccaaagccuauucuaauuguuaccccuaugacgucccugauuacgcaucguugaggucacucguggccagcaguggcacucuggaauuuaacaaugaguccuucaacuggacagguguuacccagaaugggacgucuagcgcuugcauccggcgcuccaacaauucauuuuucagucgacugaacuggcucacucauuuacguuuuaaguauccagcacugaaugugaccaugcccaacaacgagcaguucgacaaacuuuacauuuggggaguccaccauccuggcacagauaaugaccagaucuuuuuguaugcccaagcuagcggcagaauuacugugucuaccaagaggucccagcagacaguaaucccaaacauagggucacggccccgcguuagagauauuccuagcaggaucaguauuuacuggaccaucgugaagccaggagacauccugcuaauuaauucuacggguaaccucauagccccgcggggcuacuucaaaauccgcuccggaaagagcucgauuaugcgaucugacgcgcccaucgggaaauguaauuccgaaugcauaacuccuaacggcucaauuccaaaugauaagcccuuucagaacgucaauagaaucacauauggugcauguccuagguacgugaagcaaaacacccugaaacuugccacugggaugcggaaugugccagagaagcagacacguggaaucuucggcgcuauugccggcuuuaucgaaaacgggugggagggaauggucgacgguugguauggcuuccgccaccagaauagugaggggagaggacaagcagcugaucugaaaagcacccaggccgcgauugaccagauaaacggcaaguugaauaggcucaucgguaaaacgaacgaaaaguuccaccagauugagaaagaauuuuccgagguugaagggcggauccaagaucuggagaaguacguggaggacaccaagaucgauuuauggucuuauaacgccgaacugcucguagcacuugagaaucagcauacaauugaccugacugauagcgaaaugaacaaauuguucgagaagaccaaaaagcagcuacgagaaaaugcugaggacaugggcaacggaugcuuuaaaauauaccacaagugugauaaugccugcaucggcucaauucgcaacgggacauaugaccaugacguguacagagaugaggcucugaauaacagguuccagaucaagggagucgaacucaaaagugguuacaaggacuggauucuguggaucuccuuugccauaagcugcuuccuucuguguguggcauugcucggcuuuaucaugugggccugccaaaaagggaauauucgguguaacaucugcauuuga

SEQ ID NO: 133559 - RNA, 1698 nt, Artificial Sequence
  derived and/or modified CDS sequence (opt3) from hemagglutinin__InfluenzaA__ADL39445
augaaggugaaacugcucguccuucugugcaccuucacagccacuuacgcugacacgaucuguauuggcuaucacgcaaacaauagcaccgauacaguugacacuguguuggagaagaacguaaccgugacacauuccgucaauuuacuggaaaacucucacaaugggaaacuaugccuccugaagggaauagcgccccuucagcuggguaacuguucaguggccggcuggaucuuggggaauccugagugcgaacuccugauuaguaaagagagcugguccuacaucguugaaaagccaaacccggagaauggaaccuguuaucccggccauuuugcugauuacgaggaacugagagagcaacucucuucggugagcucauucgaaagguuugagauuuucccuaaggagaguuccuggccaaaccacacugucacaggugugucugccagcugcucccauaauggggaaucaaguuuuuaucggaacuuacuguggcuuaccggcaaaaauggauuguaccccacgcugagcaagucuuaugcaaacaauaaagagaaggaaguucuaguacucuggggcgugcaccacccuccaaacaucgucgaccagaaaacucuguaccgcaccgagaacgccuacguguccguggucucaagccauuauagucgaaaguucacacccgaaauagcuaagcguccuaaaguuagagaucaggaggggaggaucaauuacuauuggacucuucuggagccaggagacaccauuaucuuugaagcaaacgguaauuugauugccccgcgguacgcuuucgcccucucucgcggcuuuggguccggaaucauaaacagcaaugcgcccauggauaagugugacgcaaaaugccagacaccucaaggcgccauuaacucgucucugccauuccagaaugugcaccccguaaccaucggugaguguccuaaguaugugagauccgcuaaauuaaggauggucacggggcugcggaacauuccaucaauccagagucgcggacucuuuggcgccaucgcaggcuucauugaagggggauggacugguaugguggauggcugguacggguaucaucaccagaaugagcaaggaagcggcuacgcugccgaccagaaguccacacagaacgcgauaaaugguaucaccaacaaaguuaauucugugauugaaaagaugaacacucaguuuacagccgucgggaaggaguucaauaaacuugagcgaagaauggaaaaccugaacaagaaaguggaugacggcuucaucgauauauggaccuacaaugcagaguugcuaguacugcucgaaaacgagaggacgcuggacuuucacgacagcaauguuaagaaccuuuaugaaaaagugaagucacaacugaagaauaacgcuaaagagauuggaaauggcugcuucgaguuuuaccauaaguguaacgaugaaugcauggagagugucaaaaaugggaccuaugacuaccccaaguauuccgaagagagcaaauugaaccgggagaagaucgauggagugaagcucgaaucuaugggugucuaccagauccuggccauuuauucaacaguggcuaguagcuuaguucugcuagugucccucggcgccaucucuuucuggaugugcucgaaugggagccugcagugucguauuugcauauga

SEQ ID NO: 133560 - RNA, 1698 nt, Artificial Sequence
  derived and/or modified CDS sequence (opt3) from hemagglutinin__InfluenzaA__ADL39456
augaaggugaaacugcucguccuucugugcaccuucacagccacuuacgcugacacgaucuguauuggcuaucacgcaaacaauagcaccgauacaguugacacuguguuggagaagaacguaaccgugacacauuccgucaauuuacuggaaaacucucacaaugggaaacuaugccuccugaagggaauagcgccccuucagcuggguaacuguucaguggccggcuggaucuuggggaauccugagugcgaacuccugauuaguaaagagagcugguccuacaucguugaaaagccaaacccggagaauggaaccuguuaucccggccauuuugcugauuacgaggaacugagagagcaacucucuucggugagcucauucgaaagguuugagauuuucccuaaggagaguuccuggccaucucacacugucacaggugugagcgccuccugcucacauaacggggaaaauaguuuuuaucggaacuuacuguggcuuaccggcaaaaauggauuguaccccaaccugagcaagucuuaugcaaauaacaaagagaaggaaguucuaguacucuggggcgugcaccacccuccaaacaucgccgaccagaaaacgcuguaccauacugagaaugcuuacgucuccguggugucaagccacuauagucgcaaguucacccccgaaauagcaaagcgaccuaaaguccgugaucaggaggggagaaucaacuacuauuggacacuucuggagccaggagacacuauuaucuuugaagccaaugguaacuugauugcuccgagguacgccuucgcgcucucucggggcuuuggguccggaaucauaaauagcaacgcacccauggauaagugugacgccaaaugccagaccccucaaggcgcuauuaauucgucucugccauuccagaacguucaucccgugacaaucggugaguguccuaaguauguacgcuccgccaaauuaagaauggugaccgggcugaggaauauuccaucaauccagagucggggacucuuuggcgcaaucgcuggcuucauugaagggggauggacggguauggucgauggcugguacggguaucaccaccagaacgagcaaggaagcggcuacgccgcggaccagaaguccacucagaaugccauaaacgguaucacaaauaaagugaacucuguuauugaaaagaugaauacccaguuuacugcaguggggaaggaguucaacaaacuugagcgccgaauggaaaaccugaauaagaaagucgaugacggcuucaucgauauauggacauacaacgcugaguugcuagugcugcucgaaaaugagagaacccuggacuuucaugacagcaacguaaagaaucuuuaugaaaaaguuaagucacaacugaagaacaaugccaaagagauuggaaacggcugcuucgaguuuuaccacaaguguaaugaugaaugcauggagagugugaaaaacgggacguaugacuaccccaaguauuccgaagagagcaaauugaauagggagaagaucgauggagucaagcucgaaucuauggguguguaccagauccuggcuauuuauucaaccgucgccaguagcuuagugcugcuaguuucccucggcgcaaucucuuucuggaugugcucgaacgggagccugcagugucggauuugcauauga

SEQ ID NO: 133561 - RNA, 1698 nt, Artificial Sequence
  derived and/or modified CDS sequence (opt3) from hemagglutinin__InfluenzaA__ADL39467
augaaggugaaacugcucguccuucugugcaccuucacagccacuuacgcugacacgaucuguauuggcuaucacgcaaacaauagcaccgauacaguugacacuguguuggagaagaacguaaccgugacacauuccgucaauuuacuggaaaacucucacaaugggaaacuaugccuccugaagggaauagcgccccuucagcuggguaacuguucaguggccggcuggaucuuggggaauccugagugcgaacuccugauuaguaaagagagcugguccuacaucguugaaaagccaaacccggagaauggaaccuguuaucccggccauuuugcugauuacgaggaacugagagagcaacucucuucggugagcucauucgaaagguuugagauuuucccuaaggagaguuccuggccaaaccacacugucacaggugugucugccagcugcucccauaauggggaaucaaguuuuuaucggaacuuacuguggcuuaccggcaaaaauggauuguaccccaaccugagcaagucuuaugcaaauaacaaagagaaggaaguucuaguacucuggggcgugcaccacccuccaaacaucgucgaccagaaaacgcuguaccgcacugagaaugccuacguguccguggucucaagccauuauagucgaaaguucacccccgaaauagcuaagcguccuaaaguuagagaucaggaggggaggaucaacuacuauuggacacuucuggagccaggagacacuauuaucuuugaagcaaaugguaacuugauugccccgcgguacgcuuucgcccucucucgcggcuuuggguccggaaucauaaauagcaacgcgcccaugggcaagugugaugcaaaaugccagaccccucaaggugccauuaauucgucucugccauuccagaacgugcaccccguaacaaucggggaguguccuaaguaugugagauccgcuaaauuaaggauggucaccggacugcggaauauuccaucaauccagagucgcggccucuuuggcgccaucgcaggguucauugaaggagguuggacgggcaugguggacgggugguacggauaucaucaccagaacgagcaaggcagcgguuacgcugccgaucagaaguccacucagaaugcgauaaacgggaucacaaauaaaguuaacucugugauugaaaagaugaauacccaguuuacugccgucggcaaggaguucaacaaacuugagcgaagaauggaaaaccugaauaagaaaguggacgauggauucaucgacauauggacauacaacgcagaguugcuaguacugcucgaaaaugagaggacccuggauuuucacgacagcaacguuaagaaucuuuaugaaaaagugaagucacaacugaagaacaaugcuaaagagauuggcaacgggugcuucgaguuuuaccauaaguguaaugacgaaugcauggagagugucaaaaacggaacguaugauuaccccaaguauuccgaagagagcaaauugaaucgggagaagaucgacggugugaagcucgaaucuaugggcgucuaccagauccuggccauuuauucaaccguggcuaguagcuuaguucugcuagugucccucggggccaucucuuucuggaugugcucgaacggaagccugcagugucguauuugcauauga

SEQ ID NO: 133562 - RNA, 1701 nt, Artificial Sequence; identical to SEQ ID NO: 130717
  derived and/or modified CDS sequence (opt3) from hemagglutinin__InfluenzaA__ADL41164

SEQ ID NO: 133563 - RNA, 1701 nt, Artificial Sequence; identical to SEQ ID NO: 130810
  derived and/or modified CDS sequence (opt3) from hemagglutinin__InfluenzaA__ADL41173

SEQ ID NO: 133564 - RNA, 1698 nt, Artificial Sequence
  derived and/or modified CDS sequence (opt3) from hemagglutinin__InfluenzaA__ADL60242
augaaggugaaacugcucguccuucugugcaccuucacagccacuuacgcugacacgaucuguauuggcuaucacgcaaacaauagcaccgauacaguugacacuguguuggagaagaacguaaccgugacacauuccgucaauuuacuggaaaacucucacaaugggaaacuaugccuccugaagggaauagcgccccuucagcuggguaacuguucaguggccggcuggaucuuggggaauccugagugcgaacuccugauuaguaaagagagcugguccuacaucguugaaaagccaaacccggagaauggaaccuguuaucccggccauuuugcugauuacgaggaacugagagagcaacucucuucggugagcucauucgaaagguuugagauuuucccuaaggagaguuccuggccaaaccacacugucacaggugugucugccagcugcucccauaauggggaacggucauuuuaucgcaacuuacuguggcuuaccggaaagaauggcuuguaccccaaccugaguaagagcuaugcaaauaacaaagagaaggaaguucuaguacucuggggcgugcaccacccuccagacaucgggaaccagaaaacgcuguaccauacugagaaugccuacgucucugugguguccucacacuauagccgaaaguucacccccgaaauagcuaagcguccuaaagucagagaucaggagggaaggaucaacuacuauuggacacuucuggagccaggugacacuauuaucuuugaagcaaauggcaacuugauugccccgcgguacgcuuucgcccucagucgcggguuuggaucuggcaucauaaauuccaacgcgcccauggauaagugugacgcaaaaugccagaccccucaaggugccauuaauagcucgcugccauuccagaacguucaucccgugacaaucggggaguguccuaaguauguaagaucugcuaaauuaaggauggugaccggacugcggaauauuccauccauccagucacgcggccucuuuggcgccaucgcaggguucauugaaggagguuggacgggcauggucgaugggugguacggauaucaccaccagaacgagcaaggcagugguuacgcugccgaccagaaaagcacucagaaugcgauaaacgggaucacaaauaaagugaacuccguuauugaaaagaugaauacccaguuuacugccgugggcaaggaguucaacaaacuugagcgaagaauggaaaaccugaauaagaaagucgaugacggauucaucgauauauggacauacaacgcagaguugcuagugcugcucgaaaaugagaggacccuggacuuucaugacucuaacguaaagaaucuuuaugaaaaaguuaagagccaacugaagaacaaugcuaaagagauuggcaacgggugcuucgaguuuuaccacaaguguaaugaugaaugcauggagucagugaaaaacggaacguaugacuaccccaaguauagugaagaguccaaauugaaucgggagaagaucgauggugucaagcucgaaagcaugggcguguaccagauccuggccauuuauucuaccgucgcuucaaguuuagugcugcuaguuagccucggggccaucuccuucuggaugugcucuaacggaucgcugcagugucguauuugcauauga

SEQ ID NO: 133565 - RNA, 1698 nt, Artificial Sequence
  derived and/or modified CDS sequence (opt3) from hemagglutinin__InfluenzaA__ADL60253
augaaggugaaacugcucguccuucugugcaccuucacagccacuuacgcugacacgaucuguauuggcuaucacgcaaacaauagcaccgauacaguugacacuguguuggagaagaacguaaccgugacacauuccgucaauuuacuggaaaacucucacaaugggaaacuaugccuccugaagggaauagcgccccuucagcuggguaacuguucaguggccggcuggaucuuggggaauccugagugcggacuccugauuaguaaagaaagcugguccuacaucguugagaagccaaacccggaaaauggcaccuguuaucccgguuacuuugcugauuaugaggagcugagagaacaacucucuucggugagcucauucgagagguuugaaauuuucccuaaggagaguuccuggccaaaccauacugucacaggggugucugccagcugcucccacaauggagagucaaguuuuuaccggaacuuacuguggcuuaccggcaaaaauggcuuguaucccaaccugagcaagucuuacgcaaauaacaaagaaaaggaggugcuaguucucuggggagugcaucacccuccaaacaucgggaaucagaaagcccuguaccacacggaaaacgcuuaugucuccguggugucaagccauuacagucgcaaguucacucccgagauagcaaagcgaccuaaaguccgugaccaggaagguagaaucaauuauuacuggacccuucuggagccaggcgauacaauuaucuuugaggccaacgggaauuugauugcuccgagguaugccuucgcgcucucucggggauuuggcuccgguaucauaaacagcaaugcacccauggacaagugugaugccaaaugccagacuccucaaggggcuauuaacucgucucugccauuccagaauguucaccccgugaccaucggagaauguccuaaguacguacgcuccgccaaauuaagaauggugacaggccugaggaacauuccaucaauccagagucggggccucuuuggggcaaucgcuggauucauugaggguggcuggaccgggauggucgacggaugguauggcuaccaucaccagaaugaacaagguagcggguacgccgcggaucagaaguccacgcagaacgccauaaauggcaucacuaacaaaguaaauucuguuauugagaagaugaacacacaguuuaccgcagugggaaaggaguucaacaaacuugaacgccgaauggagaaucugaacaagaaagucgacgauggcuucaucgacauauggacuuauaaugcugaauugcuagugcugcucgagaacgaaagaacacuggauuuucacgacagcaauguaaagaaccuuuacgagaaaguuaagucacaacugaagaauaacgccaaagaaauugggaauggaugcuucgaguuuuaucauaaguguaacgacgagugcauggaaagugugaaaaaugguaccuacgauuaucccaaguacuccgaggaaagcaaauugaacagggagaagaucgacggcgucaagcucgagucuauggggguguaucagauccuggcuauuuacucaacggucgccaguagcuuagugcugcuaguuucccucggagcaaucucuuucuggaugugcucgaauggcagccugcagugucggauuugcauauga

SEQ ID NO: 133566 - RNA, 1698 nt, Artificial Sequence; identical to SEQ ID NO: 133564
  derived and/or modified CDS sequence (opt3) from hemagglutinin__InfluenzaA__ADL60264

SEQ ID NO: 133567 - RNA, 1698 nt, Artificial Sequence; identical to SEQ ID NO: 133564
  derived and/or modified CDS sequence (opt3) from hemagglutinin__InfluenzaA__ADL60275

SEQ ID NO: 133568 - RNA, 1698 nt, Artificial Sequence
  derived and/or modified CDS sequence (opt3) from hemagglutinin__InfluenzaA__ADL60286
augaaggugaaacugcucguccuucugugcaccuucacagccacuuacgcugacacgaucuguauuggcuaucacgcaaacaauagcaccgauacaguugacacuguguuggagaagaacguaaccgugacacauuccgucaauuuacuggaaaacucucacaaugggaaacuaugccuccugaagggaauagcgccccuucagcuggguaacuguucaguggccggcuggaucuuggggaauccugagugcgaacuccugauuaguaaagagagcugguccuacaucguugaaaagccaaacccggagaauggaaccuguuaucccggccauuuugcugauuacgaggaacugagagagcaacucucuucggugagcucauucgaaagguuugagauuuucccuaaggagaguuccuggccaaaccacacugucacaggugugucugccagcugcucccauaauggggaaucaaguuuuuaucggaacuuacuguggcuuaccggaaagaauggcuuguaccccaaccugagcaagucuuaugcaaauaacaaagagaaggaaguucuaguacucuggggcgugcaccacccuccauccaucucaaaccagaaaacgcuguaccauacugagaaugccuacgucagcguggugaguucucacuauucccgcaaguucacccccgaagucgcuaagcgaccuaaaguucgugaccaggaggggagaauaaacuacuauuggacacuucuggagccaggagauacuaucauuuuugaagcaaaugguaacuugaucgccccgagguacgcuuucgcccucagccggggcuuugggucgggaauuaucaauucuaacgcgcccauggacaagugugaugcaaaaugccagaccccucaaggcgccauaaauuccucacugccauuccagaacgugcaucccguaacaauuggugaguguccuaaguaugugcgcagugcuaaauuaagaauggucaccgggcugaggaauaucccaagcauucagucccggggacucuuuggcgccaucgcaggcuucaucgaagggggauggacggguaugguggacggcugguacggguaucaccaccagaacgagcaaggaucuggcuacgcugccgaucagaaaagcacucagaaugcgauuaacgguauaacaaauaaaguuaacucagugaucgaaaagaugaauacccaguuuacugccgucgggaaggaguucaacaaacuugagcgccgaauggaaaaccugaauaagaaaguggacgauggcuucauugacaucuggacauacaacgcagaguugcuaguacugcucgaaaaugagagaacccuggauuuucaugacaguaacguuaagaaucuuuaugaaaaagugaagucccaacugaagaacaaugcuaaagagauaggaaacggcugcuucgaguuuuaccacaaguguaaugacgaaugcauggagagcgucaaaaacgggacguaugauuaccccaaguauucugaagagucaaaauugaauagggagaagauugacggagugaagcucgaaaguaugggugucuaccagauccuggccaucuauagcaccguggcuuccucuuuaguucugcuagugucgcucggcgccauuagcuucuggaugugcuccaacgggucacugcagugucggaucugcauuuga

SEQ ID NO: 133569 - RNA, 1698 nt, Artificial Sequence
  derived and/or modified CDS sequence (opt3) from hemagglutinin__InfluenzaA__ADL60297
augaaggugaaacugcucguccuucugugcaccuucacagccacuuacgcugacacgaucuguauuggcuaucacgcaaacaauagcaccgauacaguugacacuguguuggagaagaacguaaccgugacacauuccgucaauuuacuggaaaacucucacaaugggaaacuaugccuccugaagggaauagcgccccuucagcuggguaacuguucaguggccggcuggaucuuggggaauccugagugcgaacuccugauuaguaaagagagcugguccuacaucguugaaaagccaaacccggagaauggaaccuguuaucccggccauuuugcugauuacgaggaacugagagagcaacucucuucggugagcucauucgaaagguuugagauuuucccuaaggagaguuccuggccaaaccacacugucacaggugugucugccagcugcucccauaauggggaaucaaguuuuuaucggaacuuacuguggcuuacccgcaaaaauggauuguaccccaaccugagcaagucuuaugcaaauaacaaagagaaggaaguucuaguacucuggggcgugcaccacccuccaaacaucggcgaccagaaaacgcuguaccauacugagaaugccuacgucuccguggugucaagccacuauagucgaaaguucacccccgaaauagcuaagcguccuaaagucagagaucaggaggggaggaucaacuacuauuggacacuucuggagccaggagacacuauuaucuuugaagcaaaugguaacuugauugccccgcgguacgcuuucgcccucucucgcggcuuuggguccggaaucauaaauagcaacgcgcccauggauaagugugacgcaaaaugccagaccccucaaggcgccauuaauucgucucugccauuccagaacguucaucccgugacaaucggugaguguccuaaguauguaagauccgcuaaauuaaggauggugaccgggcugcggaauauuccaucaauccagagucgcggacucuuuggcgccaucgcaggcuucauugaagggggauggacggguauggucgauggcugguacggguaucaccaccagaacgagcaaggaagcggcuacgcugccgaccagaaguccacucagaaugcgauaaacgguaucacaaauaaagugaacucuguuauugaaaagaugaauacccaguuuacugccguggggaaggaguucaacaaacuugagcgaagaauggaaaaccugaauaagaaagucgaugacggcuucaucgauauauggacauacaacgcagaguugcuagugcugcucgaaaaugagaggacccuggacagccaugacucaaacguaaagaaucuuuaugaaaaaguuaagagucaacugaagaacaaugcuaaagagauuggaaacggcugcuuugaguucuaccacaaguguaaugaugaaugcauggaguccgugaaaaacgggacguaugacuaccccaaguauagcgaagagucuaaauugaaucgggagaagaucgauggagucaagcucgaaucaauggguguguaccagauccuggccauuuauaguaccgucgcuagcuccuuagugcugcuaguuucucucggcgccaucucguuuuggaugugcagcaacgggucccugcagugucguauuugcauauga

SEQ ID NO: 133570 - RNA, 1698 nt, Artificial Sequence
  derived and/or modified CDS sequence (opt3) from hemagglutinin__InfluenzaA__ADL60308
augaaggugaaacugcucguccuucugugcaccuucgccgcuacauacgcagacacuaucuguauuggcuaucacgccaacaauagcacggauaccguugacacaguguuggagaagaacguaacugugacccauuccgucaauuuacuggaaaacucucacaaugggaaacuaugccuccugaagggaauagcgccccuucagcuggguaacuguucaguggcuggcuggaucuuggggaauccugagugcgaacuccugauuaguaaagagagcugguccuacaucguugaaaagccaaacccggagaauggaacauguuaucccggccauuuugccgauuacgaggaacugagagagcaacucucuucggugagcucauucgaaagguuugagauuuucccuaaggagaguuccuggccaaaccacaccgucacuggugugucugcaagcugcucccauaauggggaaucaaguuuuuaucggaacuuacuguggcuuacaggcaaaaauggauuguaccccaaccugagcaagucuuaugccaauaacaaagagaaggaaguucuaguacucuggggcgugcaccacccuccaaacaucgggguccagaaagcucuguaccauaccgagaaugcauacguguccguggucucaagccacuauagucgcaaguucacgcccgaaauagccaagcgaccuaaaguucgugaccaggagggaagaaucaacuacuauuggacucuucuggagccaggugauaccauuaucuuugaagcuaauggcaacuugauugccccgagguacgcguucgcacucucucggggguuuggauccggcaucauaaauagcaacgcccccauggacaagugugaugcuaaaugccagacaccucaaggugccauuaauucgucucugccauuccagaacgugcaucccguaacuaucggggaguguccuaaguaugugcgcuccgcaaaauuaagaauggucaccggacugaggaauauuccaucaauccagagucggggccucuuuggcgcuaucgccggguucauugaaggagguuggacaggcaugguggacgggugguacggauaucaccaccagaacgagcaaggcagcgguuacgcggccgaucagaaguccacccagaaugcaauaaacgggaucacgaauaaaguuaacucugugauugaaaagaugaauacucaguuuacagcugucggcaaggaguucaacaaacuugagcgccgaauggaaaaccugaauaagaaaguggacgauggauucaucgacauauggaccuacaacgccgaguugcuaguacugcucgaaaaugagagaacucuggauuuucaugacagcaacguuaagaaucuuuaugaaaaagugaagucacaacugaagaacaaugcuaaagagauuggcaacgggugcuucgaguuuuaccacaaguguaaugacgaaugcauggagagugucaaaaacggaacauaugauuaccccaaguauuccgaagagagcaaauugaauagggagaagaucgacggugugaagcucgaaucuaugggcgucuaccagauccuggccauuuauucaaccguggcaaguagcuuaguucugcuagugucccucggggccaucucuuucuggaugugcucgaacggaagccugcagugucggauuugcauauga

SEQ ID NO: 133571 - RNA, 1698 nt, Artificial Sequence
  derived and/or modified CDS sequence (opt3) from hemagglutinin__InfluenzaA__ADL60341
augaaggugaaacugcucguccuucugugcaccuucacagccacuuacgcugacacgaucuguauuggcuaucacgcaaacaauagcaccgauacaguugacacuguguuggagaagaacguaaccgugacacauuccgucaauuuacuggaaaacucucacaaugggaaacuaugccuccugaagggaauagcgccccuucagcuggguaacuguucaguggccggcuggaucuuggggaauccugagugcgaacuccugauuaguaaagagagcugguccuacaucguugaaaagccaaacccggagaauggaaccuguuaucccggccauuuugcugauuacgaggaacugagagagcaacucucuucggugagcucauucgaaagguuugagauuuucccuaaggagaguuccuggccaaaccacacugucacaggugugucugccagcugcucccauaauggggaaucaaguuuuuaucggaacuuacuguggcuuaccggcaaaaauggauuguaccccaaccugagcaagucuuaugcaaauaacaaagagaaggaaguucuaguacucuggggcgugcaccacccuccaaacaucgggguccagaaagcccuguaccauacggagauagcuuacguguccguggucucaagccacuauagucgcaaguucacucccgaaaucgcaaagcgaccuaaaguucgugaccaggagggaagaauuaauuacuauuggaccauccuugagccaggugauacaauuaucuuugaagccaacggcaaucugauagcuccgagguacgccuucgcguugucucggggguuuggauccggcauuaucaacagcaaugcacccauggacaagugugaugccaaaugccagacuccucaaggugcuauuaacucgucucucccauuccagaaugugcaucccguaaccaucggggaguguccuaaguaugugcgcuccgccaaacugagaauggucacaggauuaaggaacaucccaucaauucagagucggggccuguuuggcgcaauagcuggguucaucgaaggagguuggaccggcaugguggacgggugguacggauaucaccaccagaaugagcaaggcagcgguuacgccgcggaucagaaguccacgcagaacgccauuaaugggaucacuaacaaaguuaauucugugauagaaaagaugaacacacaguuuaccgcagucggcaaggaguucaauaaacucgagcgccgaauggaaaaccuuaacaagaaaguggacgauggauucauugacaucuggacuuacaaugcugagcuguugguacuacuggaaaacgagagaacacucgauuuucaugacagcaauguuaagaaccuguaugaaaaagugaagucacaacuuaagaauaacgccaaagagaucggcaaugggugcuucgaguuuuaccacaaguguaacgacgaaugcauggagagugucaaaaauggaaccuaugauuaccccaaguauuccgaagagagcaaacugaacagggagaagauugacggugugaaguuggaaucuaugggcgucuaccagauccucgcuauuuauucaacgguggccaguagccugguuuuacuggugucccuaggggcaauaucuuucuggaugugcucgaauggaagccuccagugucggaucugcauuuga

SEQ ID NO: 133572 - RNA, 1698 nt, Artificial Sequence
  derived and/or modified CDS sequence (opt3) from hemagglutinin__InfluenzaA__ADL60352
augaaggugaaacugcucguccuucugugcaccuucacagccacuuacgcugacacgaucuguauuggcuaucacgcaaacaauagcaccgauacaguugacacuguguuggagaagaacguaaccgugacacauuccgucaauuuacuggaaaacucucacaaugggaaacuaugccuccugaagggaauagcgccccuucagcuggguaacuguucaguggccggcuggaucuuggggaauccugagugcgaacuccugauuaguaaagagagcugguccuacaucguugaaaagccaaacccggagaauggaaccuguuaucccggccauuuugcugguuacgaggaacugagagagcaacucucuucggugagcagcuucgaaagguuugagauuuucccuaaggagaguuccuggccaaaccacacugucacaggggugucugccagcugcucccauaauggagaacggucauuuuaucgcaacuuacuguggcuuaccggcaaaaauggcuuguaccccaaccugaguaagagcuaugcaaauaacaaagagaaggaaguucuaguacucuggggagugcaccacccuccagauaucgggaaccagaaaacgcuguaccauacugagaaugccuacgucucugugguguccucacacuauagccgaaaguucacccccgaaauagcuaagcguccuaaagucagagaccaggaggguaggaucaacuacuauuggacacuucuggagccaggcgauacuauuaucuuugaagcaaaugggaacuugauugccccgcgguacgcuuucgcccucagucgcggauuuggcucugguaucauaaauuccaacgcgcccauggacaagugugaugcaaaaugccagaccccucaaggggccauuaauagcucgcugccauuccagaacguucaucccgugacaaucggagaguguccuaaguauguaagaucugcuaaauuaaggauggugaccggccugcggaauauuccauccauccagucacgcggccucuuuggggccaucgcaggauucauugaagguggcuggacggggauggucgacggaugguacggcuaucaccaccagaacgagcaagguaguggguacgcugccgaucagaagucaacucagaaugcgauaaacggcaucacaaauaaagugaacuccguuauugaaaagaugaauacccaguuuacugccgugggaaaggaguucaacaaacuugagcgaagaauggaaaaccugaauaagaaagucgacgauggcuucaucgacauauggacauacaacgcagaguugcuagugcugcucgaaaaugagaggacccuggauuuucaugacucuaacguaaagaaucuuuaugaaaaaguuaagagccaacugaagaacaaugcuaaagagauugggaacggaugcuucgaguuuuaccacaaguguaaugacgaaugcauggagucagugaaaaacgguacguaugauuaccccaaguauagugaagaguccaaauugaaucgggagaagaucgacggcgucaagcucgaaagcauggggguguaccagauccuggccauuuauucuaccgucgcuucaaguuuagugcugcuaguuagccucggagccaucuccuucuggaugugcucuaacggcucgcugcagugucguauuugcauauga

SEQ ID NO: 133573 - RNA, 1701 nt, Artificial Sequence
  derived and/or modified CDS sequence (opt3) from hemagglutinin__InfluenzaA__ADL60363
augaagaccaucauugcccugagcuacauacucugccuuguguucgcucagaaauuucccggcaacgacaauuccacagcaacucuguguuuggggcaccaugccgucccuaacggaacgaucguuaagaccauuacaaaugaucaaaucgaggugacuaacgcgaccgaauuaguacagucuucaaguacaggugagauuugcgacagcccacaccagauccuggauggcgaaaauuguacccuaauagacgcucuccugggggauccgcagugcgacggauuccaaaacaaaaauugggaucuuuuuguggagagauccaaggccuauucuaacuguuaccccuaugacgucccugauuacgcaucgcugaggucauugaucgccagcaguggcacucucgaguucaauaacgaauccuuuaauuggacaggugugacccagaacgggacgucuagcgcuugcauucggcgcuccaauaacucauucuuuagucgacugaauuggcugacucauagcaaauucaaguauccagcacucaacguuaccaugcccaacaaugagaacuuugacaaguuauacaucuggggagugcaccauccuggcacagauaaugaccagauuuuccuguaugcccaggcuucuggccguaucacuauauccaccaaaagaucacaacagacagucauuccaaacaucgggagcaggccccgggugcgcgauauuccuaguagaaucucuaucuacuggaccauuguaaagccaggagacauacuuuugaucaauuccacggguaaccugauugccccgaggggcuacuuuaaaauccggagcgggaagucgucuauaaugcgcuccgacgcgcccauuggaaaauguaauucagaaugcaucacuccuaacggcaguaucccaaaugauaagcccuuccagaacguuaaucgaauuacauauggugcauguccuagauacgugaagcagaacacccuaaaacucgccacugggaugaggaaugucccagagaagcaaacacggggaaucuuuggcgcuauugccggcuucauagaaaacgggugggagggaaugguggacgguugguauggcuuccgucaccagaauagcgagggggugggacaggcagcugaucugaaauccacccaagccgcgaucgaccagauuaacggcaaacuuaaccgccugaucgguaagacgaaugaaaaguuucaccagaucgagaaagaguucucugaagucgaagggaggauucaggauuuggagaaguacguugaggacaccaagauagaucucuggagcuauaacgccgaacuguuaguggcacuggagaaucaacauacaaucgaccucacugauucagaaaugaacaaacuuuuugagaagaccaaaaagcagcugagagaaaaugcugaggacaugggcaacggaugcuucaaaauuuaccacaagugugauaaugccugcaucggcaguauucggaacgggacauaugaccaugacguauaccgagaugaggcuuugaauaaccgcuuucagaucaagggaguggaacuaaaauccgguuacaaggacuggauacuguggaucagcuucgccauuucuugcuuucuccuguguaucgcacuucugggcuucauuaugugggccugccagaaagggaauaucagauguaacauaugcauuuga

SEQ ID NO: 133574 - RNA, 1698 nt, Artificial Sequence
  derived and/or modified CDS sequence (opt3) from hemagglutinin__InfluenzaA__ADL60374
augaaggugaaacugcucguccuucugugcaccuucacagccacuuacgcugacacgaucuguauuggcuaucacgcaaacaauagcaccgauacaguugacacuguguuggagaagaacguaaccgugacacauuccgucaauuuacuggaaaacucucacaaugggaaacuaugccuccugaagggaauagcgccccuucagcuggguaacuguucaguggccggcuggaucuuggggaauccugagugcgaacuccugauuaguaaagagagcugguccuacaucguugaaaagccaaacccggagaauggaaccuguuaucccggccauuuugcugauuacgaggaacugagagagcaacucucuucggugagcucauucgaaagguuugagauuuucccuaaggagaguuccuggccaaaccacacugucacaggugugucugccagcugcucccaugacggggaaucaaguuuuuaucggaauuuacuguggcuuaccggcaaaaacggauuguaccccaaucugagcaagucuuaugcaaacaauaaagagaaggaaguucuaguacucuggggcgugcaccacccuccaaacaucggggaucagaaagcccuguaccauacggagaacgcuuacgucuccguggugucaagccacuauagucgcaaguucacucccgaaauagcaaagcgaccuaaaguccgugaccaggagggaagaaucaauuacuauuggacccuucuggagccaggugauacaauuaucuuugaagccaacggcaauuugauugcuccgagguacgccuucgcgcucucucggggguuuggauccggcaucauaaacagcaaugcacccauggacaagugugaugccaaaugccagacuccucaaggugcuauuaacucgucucugccauuccagaauguucaucccgugaccaucggggaguguccuaaguauguacgcuccgccaaauuaagaguggucacaggacugaggaacauuccaucaauccagagucggggccucuuuggcgcaaucgcuggguucauugaaggagguuggaccggcaugguggacgggugguacggauaucaccaccagaaugagcaaggcagcgguuacgccgcggaucagaaguccacgcagaacgccauaaaugggaucacuaacaaaguuaauucugugauugaaaagaugaacacacaguuuaccgcagucggcaaggaguucaauaaacuugagcgccgaauggaaaaccugaacaagaaaguggacgauggauucaucgacauauggacuuacaaugcugaguugcuaguacugcucgaaaacgagagaacacuggacuuucaugauagcaauguuaagaaccuuuaugaaaaagugaagucacaacugaagaauaacgccaaagagauuggcaaugggugcuucgaguuuuaccacaaguguaacgacgaaugcauggagagugucaaaaauggaaccuaugauuaccccaaguauuccgaagagagcaaauugaacagggagaagaucgacggugugaagcucgaaucuaugggcgucuaccagauccuggcuauuuauucaacgguggccaguagcuuaguucugcuagugucccucggggcaaucucuuucuggaugugcucgaauggaagccugcagugucggauuugcauauga

SEQ ID NO: 133575 - RNA, 1701 nt, Artificial Sequence
  derived and/or modified CDS sequence (opt3) from hemagglutinin__InfluenzaA__ADM07135
augaaggccauccuggugguccuccuuuacaccuucgcuacagcaaacgccgacacucugugcauuggcuaucacgcgaauaacagcacggauaccguugacacaguguuggagaaaaauguaacugugacccauuccgucaacuuacuggaagauaagcacaaugggaaacuauguaagcucagaggaguggcuccccugcaucuugguaaaugcaacauagccggcuggauccuggggaauccugagugugaaucuuugucaacagcaaguagcugguccuacauuguugagaccucuucgucagacaacggaacuugcuauccaggcgauuuuaucgacuacgaagaacucagggagcagcugagcaguguguccucuuucgaacgguuugagauuuucccgaagacaagcuccuggcccaaucacgaaucaaacaagggugucaccgccgcuuguccucaugcaggggccaaaaguuuuuauaagaaucugaucuggcucgugaaaaagggaaacagcuacccaaaauuaucuaaguccuauauaaaugauaagggcaaagagguacugguucuuuggggcauccaccaccccucaacgagcgcugaccaacagaguuuguaccagaacgccgaugcguacguguucgucgggacuucucgcuauuccaagaaauuuaagccugagauugcaauccgaccaaaagugcgugaccaggaaggaagaaugaauuacuauuggacccugguggagcccggugauaagauuacauucgaagccacuggcaaccuagucguuccuagguacgcuuuugccauggagcggaacgcagggagcggaaucauaauuucggacaccccagugcaugauugcaauacaaccugucaaacgccgaaaggcgcuaucaacacuucucuccccuuccagaauauucacccuaucacaaucgguaagugcccaaaguauguaaaauccaccaagcugcgccuugccacugggcugagaaacgugcccucaauucagaguaggggauuguuuggcgcgauagccggcuucaucgaagggggauggacagguauggucgacggcugguacggguaucaucaccagaaugagcaaggaagcggcuacgcagcugaccucaaauccacccagaacgccauugaugagaucacgaauaaggugaacucuguuauagaaaagaugaauacccaguuuacagcuguggguaaggaguucaaccaccuggaaaagcggauugagaauuuaaacaaaaaggucgacgauggguuccuggacaucuggacuuacaaugccgaacuccuugugcuguuggagaacgagcgcacccuagauuaucaugacagcaauguuaaaaaccuguacgaaaagguacgaucacagcucaaaaacaaugcaaaggagaucggcaacggauguuuugaguucuaucacaagugcgauaauacauguauggagagugugaaaaacggcacuuacgacuauccuaaguacuccgaagaggccaaacugaauagagaggaaauugauggggucaaacuugagagcaccaggaucuaucaaauucuggcuauauacucuacaguggcgucaaguuugguccucgugguuagccugggagcaaucuccuuuuggaugugcucuaacgguucguuacagugccggauuuguaucuga

SEQ ID NO: 133576 - RNA, 1701 nt, Artificial Sequence; identical to SEQ ID NO: 131202
  derived and/or modified CDS sequence (opt3) from hemagglutinin__InfluenzaA__ADM07144

SEQ ID NO: 133577 - RNA, 1701 nt, Artificial Sequence
  derived and/or modified CDS sequence (opt3) from hemagglutinin__InfluenzaA__ADM07154
augaaggccauccuggugguccuccuuuacaccuucgcuacagcaaacgccgacacucugugcauuggcuaucacgcgaauaacagcacggauaccguugacacaguguuggagaagaauguaacugugacccauuccgucaacuuacuggaagauaagcacaaugggaaacuauguaagcucagaggaguggcuccccugcaucuugguaaaugcaacauagccggcuggauccuggggaauccugagugugaaucuuugucaacagcaaguagcugguccuacauuguugagaccucuucgucagacaacggaacuugcuauccaggcgauuuuaucgacuacgaagaacucagggagcagcugagcaguguguccucuuucgaacgguuugagauuuucccgaagacaagcuccuggcccaaucacgauucaaacaagggugucaccgccgcuuguccucaugcaggggccaaaaguuuuuauaagaaucugaucuggcucgugaaaaagggaaacagcuacccaaaauuaucuaaguccuauauaaaugacaagggcaaagaaguacugguucuuuggggcauccaccaucccccuacgucagcugaucaacagagcuuguaccagaacgccgacgcguacguguucgucgggaccagucgcuauucuaagaaauuuaagccagagauugcaauccgacccaaagugcgugaucaggagggaagaaugaauuacuauuggacucugguggaaccuggugacaagauuacauucgaggccacuggcaaccuagucguuccaagguacgcuuuugccauggugcggaacgcaggguccggaaucauaauuagcgauaccccgguacacgacugcaauacaaccugucaaacgcccaaaggcgcuaucaacacuucgcucccuuuccagaauauucacccaaucacaaucgguaagugccccaaguaugugaaaucuaccaagcugcgccuugccacugggcugagaaacgucccuuccauucagucaaggggauuguuuggcgcgauagccggcuucaucgaagggggauggacagguaugguggacggcugguacggguaucaucaccagaaugagcaaggaaguggcuacgcagcugaucucaaaagcacccagaacgccauugacgaaaucacgaauaagguuaacuccgugauagagaaaaugaauacccaguuuacagcugucgguaaggaguucaaccaccuggaaaagcggauugagaauuuaaacaaaaagguggaugacggguuccuggauaucuggacuuacaaugccgaacuccuuguacuguuggagaacgaacgcacccuagacuaucaugauucuaauguuaaaaaccuguacgagaaggugcgaagccagcucaaaaacaaugcaaaggagaucggcaacggauguuuugaguucuaucacaagugcgacaauacauguauggagucagucaaaaacggcacuuacgauuauccaaaguacagugaagaggccaaacugaauagagaagagauugacggggugaaacuugaguccaccaggaucuaucaaauucuggcuauauacagcacagucgcgucuucauuggugcucguugugagucugggagcaaucagcuuuuggaugugcuccaacgguucuuuacagugccggauuuguaucuga

SEQ ID NO: 133578 - RNA, 1701 nt, Artificial Sequence; identical to SEQ ID NO: 131202
  derived and/or modified CDS sequence (opt3) from hemagglutinin__InfluenzaA__ADM07163

SEQ ID NO: 133579 - RNA, 1698 nt, Artificial Sequence; identical to SEQ ID NO: 133561
  derived and/or modified CDS sequence (opt3) from hemagglutinin__InfluenzaA__ADM07460

SEQ ID NO: 133580 - RNA, 1701 nt, Artificial Sequence
  derived and/or modified CDS sequence (opt3) from hemagglutinin__InfluenzaA__ADM07504
augaagaccaucauugcccugagcuacauacucugccuuguguucgcucagaaacugcccggcaacgacaauuccacagcaacuuuguguuuagggcaccaugccgucccuaacggaacgaucguuaagaccauuacaaaugaucaaaucgaggugacuaacgcgaccgaacugguacagucuucaaguacaggugagauuugcgacagcccacaccagauccuagauggcgaaaauuguacccucauagacgcucugcuuggggauccgcagugcgacggauuucaaaacaaaaagugggaucuguucguggagagauccaaagccuauucuaauuguuaccccuaugacgucccugauuacgcaucguugaggucacucguggccagcaguggcacucuggaauuuaacaaugaguccuucaacuggacagguguuacccagaaugggacgucuagcgcuugcauccggcgcuccaacaauucauuuuucagucgacugaacuggcucacucauuuaaauuuuaaguauccagcacugaacgugaccaugcccaacaaugagcaguucgacaaacuuuacauuuggggaguccaccauccuggcacagauaaggaccagaucuuuuuguaugcccaagcuagcggccguauuacugugucuaccaagagaucccagcaggccguaaucccaaacauagggucaaggccccggguucgcaauauuccuagcagaaucaguauuuacuggacaaucgugaaaccaggagauauccugcuaauuaacucuaccgguaaucucauagcgccgaggggcuacuucaagauccggaacgggaaauccagcauuaugcgcucggacgcacccaucggaaaguguaauucugaaugcauaacgccuaacggcuccauuccaaaugacaagcccuuucagaacgucaaucgaaucacuuauggugccuguccuagauacgugaaacaaaacacacugaaacuugcuaccgggaugaggaaugugccagagaagcagacucggggaaucuucggcgccauugcaggcuuuaucgaaaacgggugggagggaauggucgaugguugguauggcuuccgucaccaaaauucagaggggcgcggacaggcugccgaccugaagaguacacaggcggccauugaucagauaaacggcaaauugaacagacucaucgguaagaccaaugaaaaauuccaccagauugagaaggaauuuagcgagguugaagggaggauccaagaccuggagaaguacguggaggauacgaaaaucgacuuaugguccuauaacgcagaacugcucguagcucuugagaaucagcauaccauugaucugacagacucugaaaugaacaaguuguucgagaaaacuaagaaacagcuacgggaaaaugccgaggauaugggcaacggaugcuuuaagauauaccacaagugugacaaugcuugcaucggcagcauucgaaacgggaccuaugaucaugacguguaccgcgacgaggcccugaauaacagauuccagaucaaaggagucgaacucaagucagguuacaaagauuggauucuguggaucaguuuugcaauauccugcuuccuucuguguguggccuugcucggcuuuaucaugugggcuugccaaaaggggaauauuagguguaacaucugcauuuga

SEQ ID NO: 133581 - RNA, 1701 nt, Artificial Sequence
  derived and/or modified CDS sequence (opt3) from hemagglutinin__InfluenzaA__ADM12806
augaagaccaucauugcccugagcuacauacucugccuuguguucgcucagaaacugcccggcaacgacaauuccacagcaacuuuguguuuagggcaccaugccgucccuaacggaacgaucguuaagaccauuacaaaugaucaaaucgaggugacuaacgcgaccgaacugguacagucuucaaguacaggugagauuugcgacagcccacaccagauccuagauggcgaaaauuguacccucauagacgcucugcuuggggauccgcagugcgacggauuucaaaacaaaaagugggaucuguucguggagagauccaaagccuauucuaauuguuaccccuaugacgucccugauuacgcaucguugaggucacucguggccagcaguggcacucuggaauuuaacaaugaguccuucaacuggacagguguuacccagaaugggacgucuagcgcuugcauccggcgcuccaacaauucauuuuucagucgacugaacuggcucacucauuuaaauuuuaaguauccagcacugaacgugaccaugcccaacaaugagcaguucgacaaacuuuacauuuggggaguccaccauccuggcacagauaaggaccagaucuuuuuguaugcccaagcuagcggccguauuacugugucuaccaagagaucccagcaggccguaaucccaaacauagggucaaggccccggguucgcaauauuccuagcagaaucaguauuuacuggacaaucgugaaaccaggagauauccugcuaauuaacucuaccgguaaucucauagcgccgaggggcuacuucaagauccgguccgggaaaagcucgauuaugcgcucugacgcacccaucggaaaguguaacuccgaaugcauaacgccuaauggcucaauuccaaacgacaagcccuuucagaaugucaaccgaaucacuuauggugccuguccuagauacgugaaacaaaguacacugaaacuugcuaccgggaugaggaaugugccagagaagcagacucggggaaucuucggcgccauugcaggcuuuaucgaaaacgggugggagggaauggucgaugguugguauggcuuccgucaccagaauagcgaggggcgcggacaagcugccgaccugaaguccacacaggcggccauugaucagauaaacggcaaauugaauagacucaucgguaagaccaacgaaaaauuccaccagauugagaaggaauuuucugagguugaagggaggauccaagaccuggagaaguacguggaggauacgaaaaucgacuuauggagcuauaacgcagaacugcucguagcucuugagaaucagcauaccauugaucugacagacucagaaaugaacaaguuguucgagaaaacuaagaaacagcuacgggaaaaugccgaggauaugggcaacggaugcuuuaccauauaccacaagugugacaaugcuugcaucggcaguauucgaaacgggacauaugaucauaauguguaccgcgacgaggcccugaacaauagauuccagaucaagggagucgaacucaaauccgguuacaaggacuggauucuguggaucagcuuugcaauaucuugcuuccuucuguguguggccuugcucggcuuuaucaugugggcuugccaaaaagggaacauuagguguaauaucugcauuuga

SEQ ID NO: 133582 - RNA, 1701 nt, Artificial Sequence; identical to SEQ ID NO: 133581
  derived and/or modified CDS sequence (opt3) from hemagglutinin__InfluenzaA__ADM12817

SEQ ID NO: 133583 - RNA, 1701 nt, Artificial Sequence; identical to SEQ ID NO: 133581
  derived and/or modified CDS sequence (opt3) from hemagglutinin__InfluenzaA__ADM12828

SEQ ID NO: 133584 - RNA, 1701 nt, Artificial Sequence; identical to SEQ ID NO: 133581
  derived and/or modified CDS sequence (opt3) from hemagglutinin__InfluenzaA__ADM12839

SEQ ID NO: 133585 - RNA, 1701 nt, Artificial Sequence
  derived and/or modified CDS sequence (opt3) from hemagglutinin__InfluenzaA__ADM12850
augaaggccaucauugcucugagcuacauacucugccuuguguucgcacagaaacugcccggcaacgacaauuccaccgccacauuguguuuagggcaccaugcggucccuaacggaacuaucguuaagacgauuaccaaugaucaaaucgaggugacaaacgcuacugaacugguacagucuucaaguaccggugagauuugcgacagcccacaccagauccuagauggcgaaaauuguacacucauagacgcccugcuuggggauccgcagugcgacggauuucaaaacaaaaagugggaucuguucguggagagauccaaagcauauucuaauuguuaccccuaugacgucccugauuacgccucguugaggucacucguggcuagcaguggcacccuggaauuuaacaaugaguccuucaacuggacugguguuacacagaaugggaccucuagcgcaugcauccggcgcuccaacaauucauuuuucagucgacugaacuggcucacgcauuuaaauuuuaaguauccagcccugaacgugacuaugcccaacaaugagcaguucgacaaacuuuacauuuggggaguccaccauccuggcaccgauaaggaccagaucuuuuuguaugcucaagccagcggccguauuacagugucuacuaagagaucccagcaggcgguaaucccaaacauagggucaaggccccggguucgcaauauuccuagcagaaucaguauuuacuggaccaucgugaaaccaggagauauccugcuaauuaacucuacagguaaucucauagcaccgaggggcuacuucaagauccgguccgggaaaagcucgauuaugcgcucugacgcccccaucggaaaguguaacuccgaaugcauaaccccuaauggcucaauuccaaacgacaagcccuuucagaaugucaaccgaaucacguauggugcuuguccuagauacgugaaacaaaguacucugaaacuugccacagggaugaggaaugugccagagaagcagacccggggaaucuucggcgcaauugcuggcuuuaucgaaaacgggugggagggaauggucgaugguugguauggcuuccgucaccagaauagcgaggggcgcggacaagccgcggaccugaaguccacucaggccgcaauugaucagauaaacggcaaauugaauagacucaucgguaagacaaacgaaaaauuccaccagauugagaaggaauuuucugagguugaagggaggauccaagaccuggagaaguacguggaggauaccaaaaucgacuuauggagcuauaacgcugaacugcucguagcccuugagaaucagcauacgauugaucugaccgacucagaaaugaacaaguuguucgagaaaacaaagaaacagcuacgggaaaaugcugaggauaugggcaacggaugcuuuacuauauaccacaagugugacaaugccugcaucggcaguauucgaaacgggaccuaugaucauaauguguaccgcgacgaggcacugaacaauagauuccagaucaagggagucgaacucaaauccgguuacaaggacuggauucuguggaucagcuuugccauaucuugcuuccuucuguguguggcuuugcucggcuuuaucaugugggcgugccaaaaagggaacauuagguguaauaucugcauuuga

SEQ ID NO: 133586 - RNA, 1701 nt, Artificial Sequence; identical to SEQ ID NO: 130717
  derived and/or modified CDS sequence (opt3) from hemagglutinin__InfluenzaA__ADM12861

SEQ ID NO: 133587 - RNA, 1701 nt, Artificial Sequence; identical to SEQ ID NO: 130717
  derived and/or modified CDS sequence (opt3) from hemagglutinin__InfluenzaA__ADM12871

SEQ ID NO: 133588 - RNA, 1701 nt, Artificial Sequence; identical to SEQ ID NO: 130717
  derived and/or modified CDS sequence (opt3) from hemagglutinin__InfluenzaA__ADM12881

SEQ ID NO: 133589 - RNA, 1701 nt, Artificial Sequence; identical to SEQ ID NO: 130717
  derived and/or modified CDS sequence (opt3) from hemagglutinin__InfluenzaA__ADM12891

SEQ ID NO: 133590 - RNA, 1701 nt, Artificial Sequence; identical to SEQ ID NO: 130717
  derived and/or modified CDS sequence (opt3) from hemagglutinin__InfluenzaA__ADM12901

SEQ ID NO: 133591 - RNA, 1701 nt, Artificial Sequence; identical to SEQ ID NO: 131819
  derived and/or modified CDS sequence (opt3) from hemagglutinin__InfluenzaA__ADM12911

SEQ ID NO: 133592 - RNA, 1701 nt, Artificial Sequence; identical to SEQ ID NO: 130717
  derived and/or modified CDS sequence (opt3) from hemagglutinin__InfluenzaA__ADM12921

SEQ ID NO: 133593 - RNA, 1701 nt, Artificial Sequence; identical to SEQ ID NO: 130717
  derived and/or modified CDS sequence (opt3) from hemagglutinin__InfluenzaA__ADM12931

SEQ ID NO: 133594 - RNA, 1701 nt, Artificial Sequence; identical to SEQ ID NO: 130717
  derived and/or modified CDS sequence (opt3) from hemagglutinin__InfluenzaA__ADM12941

SEQ ID NO: 133595 - RNA, 1701 nt, Artificial Sequence; identical to SEQ ID NO: 130717
  derived and/or modified CDS sequence (opt3) from hemagglutinin__InfluenzaA__ADM12951

SEQ ID NO: 133596 - RNA, 1701 nt, Artificial Sequence
  derived and/or modified CDS sequence (opt3) from hemagglutinin__InfluenzaA__ADM12961
augaaggccgugcuggucguucuccuuuacaccuucgcuacagcaaacgccgacacucugugcaucggcuaucacgcgaauaacagcacggauaccguggacacaguauuggagaaaaaugugacugucacccauuccgugaacauuuuagaagauaagcacaaugggaaacuguguaagcuaggagguguugcuccccuccaucugggcaaaugcaacauagccggguggauccuuggaaauccugagugugaaucucugucaacagcaaguagcugguccuacauuguggagaccucuucgucagacaacggcacuugcuauccaggugauuuuaucgacuacgaagaguugagagagcagcucagcagugucuccucuuucgaaagguuugagauuuucccgaagacaagcuccuggcccaaucacgauucaaacaagggggugaccgccgcuuguccucaugcaggagccaaaaguuuuuauaagaaucugaucuggcugguuaaaaagggcaacagcuacccaaaacucucuaaguccuauauaaaugacaagggcaaagaaguauuagugcugugggggauccaccaccccucaacgagcgcugaucaacagagucuuuaccagaacgccgacgcguacgucuucgugggaacuucucgguauuccaagaaauuuaagccugagauugcaauccgcccaaaagugcgagaucaggagggucguaugaauuacuauuggaccuuggucgaacccggcgacaagauuacauucgaggccacugggaaccugguugugccuagauacgcuuuugccauggaaaggaacgcaggaagcggcaucauaauuucggauaccccaguacaugacugcaauacaaccugucaaacgccgaaaggugcuaucaacacuucucuacccuuccagaauauucacccuaucacaaucgggaagugcccaaaguaugugaaauccaccaagcuccggcuggccacuggacuucgcaacguccccucaauucagaguagaggccuguuuggcgcgauagccggguucaucgagggagguuggacaggcaugguggacgggugguacggauaucaucaccagaaugaacaaggcagcgguuacgcagcugauuugaaauccacccagaacgccauugacgagaucacgaauaagguuaacucugugauagagaaaaugaauacccaguuuacagcugucgggaaggaguucaaccaccucgaaaagaggauugaaaaucugaacaaaaagguggaugacggcuucuuagauaucuggacuuacaaugccgagcugcucguacuucuggaaaacgagcggaccuuggacuaucaugauagcaauguuaaaaaccuauacgagaaggugcgcucacagcugaaaaacaaugcaaaggaaaucggaaacggcuguuuugaguucuaucacaagugcgacaauacauguauggaaagugucaaaaacgggacuuacgauuauccuaaguacuccgaggaagccaaacucaaucgagaggagauugacggagugaagcuggaaagcaccagaaucuaucaaauucuugcuauauacucuacagucgcgucaagucugguguugguugugagccucggugcaaucuccuuuuggaugugcucuaacggcucgcugcagugcaggauuuguaucuga

SEQ ID NO: 133597 - RNA, 1701 nt, Artificial Sequence; identical to SEQ ID NO: 132366
  derived and/or modified CDS sequence (opt3) from hemagglutinin__InfluenzaA__ADM12971

SEQ ID NO: 133598 - RNA, 1701 nt, Artificial Sequence; identical to SEQ ID NO: 131818
  derived and/or modified CDS sequence (opt3) from hemagglutinin__InfluenzaA__ADM12981

SEQ ID NO: 133599 - RNA, 1701 nt, Artificial Sequence
  derived and/or modified CDS sequence (opt3) from hemagglutinin__InfluenzaA__ADM12991
augaaggccauccuggugguccuccuuuacaccuucgagacagcuaacgcagacacucugugcauuggcuaucacgccaauaacagcacggauaccguugacacaguguuggagaaaaauguaacugugacccauuccgucaacuuacuggaagauaagcacaaugggaaacuauguaagcucagaggaguggcgccccugcaucuugguaaaugcaacauagcuggcuggauccuggggaauccugaaugugagucuuugucaacagccaguagcugguccuacauuguugaaaccucuucgucagacaacggaacuugcuauccaggcgauuuuaucgacuacgaggagcucagggaacagcugagcaguguguccucuuucgagcgguuugaaauuuucccgaagacaagcuccuggcccaaucacgauucaaacaagggugucaccgcagccuguccucaugcuggggcaaaaaguuuuuauaagaaucugaucuggcucgugaaaaagggaaacagcuacccaaaauuaucuaaguccuauauaaaugacaagggcaaagagguacugguucuuuggggcauccaccaccccucaacgagcgccgaucaacagaguuuguaccagaacgcugacgccuacguguucgucgggacuucucgcuauuccaagaaauuuaagccugagauugcgauccgaccaaaagugcgugaucaggaaggaagaaugaauuacuauuggacccugguggagcccggugacaagauuacauucgaagcaacuggcaaccuagucguuccuagguacgccuuugcuauggagcggaacgccgggagcggaaucauaauuucggauaccccagugcaugacugcaauacaaccugucaaacgccgaaaggcgcaaucaacacuucucuccccuuccagaauauucacccuaucacaaucgguaagugcccaaaguauguaaaauccaccaagcugcgccuugcuacugggcugagaaacgugcccucaauucagaguaggggauuguuuggcgccauagcgggcuucaucgaagggggauggacagguauggucgacggcugguacggguaucaucaccagaaugagcaaggaagcggcuacgccgcagaucucaaauccacccagcacgcuauugacgagaucacgaacaagguaaauucuguuauagaaaagaugaacacccaguuuacagccguggguaaggaguucaaucaucuggaaaagcggauugagaacuuaaauaaaaaggucgaugacggguuccuggauaucuggacuuacaacgcugaacuccuugugcuguuggagaaugagcgcacccuagacuaucacgauagcaacgugaaaaaucuguacgaaaagguucgaucacagcucaaaaacaacgccaaggagaucggcaauggauguuuugaguucuaucauaagugcgacaacacauguauggaaagugugaaaaauggcacuuacgauuauccuaaguacuccgaagaggcaaaacugaacagagaggaaauugacggggucaaacuugagagcaccaggaucuaucaaauucuggccauauacucuacaguggcuucaaguuugguccucgugguuagccugggagcgaucuccuuuuggaugugcucuaaugguucguuacagugccggauuuguaucuga

SEQ ID NO: 133600 - RNA, 1701 nt, Artificial Sequence
  derived and/or modified CDS sequence (opt3) from hemagglutinin__InfluenzaA__ADM13001
augaaggccauccuggugguccuccuuuacaccuucgcuacagcaaacgccgacacucugugcauuggcuaucacgcgaauaacagcacggauaccguugacacaguguuggagaagaauguaacugugacccauuccgucaacuuacuggaagauaagcacaaugggaaacuauguaagcucagaggaguggcuccccugcaucuugguaaaugcaacauagccggcuggauccuggggaauccugagugugaaucuuugucaacagcaaguagcugguccuacauuguugagaccucuucgucagacaacggaacuugcuauccaggcgauuuuaucgacuacgaggagcucagggagcagcugagcaguguguccucuuucgaacgguuugagauuuucccgaagacaagcuccuggcccaaucacgauucaaacaagggugucaccgccgcuuguccucaugcaggggccaaaaguuuuuauaagaaucugaucuggcucgugaaaaagggaaacagcuacccaaaauuaucuaaguccuauauaaaugacaagggcaaagaaguacugguucuuuggggcauccaccaccccucaacgagcgcugaucaacagaguuuguaccagaacgccgacgcguacguguucgucgggacuucucgcuauuccaagaaauuuaagccugagauugcaauccgaccaaaagugcgugaucaggagggaagaaugaauuacuauuggacccugguggaacccggugacaagauuacauucgaggccacuggcaaccuagucguuccuagguacgcuuuugccauggaacggaacgcagggagcggaaucauaauuucggauaccccagugcaugacugcaauacaaccugucaaacgccgaaaggcgcuaucaacacuucucuccccuuccagaauauucacccuaucacaaucgguaagugcccaaaguauguaaaauccaccaagcugcgccuugccacugggcugagaaacauucccucaauacagaguaggggauuguuuggcgcgaucgccggcuucauugaagggggauggacagguaugguggacggcugguacggguaucaucaccagaaugaacaaggaagcggcuacgcagcugaucucaaauccacccagcacgccaucgacgagauaacgaacaaggucaauucugugauugagaaaaugaacacccaguuuacagcuguugguaaggaguucaaucaucuggaaaagcggaucgaaaacuuaaauaaaaagguggaugacggguuccuggauaucuggacuuacaacgccgagcuccuuguccuguuggaaaaugagcgcacccuagacuaucacgauagcaacgugaaaaaucuguacgagaagguacgaucacagcucaaaaacaacgcaaaggaaauuggcaauggauguuuugaguucuaucauaagugcgacaacacauguauggaaaguguuaaaaauggcacuuacgauuauccuaaguacuccgaggaagccaaacugaacagagaggagaucgacggggugaaacuugaaagcaccaggauuuaucaaauacuggcuaucuacucuacagucgcgucaaguuuggugcucgucgugagccugggagcaauuuccuuuuggaugugcucuaaugguucguuacagugccggaucuguaucuga

SEQ ID NO: 133601 - RNA, 1701 nt, Artificial Sequence; identical to SEQ ID NO: 131881
  derived and/or modified CDS sequence (opt3) from hemagglutinin__InfluenzaA__ADM13011

SEQ ID NO: 133602 - RNA, 1701 nt, Artificial Sequence
  derived and/or modified CDS sequence (opt3) from hemagglutinin__InfluenzaA__ADM13021
augaaggccauccuggugguccuccuuuacaccuucgcuacagcaaacgccgacacucugugcauuggcuaucacgcgaauaacagcacggauaccauagacacaguuuuggagaaaaaugugacuguaacccauuccgugaacuuacuggaagauaagcacaaugggaaacuauguaagcucagaggagucgcuccccugcaucuugguaaaugcaacaucgccggcuggauucuggggaauccugagugugaaucuuugucaacagcaaguagcugguccuacaucguggagaccucuucgucagacaacggaacuugcuauccaggcgauuuuauugacuacgaggagcucagggagcagcugagcaguguuuccucuuucgaacgguuugagaucuucccgaagacaagcuccuggcccaaucacgauucaaacaagggugugaccgccgcuuguccucaugcaggggccaaaaguuuuuauaagaaucugauauggcucgucaaaaagggaaacagcuacccaaaauuaucuaaguccuauaucaaugacaagggcaaagaagugcugguacuuuggggcauucaccaccccucaacgagcgcugaucaacagaguuuguaccagaacgccgacgcguacguuuucguggggacuucucgcuauuccaagaaauuuaagccugagaucgcaauucgaccaaaaguccgugaucaggagggaagaaugaauuacuauuggacccugguggaacccggugacaagaucacauucgaggccacuggcaaccuaguggucccuagguacgcuuuugccauggaacggaacgcagggagcggaauaauuaucucggauaccccaguucaugacugcaauacaaccugucaaacgccgaaaggcgcuauuaacacuucucuccccuuccagaauauccacccuaucacaauugguaagugcccaaaguaugugaaauccaccaagcugcgccuugccacugggcugagaaacguacccucaauacagaguaggggauuguuuggcgcgaucgccggcuucauugaagggggauggacagguaugguggacggcugguacggguaucaucaccagaaugaacaaggaagcggcuacgcagcugaucucaaauccacccagaacgccaucgacaagauaacgaauaaagucaacucugugauugagaagaugaauacccaguuuacagcuguugguaaggaguucaaccaccuggaaaaacggaucgagaauuuaaacaagaaaguggaugacggguuccuggauaucuggacuuacaaugccgaacuccuuguccuguuggagaacgaacgcacccuagacuaucaugauagcaaugugaagaaccuguacgagaaaguacgaucacagcucaagaacaaugcaaaggagauuggcaacggauguuuugaguucuaucacaaaugcgacaauacauguauggaaaguguuaagaacggcacuuacgauuauccuaaauacuccgaagaggccaagcugaauagagaagagaucgacggggugaaacuugagagcaccaggauuuaucaaauacuggcuaucuacucuacagucgcgucaaguuuggugcucgucgugagccugggagcaauuuccuuuuggaugugcucuaacgguucguuacagugccggaucuguaucuga

SEQ ID NO: 133603 - RNA, 1701 nt, Artificial Sequence; identical to SEQ ID NO: 132063
  derived and/or modified CDS sequence (opt3) from hemagglutinin__InfluenzaA__ADM13031

SEQ ID NO: 133604 - RNA, 1701 nt, Artificial Sequence
  derived and/or modified CDS sequence (opt3) from hemagglutinin__InfluenzaA__ADM13041
augaaggccauccuggugguccuccuuuacaccuucgcuacagcaaacgccgacacucugugcauuggcuaucacgcgaauaacagcacggauaccguugacacaguguuggagaaaaauguaacugugacccauuccgucaacuuacuggaagauaagcacaaugggaaacuauguaagcucagaggaguggcuccccugcaucuugguaaaugcaacauagccggcuggauccuggggaauccugagugugaaucuuugucaacagcaaguagcugguccuacauuguugagaccucuucgucagacaacggaacuugcuauccaggcgauuuuaucgacuacgaagaacucagggagcagcugagcaguguguccucuuucgaacgguuugagauuuucccgaagacaagcuccuggcccaaucacgauucaaacaagggugucaccgccgcuuguccucaugcaggggccaaaaguuuuuauaagaaucugaucuggcucgugaaaaagggaaacagcuacccaaaauuaucuaaguccuauauaaaugacaagggcaaagaaguacugguucuuuggggcauccaccaccccucaacgagcgcugaucaacagaguuuguaccagaacgccgacgcguacguguucgucgggacuucucgcuauuccaagaaauuuaagccugagauugcaauccgaccaaaagugcgugagcaggaaggaagaaugaauuacuauuggacccugguggagcccggugauaagauuacauucgaagccacuggcaaccuagucguuccuagguacgcuuuugccauggagcggaacgcagggagcggaaucauaauuucggacaccccagugcaugauugcaauacaaccugucaaacgccgaaaggcgcuaucaacacuucucuccccuuccagaauguacacccuauuacaaucgguaagugcccaaaguaugugaaauccaccaagcugcgccuugccacugggcugagaaacguccccucaauccagaguaggggauuguuuggcgcgauugccggcuucauagaagggggauggacagguaugguggacggcugguacggguaucaucaccagaaugagcaaggaagcggcuacgcagcugaccucaaauccacccagaacgccaucgaugagauuacgaauaagguuaacucugugaucgaaaagaugaauacccaguuuacagcugucgguaaggaguucaaccaccuggaaaagcggauagagaauuuaaacaaaaagguggacgauggguuccuggacauuuggacuuacaaugccgaacuccuuguacuguuggagaacgagcgcacccuagauuaucaugacagcaauguuaaaaaccuguacgaaaaggugcgaucacagcucaaaaacaaugcaaaggagaucggcaacggauguuuugaguucuaucacaagugcgauaauacauguauggagagugucaaaaacggcacuuacgacuauccuaaguacuccgaagaggccaaacugaauagagaggaaaucgauggggugaaacuugagagcaccaggauuuaucaaauccuggcuauuuacucuacagucgcgucaaguuuggugcucguugugagccugggagcaauauccuuuuggaugugcucuaacgguucguuacagugccggaucuguauuuga

SEQ ID NO: 133605 - RNA, 1701 nt, Artificial Sequence
  derived and/or modified CDS sequence (opt3) from hemagglutinin__InfluenzaA__ADM13051
augaaggccauccuggugguccuccuuuacaccuucgcuacaacuaacgcagacacgcugugcauuggcuaucacgccaauaacagcaccgauacaguugacacuguguuggagaaaaauguaaccgugacacauuccgucaacuuacuggaagauaagcacaaugggaaacuauguaagcucagaggaguggcgccccugcaucuugguaaaugcaacauagcuggcuggauccuggggaauccugagugugaaucuuugucaaccgccaguagcugguccuacauuguugagacuucuucgucagacaacggaacaugcuauccaggcgauuuuaucgacuacgaggagcucagggagcagcugagcaguguguccucuuucgaacgguuugagauuuucccgaagaccagcuccuggcccaaucacgauucaaacaagggugucacggcagccuguccucaugcuggggcaaaaaguuuuuauaagaaucugaucuggcucgugaaaaagggaaacagcuacccaaaauuaucuaaguccuauauaaaugacaagggcaaagaaguacugguucuuuggggcauccaccaccccucaacuagcgccgaucaacagaguuuguaccagaacgcugacgccuacguguucgucgggaccucucgcuauuccaagaaauuuaagccugagauugcgauccgaccaaaagugcgugaucaggagggaagaaugaauuacuauuggacacugguggaacccggugacaagauuacuuucgaggcaaccggcaaccuagucguuccuagguacgccuuugcuauggaacggaacgccgggagcggaaucauaauuucggauacaccagugcaugacugcaauaccacgugucaaacuccgaaaggcgcaaucaacacaucucuccccuuccagaauauucacccuaucaccaucgguaagugcccaaaguauguaaaauccacuaagcugcgccuugcuacagggcugagaaacgugcccucaauucagaguaggggauuguuuggcgccauagcgggcuucaucgaagggggauggaccgguauggucgacggcugguacggguaucaucaccagaaugaacaaggaagcggcuacgccgcagaucucaaauccacgcagaacgcuauugacaagaucaccaauaaagugaacucuguuauagagaagaugaauacacaguuuacugccguggguaaggaguucaaccaccuggaaaaacggauugagaauuuaaacaagaaagucgaugacggguuccuggauaucuggaccuacaaugcugaacuccuugugcuguuggagaacgaacgcacacuagacuaucaugauagcaauguaaagaaccuguacgagaaaguucgaucacagcucaagaacaaugccaaggagaucggcaacggauguuuugaguucuaucacaaaugcgacaauacuuguauggaaagugugaagaacggcaccuacgauuauccuaaauacuccgaagaggcaaagcugaauagagaagagauugacggggucaaacuugagagcacaaggaucuaucaaauucuggccauauacucuaccguggcuucaaguuugguccucgugguuagccugggagcgaucuccuuuuggaugugcucuaacgguucguuacagugccggauuuguaucuga

SEQ ID NO: 133606 - RNA, 1701 nt, Artificial Sequence
  derived and/or modified CDS sequence (opt3) from hemagglutinin__InfluenzaA__ADM13061
augaaggccauccuggugguccuccuuuacaccuucgcuacagcaaacgccgacacucugugcauuggcuaucacgcgaauaacagcacggauaccguugacacaguguuggagaagaauguaacugugacccauuccgucaacuuacuggaagauaagcacaaugggaaacuauguaagcucagaggaauagcuccccugcaucuugguaaaugcaacaucgccggcuggauucuggggaauccugagugugaaucuuugucaacagcaaguagcugguccuacaucguggagaccucuucgucagacaacggaacuugcuauccaggcgauuuuauugacuacgaggagcucagggagcagcugagcaguguuuccucuuucgaacgguuugagaucuucccgaagacaagcuccuggcccaaucacgauucaaacaagggugugaccgccgcuuguccucaugcaggggccaaaaguuuuuauaagaaucugauauggcucgucaaaaagggaaacagcuacccaaaauuaucuaaguccuauaucaaugacaagggcaaagaagugcugguacuuuggggcauucaccaccccucaacgagcgcugaucaacagaguuuguaccagaacgccgacgcguacguuuucguggggacuucucgcuauuccaagaaauuuaagccugagaucgcaauucgaccaaaaguccgugaucaggagggaagaaugaauuacuauuggacccugguggaacccggugacaagaucacauucgaggccacuggcaaccuaguggucccuagguacgcuuuugccauggaacggaacgcagggagcggaauaauuaucucggauaccccaguucaugacugcaauacaucuugucaaaccccgaaaggcgcuauuaacacgucccuccccuuccagaauauccacccuaucacuauugguaagugcccaaaguaugugaaaucaacaaagcugcgccuugccaccgggcugagaaacguacccaguauacagagcaggggauuguuuggcgcgaucgccggcuucauugaagggggauggacugguaugguggacggcugguacggguaucaucaccagaaugaacaaggauccggcuacgcagcugaucucaaaucuacacagaacgccaucgacgagauaaccaauaaggucaacagcgugauugagaaaaugaauacgcaguuuaccgcuguugguaaggaguucaaccaccuggaaaagcggaucgaaaauuuaaacaaaaagguggaugacggguuccuggauaucuggacauacaaugccgagcuccuuguccuguuggaaaacgagcgcacucuagacuaucaugauucaaaugugaaaaaccuguacgagaagguacgaagucagcucaaaaacaaugcaaaggaaauuggcaacggauguuuugaguucuaucacaagugcgacaauaccuguauggaauccguuaaaaacggcacauacgauuauccuaaguacagcgaggaagccaaacugaauagagaggagaucgacggggugaaacuugaaucuacuaggauuuaucaaauacuggcuaucuacucaaccgucgcgaguagcuuggugcucgucgugucccugggagcaauuucuuuuuggaugugcucgaacgguagcuuacagugccggaucuguaucuga

SEQ ID NO: 133607 - RNA, 1701 nt, Artificial Sequence; identical to SEQ ID NO: 132884
  derived and/or modified CDS sequence (opt3) from hemagglutinin__InfluenzaA__ADM13071

SEQ ID NO: 133608 - RNA, 1701 nt, Artificial Sequence
  derived and/or modified CDS sequence (opt3) from hemagglutinin__InfluenzaA__ADM13081
augaaggccauccuggugguccuccuuuacaccuucgcuacagcaaacgccgacacucugugcauuggcuaucacgcgaauaacagcacggauaccguugacacaguguuggagaaaaauguaacugugacccauuccgucaacuuacuggaagauaagcacaaugggaaacuauguaagcucagaggaauagcuccccugcaucuugguaaaugcaacaucgccggcuggauucuggggaauccugagugugaaucuuugucaacagcaaguagcugguccuacaucguggagaccucuggaucggacaacggcacuugcuauccaggugauuuuauugacuacgaagaacucagggagcagcugucaagcguuaguuccuucgaacgguuugagaucuucccgaagacaucuagcuggcccaaucacgauuccaacaagggggugaccgccgcuuguccucaugcaggagccaaaucauuuuauaagaaucugauauggcucgucaaaaagggcaacaguuacccaaaauuaagcaagucuuauaucaaugacaaggaaaaagaggugcugguacuuuggggcauucaccaccccuccacgucagcugaucaacagagcuuguaccagaacgccgacgcguacguuuucguggggaccagucgcuauucuaagaaauuuaagccugagaucgcaauucgaccaaaaguccgugaucaggaaggaagaaugaauuacuauuggacucugguggagcccggugacaagaucacauucgaagccacuggcaaccuaguggucccuagguacgcuuuugccauggagcggaacgcaggguccggaauaauuaucagcgauaccccaguucaugacugcaauacaaccugucaaacgccgaaaggcgcuauuaacacuucgcuccccuuccagaauauccacccuaucacaauugguaagugcccaaaguaugugaaaucuaccaagcugcgccuugccacugggcugagaaacguacccuccauacagucaaggggauuguuuggcgcgaucgccggcuucauugaagggggauggacagguaugguggacggcugguacggguaucaucaccagaaugagcaaggaaguggcuacgcagcugaucucaaaagcacccagaacgccaucgacgagauaacgaauaaggucaacuccgugauugaaaagaugaauacccaguuuacagcuguugguaaggaguucaaccaccuggaaaagcggaucgagaauuuaaacaaaaagguggaugacggguuccuggauaucuggacuuacaaugccgaacuccuuguccuguuggagaacgagcgcacccuagacuaucaugauucuaaugugaaaaaccuguacgaaaagguacgaagccagcucaaaaacaaugcaaaggagauuggcaacggauguuuugaguucuaucacaagugcgacaauacauguauggagucaguuaaaaacggcacuuacgauuauccuaaguacagugaagaggccaaacugaauagagaggaaaucgacggggugaaacuugaguccaccaggauuuaucaaauacuggcuaucuacagcacagucgcgucuucauuggugcucgucgugagucugggagcaauuagcuuuuggaugugcuccaacgguucuuuacagugccggaucuguaucuga

SEQ ID NO: 133609 - RNA, 1701 nt, Artificial Sequence; identical to SEQ ID NO: 132137
  derived and/or modified CDS sequence (opt3) from hemagglutinin__InfluenzaA__ADM13091

SEQ ID NO: 133610 - RNA, 1701 nt, Artificial Sequence; identical to SEQ ID NO: 131881
  derived and/or modified CDS sequence (opt3) from hemagglutinin__InfluenzaA__ADM13101

SEQ ID NO: 133611 - RNA, 1701 nt, Artificial Sequence
  derived and/or modified CDS sequence (opt3) from hemagglutinin__InfluenzaA__ADM13111
augaaggccauccuggugguccuccuuuacaccuucgagacagcuaacgcagacacucugugcauuggcuaucacgccaauaacagcacggauaccguugacacaguguuggaaaagaauguaacugugacccauuccgucaacuuacuggaggauaagcacaaugggaaacuauguaagcucagaggaguggcgccccugcaucuugguaaaugcaacauagcuggcuggauccuggggaauccugaaugugagucuuugucaacagccaguagcugguccuacauuguugaaaccucuucgucagacaacggaacuugcuauccaggcgauuuuaucaauuacgaggagcucagggaacagcugagcaguguguccucuuucgagcgguuugaaauuuucccgaagacaagcuccuggcccaaccacgacucaaauaagggugucaccgcagccuguccucaugcuggggcaaaaaguuuuuauaagaaccugaucuggcucgugaaaaagggaaauagcuacccaaaauuaucuaaguccuauauaaacgauaagggcaaagagguacugguucuuuggggcauccaccaccccucaacgagcgccgaccaacagaguuuguaccagaaugcugaugccuacguguucgucgggacuucucgcuauuccaagaaauuuaagccugagauugcgauccgaccaaaagugcgugaccaggaaggaagaaugaacuacuauuggacccugguggaucccggugacaagauuacauucgaggcaacuggcaaccuagucguuccuagguacgccuuugcuauggaacggaaugccgggagcggaaucauaauuucggauaccccagugcaugacugcaacacaaccugucaaacgccgaauggcgcaaucaacacuucucuccccuuccagaauauucacccuaucacaaucgguaaaugcccaaaguauguaaaguccaccaaacugcgccuugcuacugggcugagaaacgugcccucaauucagaguaggggauuguuuggcgccauagcgggcuucaucgaagggggauggacagguauggucgacggcugguacggguaucaucaccagaaugaacaaggaagcggcuacgccgcagaucucaaguccacccagaacgcuauugacaaaaucacgaauaaggugaacucuguuauagagaaaaugaauacccaguuuacagccguggguaaggaguucaaccaccuggaaaagcggauugagaauuuaaacaaaaaggucgaugacggguuccuggauaucuggacuuacaaugcugaacuccuugugcuguuggagaacgaacgcacccuagacuaucaugauagcaacguuaaaaaucuguacgagaagguacgaucacagcucaaaaacaaugccaaggagaucggcaacggauguuuugaguucuaucacaagugcgacaauacauguauggagagugugaaaaacggcacuuacgauuauccuaaguacuccgaagaggcaaaacugaauagagaagagauugacggggucaaacuugagagcaccaggaucuaucaaauucuggccauauacucuacaguggcuucaaguuugguccucgugguuagccugggagcgaucuccuuuuggaugugcucuaacgguucguuacagugccggauuuguaucuga

SEQ ID NO: 133612 - RNA, 1701 nt, Artificial Sequence; identical to SEQ ID NO: 130717
  derived and/or modified CDS sequence (opt3) from hemagglutinin__InfluenzaA__ADM13121

SEQ ID NO: 133613 - RNA, 1701 nt, Artificial Sequence; identical to SEQ ID NO: 131881
  derived and/or modified CDS sequence (opt3) from hemagglutinin__InfluenzaA__ADM13131

SEQ ID NO: 133614 - RNA, 1701 nt, Artificial Sequence; identical to SEQ ID NO: 132045
  derived and/or modified CDS sequence (opt3) from hemagglutinin__InfluenzaA__ADM13141

SEQ ID NO: 133615 - RNA, 1701 nt, Artificial Sequence; identical to SEQ ID NO: 132045
  derived and/or modified CDS sequence (opt3) from hemagglutinin__InfluenzaA__ADM13151

SEQ ID NO: 133616 - RNA, 1701 nt, Artificial Sequence; identical to SEQ ID NO: 131818
  derived and/or modified CDS sequence (opt3) from hemagglutinin__InfluenzaA__ADM13161

SEQ ID NO: 133617 - RNA, 1701 nt, Artificial Sequence; identical to SEQ ID NO: 132366
  derived and/or modified CDS sequence (opt3) from hemagglutinin__InfluenzaA__ADM13171

SEQ ID NO: 133618 - RNA, 1701 nt, Artificial Sequence; identical to SEQ ID NO: 132366
  derived and/or modified CDS sequence (opt3) from hemagglutinin__InfluenzaA__ADM13181

SEQ ID NO: 133619 - RNA, 1701 nt, Artificial Sequence
  derived and/or modified CDS sequence (opt3) from hemagglutinin__InfluenzaA__ADM13191
augaaggccauccuggugguccuccuuuacacccuggcuacagcaaacgccgacacuuugugcauuggcuaucacgcgaauaacagcacggauaccguugacacaguguuagagaaaaauguaacugugacccauuccgucaaccugcuagaagauaagcacaaugggaaacucuguaagcugagaggaguggcuccccuucaucuggguaaaugcaacauagccggcuggaucuuggggaauccugagugugaaucucucucaacagcaaguagcugguccuacauuguugagaccucuucgucagacaacggaacuugcuauccaggcgauuucaucgacuacgaggagcugagggagcagcugagcaguguguccucuuuugaacgguucgagauuuuuccgaagacaagcuccuggcccaaucacgauucaaacaagggugucaccgccgcuuguccucaugcaggggccaaaaguuucuauaagaaucucaucugguuagugaaaaagggaaacagcuacccaaaacugucuaaguccuauauaaaugacaagggcaaagaaguacuuguuuuguggggcauccaccaccccucaacgagcgcugaucaacagagucuguaccagaacgccgacgcguacguguuugucgggacuucucgcuauuccaagaaauucaagccugagauugcaauccgaccaaaagugcgugaucaggagggaagaaugaauuacuauuggacccuaguggaacccggugacaagauuacauuugaggccacuggcaaccucgucguuccuagguacgcuuucgccauggaacggaacgcagggagcggaaucauaauuucggauaccccagugcaugacugcaauacaaccugucaaacgccgaaaggcgcuaucaacacuucucugcccuuucagaauauucacccuaucacaaucgguaagugcccaaaguauguaaaauccaccaaacuucgccuggccacuggguugagaaacgugcccucaauucagaguaggggacucuucggcgcgauagccggcuuuaucgaagggggauggacagguauggucgacggcugguacggguaucaucaccagaaugaacaaggaagcggcuacgcagcugaucugaaguccacccagcacgccauugacgagaucacgaacaagguaaauucuguuauagagaaaaugaacacccaguucacagcuguggguaaggaauuuaaucauuuagagaagcggauugaaaaccugaauaaaaaggucgaugacggguuccucgauaucuggacuuacaacgccgagcuucugguguugcuagaaaaugagcgcacccuggacuaucacgauagcaacgugaaaaaucucuacgagaagguucgaucacagcugaaaaacaacgcaaaggaaaucggcaauggauguuucgaguuuuaucauaagugcgacaacacauguauggaaagugugaaaaauggcacuuacgauuauccuaaguacuccgaggaagccaaacuuaacagagaggagauugacggggucaagcuggaaagcaccaggaucuaucaaauuuuggcuauauacucuacaguggcgucaagucucguccuggugguuagcuuaggagcaaucuccuucuggaugugcucuaaugguucgcugcagugccggauuuguaucuga

SEQ ID NO: 133620 - RNA, 1701 nt, Artificial Sequence
  derived and/or modified CDS sequence (opt3) from hemagglutinin__InfluenzaA__ADM13211
augaaggccauccuggugguccuccuuuacacccuggcuacagcaaacgccgacacuuugugcauuggcuaucacgcgaauaacagcacggauaccguugacacaguguuagagaaaaauguaacugugacccauuccgucaaccugcuagaagauaagcacaaugggaaacucuguaagcugagaggaauagcuccccuucaucuggguaaaugcaacaucgccggcuggauuuuggggaauccugagugugaaucucucucaacagcaaguagcugguccuacaucguggagaccucuucgucagacaacggaacuugcuauccaggcgauuucauugacuacgaggagcugagggagcagcugagcaguguuuccucuuuugaacgguucgagaucuuuccgaagacaagcuccuggcccaaucacgauucaaacaagggugugaccgccgcuuguccucaugcaggggccaaaaguuucuauaagaaucucauaugguuagucaaaaagggaaacagcuacccaaaacugucuaaguccuauaucaaugacaagggcaaagaagugcuuguauuguggggcauucaccaccccucaacgagcgcugaucaacagagucuguaccagaacgccgacgcguacguuuuuguggggacuucucgcuauuccaagaaauucaagccugagaucgcaauucgaccaaaaguccgugaucaggagggaagaaugaauuacuauuggacccuaguggaacccggugacaagaucacauuugaggccacuggcaaccucguggucccuagguacgcuuucgccauggaacggaacgcagggagcggaauaauuaucucggauaccccaguucaugacugcaauacaaccugucaaacgccgaaaggcgcuauuaacacuucucugcccuuucagaauauccacccuaucacaauugguaagugcccaaaguaugugaaauccaccaaacuucgccuggccacuggguugagaaacguacccucaauacagaguaggggacucuucggcgcgaucgccggcuuuauugaagggggauggacagguaugguggacggcugguacggguaucaucaccagaaugaacaaggaagcggcuacgcagcugaucugaaguccacccagaacgccaucgacgagauaacgaauaaggucaacucugugauugagaaaaugaauacccaguucacagcuguugguaaggaauuuaaccacuuagagaagcggaucgaaaaucugaacaaaaagguggaugacggguuccucgauaucuggacuuacaaugccgagcuucuggucuugcuagaaaacgagcgcacccuggacuaucaugauagcaaugugaaaaaccucuacgagaagguacgaucacagcugaaaaacaaugcaaaggaaauuggcaacggauguuucgaguuuuaucacaagugcgacaauacauguauggaaaguguuaaaaacggcacuuacgauuauccuaaguacuccgaggaagccaaacuuaauagagaggagaucgacggggugaagcuggaaagcaccaggauuuaucaaauauuggcuaucuacucuacagucgcgucaagucucgugcuggucgugagcuuaggagcaauuuccuucuggaugugcucuaacgguucgcugcagugccggaucuguaucuga

SEQ ID NO: 133621 - RNA, 1701 nt, Artificial Sequence; identical to SEQ ID NO: 133620
  derived and/or modified CDS sequence (opt3) from hemagglutinin__InfluenzaA__ADM13221

SEQ ID NO: 133622 - RNA, 1701 nt, Artificial Sequence
  derived and/or modified CDS sequence (opt3) from hemagglutinin__InfluenzaA__ADM13231
augaaggccauccuggugguccuccuuuacaccuucgagacagcuaacgcagacacucugugcauuggcuaucacgccaauaacagcacggauaccguugacacaguguuggaaaagaauguaacugugacccauuccgucaacuuacuggaggauaagcacaaugggaaacuauguaagcucagaggaguggcgccccugcaucuugguaaaugcaacauagcuggcuggauccuggggaauccugaaugugagucuuugucaacagccaguagcugguccuacauuguugaaaccucuucgucagacaacggaacuugcuauccaggcgauuuuaucaauuacgaggagcucagggaacagcugagcaguguguccucuuucgagcgguuugaaauuuucccgaagacaagcuccuggcccaaccacgacucaaauaagggugucaccgcagccuguccucaugcuggggcaaaaaguuuuuauaagaaccugaucuggcucgugaaaaagggaaauagcuacccaaaauuaucuaaguccuauauaaacgauaagggcaaagagguacugguucuuuggggcauccaccaccccucaacgagcgccgaccaacagaguuuguaccagaaugcugaugccuacguguucgucgggacuucucgcuauuccaagaaauuuaagccugagauugcgauccgaccaaaagugcgugaccaggaaggaagaaugaacuacuauuggacccugguggagcccggugauaagauuacauucgaagcaacuggcaaccuagucguuccuagguacgccuuugcuauggagcggaaugccgggagcggaaucauaauuucggacaccccagugcaugauugcaacacaaccugucaaacgccgaauggcgcaaucaacacuucucuccccuuccagaauauucacccuaucacaaucgguaaaugcccaaaguauguaaaguccaccaaacugcgccuugcuacugggcugagaaacgugcccucaauucagaguaggggauuguuuggcgccauagcgggcuucaucgaagggggauggacagguauggucgacggcugguacggguaucaucaccagaaugagcaaggaagcggcuacgccgcagaccucaaguccacccagaacgcuauugauaaaaucacgaauaaggugaacucuguuauagagaaaaugaauacccaguuuacagccguggguaaggaguucaaccaccuggaaaagcggauugaaaauuuaaacaaaaaggucgacgauggguuccuggacaucuggacuuacaaugcugagcuccuugugcuguuggaaaacgagcgcacccuagauuaucaugacagcaacguuaaaaaucuguacgagaagguacgaucacagcucaaaaacaaugccaaggaaaucggcaacggauguuuugaguucuaucacaagugcgauaauacauguauggaaagugugaaaaacggcacuuacgacuauccuaaguacuccgaggaagcaaaacugaauagagaggagauugauggggucaaacuugaaagcaccaggaucuaucaaauucuggccauauacucuacaguggcuucaaguuugguccucgugguuagccugggagcgaucuccuuuuggaugugcucuaacgguucguuacagugccggauuuguaucuga

SEQ ID NO: 133623 - RNA, 1701 nt, Artificial Sequence; identical to SEQ ID NO: 131881
  derived and/or modified CDS sequence (opt3) from hemagglutinin__InfluenzaA__ADM13241

SEQ ID NO: 133624 - RNA, 1701 nt, Artificial Sequence
  derived and/or modified CDS sequence (opt3) from hemagglutinin__InfluenzaA__ADM13251
augaaggccauccuggugguccuccuuuacaccuucgcuacaacuaacgcagacacgcugugcauuggcuaucacgccaauaacagcaccgauacaguugacacuguguuggagaaaaauguaaccgugacacauuccgucaacuuacuggaagauaagcacaaugggaaacuauguaagcucagaggaguggcgccccugcaucuugguaaaugcaacauagcuggcuggauccuggggaauccugagugugaaucuuugucaaccgccaguagcugguccuacauuguugagacuucuucgucagacaacggaacaugcuauccaggcgauuuuaucgacuacgaggagcucagggagcagcugagcaguguguccucuuucgaacgguuugagauuuucccgaagaccagcuccuggcccaaucacgauucaaacaagggugucacggcagccuguccucaugcuggggcaaaaaguuuuuauaagaaucugaucuggcucgugaaaaagggaaacagcuacccaaaauuaucuaaguccuauauaaaugacaagggcaaagaaguacugguucuuuggggcauccaccaccccucaacuagcgccgaucaacagaguuuguaccagaacgcugacgccuacguguucgucgggaccucucgcuauuccaagaaauuuaagccugagauugcgauccgaccaaaagugcgugaucaggagggaagaaugaauuacuauuggacacugguggaacccggugacaagauuacuuucgaggcaaccggcaaccuagucguuccuagguacgccuuugcuauggaacgggaugccgggagcggaaucauaauuucggacacaccagugcaugacugcaacaccacgugucaaacuccgaaaggcgcaaucaauacaucucuccccuuccagaacauucacccuaucaccaucgguaagugcccaaaguauguaaaauccacuaagcugcgccuugcuacagggcugagaaaugugcccucaauucagaguaggggauuguuuggcgccauagcgggcuucaucgaagggggauggaccgguauggucgauggcugguacggguaucaucaccagaacgaacaaggaagcggcuacgccgcagaccucaaauccacgcagaaugcuauugauaagaucaccaacaaaguuaauucugugauagagaagaugaacacacaguuuacugccguggguaaggaguucaaucaccuggaaaaacggauugagaacuuaaauaagaaagucgacgauggguuccuggacaucuggaccuacaacgcugaacuccuugugcuguuggagaaugaacgcacacuagauuaucaugacagcaacguaaagaaucuguacgagaaaguucgaucacagcucaagaacaacgccaaggagaucggcaauggauguuuugaguucuaucacaaaugcgauaacacuuguauggaaagugugaagaauggcaccuacgacuauccuaaauacuccgaagaggcaaagcugaacagagaagagauugauggggucaaacuugagagcacaaggaucuaucaaauucuggccauauacucuaccguggcuucaaguuugguccucgugguuagccugggagcgaucuccuuuuggaugugcucuaaugguucguuacagugccggauuuguaucuga

SEQ ID NO: 133625 - RNA, 1701 nt, Artificial Sequence
  derived and/or modified CDS sequence (opt3) from hemagglutinin__InfluenzaA__ADM13261
augaaggccauccuggugguccuccuuuacaccuucgcuacagcaaacgccgacacucugugcauuggcuaucacgcgaauaacagcacggauaccguugacacaguguuggagaagaauguaacugugacccauuccgucaacuuacuggaagauaagcacaaugggaaacuauguaagcucagaggaauagcuccccugcaucuugguaaaugcaacaucgccggcuggauucuggggaauccugagugugaaucuuugucaacagcaaguagcugguccuacaucguggagaccucuggaucggacaacggcacuugcuauccaggugauuuuauugacuacgaagaacucagggagcagcugucaagcguuaguuccuucgaacgguuugagaucuucccgaagacaucuagcuggcccaaucacgauuccaacaagggggugaccgccgcuuguccucaugcaggagccaaaucauuuuauaagaaucugauauggcucgucaaaaagggcaacaguuacccaaaauuaagcaagucuuauaucaaugacaagggcaaagaagugcugguacuuugggggauucaccaccccuccacgucagcugaucaacagagcuuguaccagaacgccgacgcguacguuuucgugggaaccagucgcuauucuaagaaauuuaagccugagaucgcaauucgaccaaaaguccgugaucaggaggguagaaugaauuacuauuggacucugguggaacccggcgacaagaucacauucgaggccacugggaaccuaguggucccuagguacgcuuuugccauggaacggaacgcaggauccggcauaauuaucagcgauaccccaguucaugacugcaauacaaccugucaaacgccgaaaggugcuauuaacacuucgcuccccuuccagaauauccacccuaucacaauugggaagugcccaaaguaugugaaaucuaccaagcugcgccuugccacuggacugagaaacguacccuccauacagucaaggggcuuguuuggcgcgaucgccggguucauugagggagguuggacaggcaugguggacgggugguacggauaucaucaccagaaugaacaaggcagugguuacgcagcugaucucaaaagcacccagaacgccaucgacgagauaacgaauaaggucaacuccgugauugagaaaaugaauacccaguuuacagcuguugggaaggaguucaaccaccuggagaagcggaucgaaaauuuaaacaaaaagguggaugacggcuuccuggauaucuggacuuacaaugccgagcuccuuguccuguuggaaaacgagcgcacccuagacuaucaugauucuaaugugaaaaaccuguacgagaagguacgaagccagcucaaaaacaaugcaaaggaaauuggaaacggcuguuuugaguucuaucacaagugcgacaauacauguauggaaucaguuaaaaacgggacuuacgauuauccuaaguacagugaggaagccaaacugaauagagaggagaucgacggagugaaacuugaauccaccaggauuuaucaaauacuggcuaucuacagcacagucgcgucuucauuggugcucgucgugagucugggugcaauuagcuuuuggaugugcuccaacggcucuuuacagugccggaucuguaucuga

SEQ ID NO: 133626 - RNA, 1701 nt, Artificial Sequence
  derived and/or modified CDS sequence (opt3) from hemagglutinin__InfluenzaA__ADM13271
augaaggccauccuggugguccuccuuuacaccuucgcuacagcaaacgccgacacucugugcauuggcuaucacgcgaauaacagcacggauaccguugacacaguguuggagaaaaauguaacugugacccauuccgucaacuuacuggaagauaagcacaaugggaaacuauguaagcucagaggaguggcuccccugcaucuugguaaaugcaacauagccggcuggauccuggggaauccugagugugaaucuuugucaacagcaaguagcugguccuacauuguugagaccucuucgucagacaacggaacuugcuauccaggcgauuuuaucgacuacgaggagcucagggagcagcugagcaguguguccucuuucgaacgguuugagauuuucccgaagacaagcuccuggcccaaucacgauucaaacaagggugucaccgccgcuuguccucaugcaggggccaaaaguuuuuauaagaaucugaucuggcucgugaaaaagggaaacagcuacccaaaauuaucuaaguccuauauaaaugacaagggcaaagaaguacugguucuuuggggcauccaccaccccucaacgagcgcugaucaacagaguuuguaccagaacgccgacgcguacguguucgucgggacuucucgcuauuccaagaaauuuaagccugagauugcaauccgaccaaaagugcgugaucaggagggaagaaugaauuacuauuggacccugguggaacccggugacaagauuacauucgaggccacuggcaaccuagucguuccuagguacgcuuuugccauggaacggaacgcagggagcggaaucauaauuucggauaccccagugcaugacugcaauacaaccugucaaacgccgaaaggcgcuaucaacacuucucuccccuuccagaauauucacccuaucacaaucgguaagugcccaaaguauguaaaauccaccaagcugcgccuugccacugggcugagaaacgugcccucaauucagaguaggggauuguuuggcgcgauagccggcuucaucgaagggggauggacagguauggucgacggcugguacggguaucaucaccagaaugaacaaggaagcggcuacgcagcugaucucaaauccacccagaacgccauugacaagaucacgaauaaagugaacucuguuauagagaagaugaauacccaguuuacagcuguggguaaggaguucaaccaccuggaaaaacggauugagaauuuaaacaagaaagucgaugacggguuccuggauaucuggacuuacaaugccgaacuccuugugcuguuggagaacgaacgcacccuagacuaucaugauagcaauguaaagaaccuguacgagaaaguucgaucacagcucaagaacaaugcaaaggagaucggcaacggauguuuugaguucuaucacaaaugcgacaauacauguauggaaagugugaagaacggcacuuacgauuauccuaaauacuccgaagaggccaagcugaauagagaagagauugacggggucaaacuugagagcaccaggauccaucaaauucuggcuauauauucuacaguggcgucaaguuugguccucgugguuagccugggagcaaucuccuuuuggaugugcucuaacgguucguuacagugccggauuuguaucuga

SEQ ID NO: 133627 - RNA, 1701 nt, Artificial Sequence; identical to SEQ ID NO: 133622
  derived and/or modified CDS sequence (opt3) from hemagglutinin__InfluenzaA__ADM13281

SEQ ID NO: 133628 - RNA, 1701 nt, Artificial Sequence; identical to SEQ ID NO: 131818
  derived and/or modified CDS sequence (opt3) from hemagglutinin__InfluenzaA__ADM13291

SEQ ID NO: 133629 - RNA, 1701 nt, Artificial Sequence
  derived and/or modified CDS sequence (opt3) from hemagglutinin__InfluenzaA__ADM13301
augaaggccauccuggugguccuccuuuacaccuucgcuacagcaaacgccgacacucugugcauuggcuaucacgcgaauaacagcacggauaccguugacacaauauuggagaaaaaugugacuguaacccauuccgugaacuuacuggaagauaagcacaaugggaaacuauguaagcucagaggagucgcuccccugcaucuugguaaaugcaacaucgccggcuggauucuggggaauccugagugugaaucuuugucaacagcaaguagcugguccuacaucguggagaccucuucgucagacaacggaacuugcuauccaggcgauuuuauugacuacgaagaacucagggagcagcugagcaguguuuccucuuucgaacgguuugagaucuucccgaagacaagcuccuggcccaaucacgauucaaacaagggugugaccgccgcuuguccucaugcaggggccaaaaguuuuuauaagaaucugauauggcucgucaaaaaggaaaacagcuacccaaaauuaucuaaguccuauaucaaugacaagggaaaagaggugcugguacuuuggggcauucaccaccccucaacgagcgcugaucaacagaguuuguaccagaacguugacgccuacguguucgucggcacuucucgcuauuccaagaaauuuaagccugagaucgcgauucgaccaaaagugcgugaucaggaagggagaaugaauuacuauuggacccugguggagcccggagacaagaucacauucgaagcaacugguaaccuagucguuccuagguacgccuuugcuauggagcggaacgccggcagcgggauaauuaucucggauaccccagugcaugacugcaauacaaccugucaaacgccgaaaggagcaauuaacacuucucuccccuuccagaauauccacccuaucacaauuggcaagugcccaaaguauguaaaauccaccaagcugcgccuugcuacuggucugagaaacgugcccucaauacagaguaggggguuguuuggagccaucgcgggcuucauugaaggcggguggacaggaauggucgacgguugguacggcuaucaucaccagaaugagcaagggagcggauacgccgcagaucucaaauccacccagaacgcuaucgacgagauaacgaauaaggugaacucuguuauugaaaagaugaauacccaguuuacagccgugggcaaggaguucaaccaccuggaaaagcggaucgagaauuuaaacaaaaaggucgaugacgguuuccuggauaucuggacuuacaaugcugaacuccuugugcuguuggagaacgagcgcacccuagacuaucaugauagcaauguuaaaaaccuguacgaaaagguacgaucacagcucaaaaacaaugccaaggagauugggaacggcuguuuugaguucuaucacaagugcgacaauacauguauggagagugugaaaaacggaacuuacgauuauccuaaguacuccgaagaggcaaaacugaauagagaggaaaucgacggcgucaaacuugagagcaccaggauuuaucaaauacuggccaucuacucuacaguggcuucaaguuugguccucgugguuagccugggggcgauuuccuuuuggaugugcucuaacggaucguuacagugccggaucuguaucuga

SEQ ID NO: 133630 - RNA, 1701 nt, Artificial Sequence
  derived and/or modified CDS sequence (opt3) from hemagglutinin__InfluenzaA__ADM13311
augaaggccauccuggugguccuccuuuacaccuucgcuacagcaaacgccgacacucugugcauuggcuaucacgcgaauaacagcacggauaccguugacacaauauuggagaaaaaugugacuguaacccauuccgugaacuuacuggaaaauaagcacaacgggaaacuauguaagcucagaggagucucuccccugcaucuugguaaaugcaauaucgcuggcuggauucuggggaacccugagugugaaucauugaguacagccagcuccuggucuuacaucguggagaccucgucaagcgauaauggaacuugcuauccaggcgacuuuauugauuacgaggagcucagggagcagcugaguuccguuucuagcuucgaacgguuugagaucuucccgaagacauccucauggcccaaccacgacaguaauaagggugugaccgcagccuguccucaugcuggggcaaagagcuuuuauaagaaccugauauggcucgucaaaaagggaaauucuuacccaaaauuauccaagucauauaucaacgauaagggcaaagaagugcugguacuuuggggcauucaccaccccagcacgagugccgaccaacagucuuuguaccagaaugcugaugccuacguuuucguggggacuucccgcuauagcaagaaauuuaagccugagaucgcgauucgaccaaaaguccgugaccaggagggaagaaugaacuacuauuggacccugguggaacccggugauaagaucacauucgaggcaacuggcaaccuaguggucccuagguacgccuuugcuauggaacggaaugccgggucgggaauaauuaucucugacaccccaguucaugauugcaacacaaccugucaaacgccgaaaggcgcaauuaauacuucccuccccuuccagaacauccacccuaucacaauugguaagugcccaaaguaugugaaaucaaccaagcugcgccuugcuacugggcugagaaauguacccaguauacagagcaggggauuguuuggcgccaucgcgggcuucauugaagggggauggacagguaugguggacggcugguacggguaucaucaccagaacgaacaaggauccggcuacgccgcagaccucaaaucuacccagaaugcuaucgaugagauaacgaacaaggucaauagcgugauugagaaaaugaacacccaguuuacagccguugguaaggaguucaaucaccuggaaaagcggaucgaaaacuuaaauaaaaagguggacgauggguuccuggacaucuggacuuacaacgcugagcuccuuguccuguuggaaaaugagcgcacccuagauuaucaugacucaaacgugaaaaaccuguacgagaagguacgaagucagcucaaaaauaacgccaaggaaauuggcaauggauguuuugaguucuaucacaagugcgauaacacauguauggaauccguuaaaaauggcacuuacgacuauccuaaguacagcgaggaagcaaaacugaacagagaggagaucgauggggugaaacuugaaucuaccaggauuuaucaaauacuggccaucuacucaacagcugcgaguagcuugguccucguggucucccugggagcaauuucuuuuuggaugugcucgaaugguagcuuacagugccggaucuguaucuga

SEQ ID NO: 133631 - RNA, 1701 nt, Artificial Sequence; identical to SEQ ID NO: 131881
  derived and/or modified CDS sequence (opt3) from hemagglutinin__InfluenzaA__ADM13321

SEQ ID NO: 133632 - RNA, 1701 nt, Artificial Sequence
  derived and/or modified CDS sequence (opt3) from hemagglutinin__InfluenzaA__ADM13331
augaaggccauccuggugguccuccuuuacaccuucgcuacagcaaacgccgacacucugugcauuggcuaucacgcgaauaacagcacggauaccguugacacaguguuggagaaaaauguaacugugacccauuccgucaacuuacuggaagauaagcacaaugggaaacuauguaagcucagaggaguggcuccccugcaucuugguaaaugcaacauagccggcuggauccuggggaauccugagugugaaucuuugucaacagcaaguagcugguccuacauuguugagaccucuucgucagacaacggaacuugcuauccaggcgauuuuaucgacuacgaggagcucagggagcagcugagcaguguguccucuuucgaacgguuugagauuuucccgaagacaagcuccuggcccgaucacgacucaaauaagggugucaccgccgcuuguccucaugcaggggccaaaaguuuuuauaagaaccugaucuggcucgugaaaaagggaaauagcuacccaaaauuaucuaaguccuauauaaacgauaagggcaaagaaguacugguucuuuggggcauccaccaccccucaacgagcgcugaccaacagaguuuguaccagaaugccgaugcguacguguucgucgggacuucucgcuauuccaagaaauuuaagccugagauugcaauccgaccaaaagugcgugaccaggagggaagaaugaacuacuauuggacccugguggaacccggugauaagauuacauucgaggccacuggcaaucuagucguuccuagguacgcuuuugccauggaacggaacgcagggagcggaaucauaauuucggacaccccagugcaugacugcaacacaaccugucaaacgccgaaaggcgcuaucaauacuucucuccccuuccagaacauucacccuaucacaaucgguaagugcccaaaguauguaaaauccaccaagcugcgccuugccacugggcugagaaaugugcccucaauucagaguaggggauuguuuggcgcgauagccggcuucaucgaagggggauggacagguauggucgauggcugguacggguaucaucaccagaacgaacaaggaagcggcuacgcagcugaccucaaauccacccagaaugccauugauaagaucacgaacaaaguuaauucugugauagagaagaugaacacccaguuuacagcuguggguaaggaguucaaucaccuggaaaaacggauugagaacuuaaauaagaaagucgacgauggguuccuggacaucuggacuuacaacgccgaacuccuugugcuguuggagaaugaacgcacccuagauuaucaugacagcaacguaaagaaucuguacgagaaaguucgaucacagcucaagaacaacgcaaaggagaucggcaauggauguuuugaguucuaucacaaaugcgauaacacauguauggaaagugugaagaauggcacuuacgacuauccuaaauacuccgaagaggccaagcugaacagagaagagauugauggggucaaacuugagagcaccaggaucuaucaaauucuggcuauauacucuacaguggcgucaaguuugguccucgugguuagccugggagcaaucuccuuuuggaugugcucuaaugguucguuacagugccggauuuguaucuga

SEQ ID NO: 133633 - RNA, 1701 nt, Artificial Sequence; identical to SEQ ID NO: 132330
  derived and/or modified CDS sequence (opt3) from hemagglutinin__InfluenzaA__ADM13341

SEQ ID NO: 133634 - RNA, 1701 nt, Artificial Sequence; identical to SEQ ID NO: 133296
  derived and/or modified CDS sequence (opt3) from hemagglutinin__InfluenzaA__ADM13351

SEQ ID NO: 133635 - RNA, 1701 nt, Artificial Sequence; identical to SEQ ID NO: 130377
  derived and/or modified CDS sequence (opt3) from hemagglutinin__InfluenzaA__ADM13442

SEQ ID NO: 133636 - RNA, 1701 nt, Artificial Sequence; identical to SEQ ID NO: 130377
  derived and/or modified CDS sequence (opt3) from hemagglutinin__InfluenzaA__ADM13443

SEQ ID NO: 133637 - RNA, 1701 nt, Artificial Sequence; identical to SEQ ID NO: 130377
  derived and/or modified CDS sequence (opt3) from hemagglutinin__InfluenzaA__ADM13444

SEQ ID NO: 133638 - RNA, 1701 nt, Artificial Sequence; identical to SEQ ID NO: 131324
  derived and/or modified CDS sequence (opt3) from hemagglutinin__InfluenzaA__ADM13445

SEQ ID NO: 133639 - RNA, 1701 nt, Artificial Sequence; identical to SEQ ID NO: 130377
  derived and/or modified CDS sequence (opt3) from hemagglutinin__InfluenzaA__ADM13446

SEQ ID NO: 133640 - RNA, 1701 nt, Artificial Sequence
  derived and/or modified CDS sequence (opt3) from hemagglutinin__InfluenzaA__ADM13447
augaagaccaucauugcccugagcuacauauucugccucgcucuuggccaggaccugcccgggaacgauaauuccacagcaacuuuguguuuaggacaccaugccgugccuaacgguacgcuggucaaaaccaucacagacgaucaaauugagguuacuaaugcgaccgaacuugugcagucuucaaguacaggcaagaucugcaacaauccacacaggauucucgacgggaucgauuguacccugauagacgcucuacugggagauccgcauugcgacguauuucagaacgagacuugggauuuguucguggaaagaagcaaagccuuuuccaauuguuaucccuacgacgucccugauuaugcaucucuccggucgcugguggccucaagcggcacacuggaguucaucaccgaagguuuuacguggacugggguuacccagaacggaggcaguaaugcuugcaagcgcggcccaggguccggauucuuuucucgacucaacugguuaacaaaaagcgguuccacuuacucagugcugaaugucaccaugcccaacaaugacaacuucgauaaacuuuauauuuggggcgugcaccauccuaguacaaaucaagagcagaccagcuuguacguacaggcaucugggcguguuacgguguccacuagaaggucacagcaaacaaucauuccaaacaucggaagccggcccuggguccgcggccugaguucuagaauauccauuuauuggaccaucgugaagccuggugacgugcuagucauuaacagcaaugggaaccucaucgccccaaggggauacuuuaagaugcggacuggcaagucgucuaucaugcgcuccgacgcuccgauugauacauguauaucagagugcaucacccccaauggcaguauuccuaacgacaaaccauuccagaauguuaacaagaucacguacggggccugucccaaauaugugaagcagaauacccugaaacuugcgacaggaaugcgaaacguaccugaaaagcagacuagaggucuguuuggcgcaauagccggguucauugagaauggaugggaaggcaugaucgaugguugguacggguuuaggcaccaaaacagcgagggcaccggacaggcugccgacuugaaguccacacaggcagcuaucgaucaaauuaauggcaaacucaaccgggugaucgagaagacuaaugaaaaauuccaccagauugagaaggaguucucugaagucgaagggcguauacaggaccuggagaaauauguggaggauaccaagaucgacuuauggagcuacaacgccgaacugcucguugcgcuugagaaucagcauacaauugaucugaccgacucagaaaugaacaaguuguuugagaaaacucgcagacaacuaagggaaaacgccgaggauaugggaaaugguugcuucaagaucuaucacaaaugugacaacgcaugcaucgagaguauucggaauggcacguacgaccaugauguguaucgagacgaagcucugaacaaucgcuuucagauaaagggggucgagcucaaauccggauacaaggauuggauccuguggauuagcuucgccaucucuugcuuucuucugugugugguauugcucggcuucauuaugugggcuugccagagagguaacaucagguguaauauaugcaucuga

SEQ ID NO: 133641 - RNA, 1701 nt, Artificial Sequence; identical to SEQ ID NO: 130447
  derived and/or modified CDS sequence (opt3) from hemagglutinin__InfluenzaA__ADM13448

SEQ ID NO: 133642 - RNA, 1701 nt, Artificial Sequence
  derived and/or modified CDS sequence (opt3) from hemagglutinin__InfluenzaA__ADM13449
augaagaccaucauugcccugagcuacauauucugccucgcuuuuggccaggaccuucccgggaacgauaauuccacagcaacucuguguuugggacaccaugccgugccuaacgguacguuagucaaaaccaucacagacgaucaaauugagguuacuaaugcgaccgaacuggugcagucuucaaguacaggcaagaucugcaacaauccacacaggauucuagacgggaucgauuguacccucauagacgcucugcuuggagauccgcauugcgacguauuccagaacgagacuugggaucuguuuguggaaagaagcaaagccuucuccaauuguuaucccuacgacgucccugauuaugcaucuuugcggucgcucguggccucaagcggcacacuggaguuuaucaccgaagguuucacguggacugggguuacccagaacggaggcaguaaugcuugcaagcgcggcccaggguccggauuuuucucucgacugaacuggcucacaaaaagcgguuccacuuaccccguguuaaaugucaccaugccuaacaaugacaacuuugauaagcuguauauuuggggcgugcaccauccaucaacaaaucaagagcagaccagucuuuacguacaggcaagcgggcguguuacggugucuacuagaaggucccagcaaacaaucauucccaacaucgagucacggccuuggguccgcggauugagcaguagaauaucuauuuauuggaccaucgugaacccaggcgacgugcuggucauuaauuccaacgguaaucuaaucgccccgaggggguacuucaagaugcggacuggaaaaagcucgaucaugcgcucugacgcucccauugauacauguauauccgaaugcaucaccccuaacggcucaauuccaaaugacaagcccuuucagaacguuaauaaaaucacguacggcgccuguccuaaguaugugaaacagaacacccucaagcuggcgacagggaugcgaaauguaccagagaagcagacuagaggacuuuucggugcaauagccggcuuuauugaaaacgggugggagggaaugaucgauggcugguacgguuucaggcaccaaaauagugaggggaccggccaggcugccgaccugaaaagcacacaggcagcuaucgaucaaauuaacggaaaguugaaucgggugaucgagaaaacuaacgaaaaguuccaccagauugaaaaagaguuuuccgaagucgagggccguauacaggaccucgagaaguauguggaagauaccaaaaucgaccuguggucuuacaaugccgaguuacugguugcgcucgaaaaccagcauacaauugaucuuaccgacagcgagaugaacaagcuguucgaaaagacucgcagacaauugagggagaaugccgaggauauggggaacggaugcuuuaaaaucuaucacaagugugacaaugcaugcaucgaaucaauucggaacgguacguacgaccaugauguguaucgagacgaggcucuaaauaaccgcuuccagauaaaaggcgucgaacugaagaguggguacaaagauuggauccucuggauuuccuuugccaucagcugcuuccugcuuugugugguacuguugggauuuauuaugugggcuugccagagaggcaauaucagguguaacauaugcaucuga

SEQ ID NO: 133643 - RNA, 1701 nt, Artificial Sequence; identical to SEQ ID NO: 130479
  derived and/or modified CDS sequence (opt3) from hemagglutinin__InfluenzaA__ADM13450

SEQ ID NO: 133644 - RNA, 1701 nt, Artificial Sequence
  derived and/or modified CDS sequence (opt3) from hemagglutinin__InfluenzaA__ADM13451
augaagaccaucauugcccugagcuacauauucugccucgcucuuggccaggaccugcccgggaacgauaauagaacagcaacuuuguguuuaggacaccaugccgugccuaacgguacgcuggucaaaaccaucacagacgaucaaauugagguuacuaaugcgaccgaacuugugcaguccucuucaacaggcaagaucugcaacaauccacacaggauucucgacgggaucgauuguacccugauagacgcucuacugggagauccgcauugcgacguauuucagaacgagacuugggauuuguucguggaacggaguaaagccuuuagcaauuguuaucccuacgacgucccugauuaugcaucccuccgcucucugguggccucgucaggcacacuggaguucaucaccgaagguuuuacguggacugggguuacccagaacggaggcagcaaugcuugcaagcgaggcccagggaguggauucuuuucccgucucaacugguuaacaaaaucugguagcacuuaccccgugcugaaugucaccaugccuaacaaugacaacuucgauaaacuuuauauuuggggcgugcaccauccauccacaaaucaagagcagaccucauuguacguacaggcaagugggagaguuacggugagcacuaggcggucucagcaaacaaucauucccaacaucggaucccgcccuugggucagaggccugucaagcaggauaaguauuuauuggaccaucgugaagccaggugacgugcuagucauuaacucuaaugggaaccucaucgccccgcggggauacuuuaagaugcgcacuggcaaguccagcaucaugcgaucggacgcucccauugauacauguauaucugagugcaucaccccuaauggcuccauuccaaacgacaaacccuuccagaauguuaacaagaucacguacggggccuguccuaaauaugugaagcagaauacccugaaacuugcgacaggaaugagaaacguaccagaaaagcagacuaggggucuguuuggcgcaauagccggguucauugagaauggaugggaaggcaugaucgaugguugguacggguuucggcaccaaaacucagagggcaccggacaggcugccgacuugaagaguacacaggcaacuaucgaucaaauuaauggcaaacucaaccgugugaucgagaagaccaaugaaaaauuccaccagauugagaaggaguucagcgaagucgaagggcgcauacaggaccuggagaaauauguggaggauacaaagaucgacuuaugguccuacaacgcugaacugcucguugcccuugagaaucagcauaccauugaucugacugacucugaaaugaacaaguuguuugagaaaacgagaaggcaacuacgggaaaacgcggaggauaugggaaaugguugcuucaagaucuaucacaaaugugacaacgccugcaucgagagcauucgaaauggcacauacgaccaugauguguaucgcgacgaagcacugaacaauagauuucagauaaagggggucgagcucaaaucaggauacaaggauuggauccuguggauuaguuucgcuaucuccugcuuucuucugugugugguauugcucggcuucauuaugugggccugccagagggguaacauccgguguaauauaugcaucuga

SEQ ID NO: 133645 - RNA, 1701 nt, Artificial Sequence; identical to SEQ ID NO: 130364
  derived and/or modified CDS sequence (opt3) from hemagglutinin__InfluenzaA__ADM13452

SEQ ID NO: 133646 - RNA, 1701 nt, Artificial Sequence
  derived and/or modified CDS sequence (opt3) from hemagglutinin__InfluenzaA__ADM14467
augaaggccauccuggugguccuccuuuacaccuucgcuacagcaaacgccgacacucugugcauuggcuaucacgcgaauaacagcacggauaccguugacacaguguuggagaaaaauguaacugugacccauuccgucaacuuacuggaagauaagcacaaugggaaacuauguaagcucagaggaguggcuccccugcaucuugguaaaugcaacauagccggcuggauccuggggaauccugagugugaaucuuugucaacagcaaguagcugguccuacauuguugagaccucuucgucagacaacggaacuugcuauccaggcgauuuuaucgacuacgaggagcucagggagcagcugagcaguguguccucuuucgaacgguuugagauuuucccgaagacaagcuccuggcccaaucacgauucaaacaagggugucaccgccgcuuguagucaugcaggggccaaaucauuuuauaagaaucugaucuggcucgugaaaaagggaaacucuuacccuaaauuauccaagucauauauaaaugacaagggcaaagaaguacugguucuuuggggcauccaccacccaagcacgagugcugaucaacagucuuuguaccagaacgccgacgcguacguguucgucgggacuucccgcuauagcaagaaauuuaagcccgagauugcaauccgaccuaaagugcgugaucaggagggaagaaugaauuacuauuggacccugguggaaccaggugacaagauuacauucgaggccacuggcaaccuagucguucccagguacgcuuuugccauggaacggaacgcagggucgggaaucauaauuucugauaccccugugcaugacugcaauacaaccugucaaacgccaaaaggcgcuaucaacacuucccucccguuccagucaauucaccccaucacaaucgguaagugcccuaaguauguaaaaaguaccaagcugcgccuugccacugggcugagaaaugugccaagcauucaguccaggggauuguuuggcgcgauagccggcuucaucgaagggggauggacagguauggucgacggcugguacggguaucaucaccagaacgaacaaggaucuggcuacgcagcugaucucaaaagcacccagaaugccauugacaagaucacgaacaaagugaauagcguuauagagaagaugaacacccaguuuacagcuguggguaaggaguucaaucaccuggaaaaacggauugagaacuuaaauaagaaagucgaugacggguuccuggauaucuggacuuacaacgccgaacuccuugugcuguuggagaaugaacgcacccuagacuaucaugauaguaacguaaagaaucuguacgagaaaguucgaucccagcucaagaacaacgcaaaggagaucggcaauggauguuuugaguucuaucacaaaugcgacaacacauguauggaaagcgugaagaauggcacuuacgauuaucccaaauacucugaagaggccaagcugaacagagaagagauugacggggucaaacuugagucaaccaggaucuaucaaauucuggcuauauacaguacaguggcgagcuccuugguccucgugguuucucugggagcaaucucguuuuggaugugcagcaaugguuccuuacagugccggauuuguaucuga

SEQ ID NO: 133647 - RNA, 1695 nt, Artificial Sequence
  derived and/or modified CDS sequence (opt3) from hemagglutinin__InfluenzaA__ADM14516
augaaggccauccuggugguccuccuuuacaccuucgcuacagcaaacgccgacacucugugcauuggcuaucacgcgaauaacagcacggauaccguuaauacaguguuggagaagaacguaacugugacccauuccgucaauuuacuggaagacaagcacaacgggaaacuauguaagcucagaggaguggcuccccugcaucuugguaaaugcaauauagccggcuggauccuggggaacccugagugugaaucuuugucaacagcaaguagcugguccuacauuguugagaccucuucgucagauaauggaacuugcuauccaggcgacuuuaucgauuacgaggagcucagggagcagcugagcaguguguccucuuucgaacgguuugagauuuucccgaagacaagcuccuggcccaaccacgacucaaauaagggugucaccgccgcuuguccucaugcaggggccaaaaguuuuuauaagaaccugaucuggcucgugaaaaagggaaauagcuacccaaaauuaucuaaguccuauauaaacgauaagggcaaagaaguacugguucuuuggggcauccaccaccccucaacgagcacugaccaacagaguuuguaccagaaugcugaugccuacguguucgucgggaccucucgcuauuccaagaaauuuaagccugagauugcgauccgaccaaaagugcgugaccaggagggaagaaugaacuacuauuggacacugguggaacccggugauaagauuacuuucgaggcaaccggcaaccuagucguuccuagguacgccuuugcuauggaacggaaugccgggagcggaaucauaauuucggacacaccagugcaugauugcaacaccacgugucaaacuccgaaaggcgcaaucaauacaucucuccccuuccagaacauucacccuaucaccaucgguaagugcccaaaguauguaaaauccacuaagcugcgccuugcuacagggcugagaaaugugcccucaauucagaguaggggauuguuuggcgccauagcgggcuucaucgaagggggauggaccgguauggucgacggcugguacggguaucaucaccagaacgaacaaggaagcggcuacgccgcagaccucaaauccacgcagaaugcuauugaugagaucaccaacaagguaaauucuguuauagagaaaaugaacacacaguuuacugccguggguaaggaguucaaucaccuggaaaagcggauugaaaacuuaaauaaaaaggucgacgauggguuccuggacaucuggaccuacaacgcugagcuccuugugcuguuggaaaaugagcgcacacuagauuaucaugacagcaacgugaaaaaccuguacgagaagguucgaucacagcucaaaaauaacgccaaggaaaucggcaauggauguuuugaguucuaucacaagugcgauaacacuuguauggaaagugugaaaaauggcaccuacgacuauccuaaguacuccgaggaagcaaaacugaacagagaggagauugauggggucaaacuugaaagcacaaggaucuaucaaauucuggccauauacucuaccguggcuucaaguuugguccucgugguuagccugggagcgaucuccuuuuggaugugcucuggucauucgugccggauuuguaucuga

SEQ ID NO: 133648 - RNA, 1701 nt, Artificial Sequence
  derived and/or modified CDS sequence (opt3) from hemagglutinin__InfluenzaA__ADM14525
augaaggccacccuggugguccuccuuuacacauucgcuacugcaaacgccgacacgcugugcaucggcuaucacgcgaauaacagcaccgauacaguugacacuguguuggagaaaaauguaaccgugacacauuccgucaacuuacuggaagauaagcacaaugggaaacuauguaagcucagaggaguggcuccccugcaucuugguaaaugcaacauugccggcuggauacuggggaauccugagugugaaucuuugucaaccgcaaguagcugguccuacaucguugagacuucuucgucagacaacggaacaugcuauccaggcgauuuuauugacuacgaagaacucagggagcagcugagcagucuguccucuuucgaacgguuugagaucuucccgaagaccagcuccuggcccaaucacgauucaaacaagggugugacggccgcuuguccucaugcaggggccaaaaguuuuuauaagaaucucauuugguuagucaaaaagggaaacagcuacccaaaacugucuaaguccuauaucaaugacaagggcaaagaugugcuuguauuguggggcauacaccaccccucaacuagcgcugaccaacagagucuguaccagaacgccgaugcguacguuuucguggggaccucucgcuauuccaagaaauuuaagccugaaaucgcaauucgaccaaaaguccgugaccaggagggaagaaugaauuacuauuggacacuuguggagcccggugauaagaucacuuucgaagccaccggcaaccucguggucccuagguacgcuuuugccauggagcggaacgcagggagcggaauuaucauaucggacacaccaguucaugacugcaauaccacgugucaaacuccgaaaggcgcuauuaacacaucucugcccuuccagaauauccacccuauuaccaucgguaagugcccaaaguaugugaaauccacuaagcuacgccuggccacaggguugagaaacguacccucaauccagaguaggggacucuuuggcgcgauugccggcuucauagaagggggauggaccgguaugguggauggcugguacggguaucaucaccagaaugagcaaggaagcggcuacgcagcugaccugaaauccacgcagaacgccaucgaugaaauuaccaauaaggucaacucugugaucgagaaaaugaauacacaguuuacugcuguugguaaggaguucaaccacuuagaaaagcggauagagaaucugaacaaaaagguggacgauggguuccucgacauuuggaccuacaaugccgaacuucuggucuugcuagagaacgaacgcacacuggauuaucaugacagcaaugugaaaaaccucuacgagaagguacgaucacagcugaaaaacaaugcaaaggagaucggcaacggauguuuugaguucuaucacaagugcgauaauacuuguauggagaguguuaaaaacggcaccuacgacuauccuaaguacuccgaagaggccaaacuuaauagagaagagaucgauggggugaagcuggagagcacaaggauuuaucaaaucuuggcuauuuacucuaccgucgcgucaagucucgugcuggucgugagcuuaggagcaauauccuuuuggaugugcucuaacgguucgcugcagugccggaucuguauuuga

SEQ ID NO: 133649 - RNA, 1695 nt, Artificial Sequence
  derived and/or modified CDS sequence (opt3) from hemagglutinin__InfluenzaA__ADM14553
augaaggccauccuggugguccuccuuuacaccuucgcuacagcaaacgccgacacucugugcauuggcuaucacgcgaauaacagcacggauaccguugacacaauauuggagaaaaaugugacuguaacccauuccgugaacuuacuggaagauaagcacaaugggaaacuauguaagcucagaggagucgcuccccugcaucuugguaaaugcaacaucgccggcuggauucuggggaauccugagugugaaucuuugucaacagcaaguagcugguccuacaucguggagaccucuucgucagacaacggaacuugcuauccaggcgauuuuauugacuacgaagaacucagggagcagcugagcaguguuuccucuuucgaacgguuugagaucuucccgaagacaagcuccuggcccaaucacgauucaaacaagggugugaccgccgcuuguccucaugcaggggccaaaaguuuuuauaagaaucugauauggcucgucaaaaagggaaacagcuacccaaaauuaucuaaguccuauaucaaugacaagggcaaagaagugcugguacuuuggggcauucaccaccccucaacgagcgcugaucaacagaguuuguaccagaacgccgacgcguacguuuucguggagacuucucgcuauuccaagaaauuuaagccugagaucgcaauucgaccaaaaguccgugaucaggaagggagaaugaauuacuauuggacccugguggagcccggagacaagaucacauucgaagccacugguaaccuaguggucccuagguacgcuuuugccauggagcggaacgcaggcagcgggauaauuaucucggauaccucuguucaugacugcaauacaaccugucaaacgccaaaaggagcuauuaacacuucccucccguuccagaauauccaccccaucacaauuggcaagugcccuaaguaugugaaaucaaccaagcugcgccuugccacuggucugagaaacguaccaaguauacagagcaggggguuguuuggagcgaucgccggcuucauugaaggcggguggacaggaaugguggacgguugguacggcuaucaucaccagaaugagcaaggguccggauacgcagcugaucucaaaucuacccagaacgccaucgacgagauaacgaauaaggucaacagcgugauugaaaagaugaauacccaguuuacagcuguuggcaaggaguucaaccaccuggaaaagcggaucgagaauuuaaacaaaaagguggaugacgguuuccuggauaucuggacuuacaaugccgaacuccuuguccuguuggagaacgagcgcacccuagacuaucaugauucaaaugugaaaaaccuguacgaaaagguacgaagucagcucaaaaacaaugcaaaggagauugggaacggcuguuuugaguucuaucacaagugcgacaauacauguauggaguccguuaaaaacggaacuuacgauuaucccaaguacagcgaagaggccaaacugaauagagaggaaaucgacggcgugaaacuugagucuaccaggauuuaucaaauacuggcuaucuacucaacagucgcgaguagcuuggugcucgucgugucccugggggcaauuucuuuuuggaugugcucgggacauagcugccggaucuguaucuga

SEQ ID NO: 133650 - RNA, 1701 nt, Artificial Sequence; identical to SEQ ID NO: 131164
  derived and/or modified CDS sequence (opt3) from hemagglutinin__InfluenzaA__ADM14562

SEQ ID NO: 133651 - RNA, 1701 nt, Artificial Sequence; identical to SEQ ID NO: 130717
  derived and/or modified CDS sequence (opt3) from hemagglutinin__InfluenzaA__ADM14571

SEQ ID NO: 133652 - RNA, 1701 nt, Artificial Sequence
  derived and/or modified CDS sequence (opt3) from hemagglutinin__InfluenzaA__ADM14580
augaaggccauccuggugguccuccuuuacaccuucgcuacagcaaacgccgacacucugugcauuggcuaucacgcgaauaacagcacggauaccguugacacaguguuggagaaaaauguaacugugacccauuccgucaacuuacuggaagauaagcacaaugggaaacuauguaagcucagaggaguggcuccccugcaucuugguaaaugcaacauagccggcuggauccuggggaauccugagugugaaucuuugucaacagcaaguagcugguccuacauuguugagaccucuucgucagacaacggaacuugcuauccaggcgauuuuaucgacuacgaagaacucagggagcagcugagcaguguguccucuuucgaacgguuugagauuuucccgaagacaagcuccuggcccaaucacgauucaaacaagggugucaccgccgcuuguccucaugcaggggccaaaaguuuuuauaagaaucugaucuggcucgugaaaaagggaaacagcuacccaaaauuaucuaaguccuauauaaaugacaagggcaaagaaguacugguucuuuggggcauccaccaccccucaacgagcgcugaucaacagaguuuguaccagaacgccgacgcguacguguucgucgggacuucucgcuauuccaagaaauuuaagccugagauugcaauccgaccaaaagugcgugaucaggagggaagaaugaauuacuauuggacccugguggaacccggugacaagauuacauucgaggccacuggcaaccuagucguuccuagguacgcuuuugccauggagaaaaacgcagggagcggaaucauaauuucggauaccccagugcaugacugcaauacaaccugucaaacgccgaagggcgcuaucaacacuucucuccccuuccagaauauucacccuaucacaaucgguaagugcccaaaauauguaaaguccaccaaacugcggcuugccacugggcugcgcaacgugcccucaauucagaguagaggauuguuuggcgcgauagccggcuucaucgaagggggauggacagguauggucgacggcugguacggguaucaucaccagaaugaacaaggaagcggcuacgcagcugaucucaaguccacccagaacgccauugacgagaucacgaauaaagugaacucuguuauagagaagaugaauacccaguuuacagcuguggguaaggaguucaaccaccuggagaaaaggauugaaaauuuaaacaagaaagucgaugacggguuccuggauaucuggacuuacaaugccgagcuccuugugcuguuggaaaacgagcggacccuagacuaucaugauagcaauguaaagaaccuguacgagaaaguucgcucacagcucaagaacaaugcaaaggaaaucggcaacggauguuuugaguucuaucacaaaugcgacaauacauguauggaaagugugaagaacggcacuuacgauuauccuaaauacuccgaggaagccaagcugaaucgagaggagauuaacggggucaaacuugaaagcaccagaaucuaucaaauucuggcuauauacucuacaguggcgucaaguuugguccucgugguuagccugggagcaaucuccuuuuggaugugcucuaaugguucguuacagugcaggauuuguaucuga

SEQ ID NO: 133653 - RNA, 1701 nt, Artificial Sequence
  derived and/or modified CDS sequence (opt3) from hemagglutinin__InfluenzaA__ADM14589
augaaggccauccuggugguccuccuuuacaccuucgcuacagcaaacgccgacacucugugcauuggcuaucacgcgaauaacagcacggauaccguugacacaguguuggagaaaaauguaacugugacccauuccgucaacuuacuggaagauaagcacaaugggaaacuauguaagcucagaggaguggcuccccugcaucuugguaaaugcaacauagccggcuggauccuggggaauccugagugugaaucuuugucaacagcaaguagcugguccuacauuguugagaccucuucgucagacaacggaacuugcuauccaggcgauuuuaucgacuacgaagaacucagggagcagcugagcaguguguccucuuucgaacgguuugagauuuucccgaagacaagcuccuggcccaaucacgauucaaacaagggugucaccgccgcuuguccucaugcaggggccaaaaguuuuuauaagaaucugaucuggcucgugaaaaagggaaacagcuacccaaaauuaucuaaguccuauauaaaugacaagggcaaagaaguacugguucuuuggggcauccaccaccccucaacgagcgcugaucaacagaguuuguaccagaacgccgacgcguacguguucgucgggacuucucgcuauuccaagaaauuuaagccugagauugcaauccgaccaaaagugcgugaucaggagggaagaaugaauuacuauuggacccugguggaacccggugacaagauuacauucgaggccacuggcaaccuagucguuccuagguacgcuuuugccauggagaaaaacgcagggagcggaaucauaauuucggauaccccagugcaugacugcaauacaaccugucaaacgccgaagggcgcuaucaacacuucucuccccuuccagaauauucacccuaucacaaucgguaagugcccaaaauauguaaaguccaccaaacugcggcuugccacugggcugcgcaacgugcccucaauucagaguagaggauuguuuggcgcgauagccggcuucaucgaagggggauggacagguauggucgacggcugguacggguaucaucaccagaauggacaaggcagcgguuacgcagcugaucucaaguccacccagaacgccauugacgaaaucacgaauaaagugaacucuguuauagagaagaugaauacccaguuuacagcuguggggaaggaguucaaccaccuggagaaaaggauugagaauuuaaacaagaaagucgaugacggcuuccuggauaucuggacuuacaaugccgaacuccuugugcuguuggagaacgaacggacccuagacuaucaugauagcaauguaaagaaccuguacgagaaaguucgcucacagcucaagaacaaugcaaaggagaucggaaacggcuguuuugaguucuaucacaaaugcgacaauacauguauggaaagugugaagaacgggacuuacgauuauccuaaauacuccgaagaggccaagcugaaucgagaagagauuaacggagucaaacuugagagcaccagaaucuaucaaauucuggcuauauacucuacaguggcgucaaguuugguccucgugguuagccugggugcaaucuccuuuuggaugugcucuaauggcucguuacagugcaggauuuguaucuga

SEQ ID NO: 133654 - RNA, 1701 nt, Artificial Sequence
  derived and/or modified CDS sequence (opt3) from hemagglutinin__InfluenzaA__ADM14599
augaaggccauccuggugguccuccuuuacaccuucgcuacagcaaacgccgacacucugugcauuggcuaucacgcgaauaacagcacggauaccguugacacaguguuggagaagaauguaacugugacccauuccgucaacuuacuggaagauaagcacaaugggaaacuauguaagcucagaggaguggcuccccugcaucuugguaaaugcaacauagccggcuggauccuggggaauccugagugugaaucuuugucaacagcaaguagcugguccuacauuguugagaccucuucgucagacaacggaacuugcuauccaggcgauuuuaucgacuacgaggagcucagggagcagcugagcaguguguccucuuucgaacgguuugagauuuucccgaagacaagcuccuggcccaaucacgauucaaacaagggugucaccgccgcuuguccucaugcaggggccaaaaguuuuuauaagaaucugaucuggcucgugaaaaagggaaacagcuacccaaaauuaucuaaguccuauauaaaugacaagggcaaagaaguacugguucuuuggggcauccaccaccccucaacgagcgcugaucaacagaguuuguaccagaacgccgacgcguacguguucgucgggacuucucgcuauuccaagaaauuuaagccugagauugugauccgaccaaaagugcgugaucaggagggaagaaugaauuacuauuggacccuggucgaacccggugacaagauuacauucgaggcaacuggcaaccuaguugugccuagguacgccuuugcuauggaacggaacgccgggagcggaaucauaauuucggauaccccaguacaugacugcaauacaaccugucaaacgccgaaaggcgcaaucaacacuucucuccccuuccagaauauucacccuaucacaaucgguaagugcccaaaguaugugaaauccaccaagcugcgccuugcuacugggcugagaaacguccccucaauucagaguaggggauuguuuggcgccauagcgggcuucaucgaagggggauggacagguaugguggacggcugguacggguaucaucaccagaaugaacaaggaagcggcuacgccgcagaucucaaauccacccagaacgcuauugacgagaucacgaauaagguuaacucugugauagagaaaaugaauacccaguuuacagccgucgguaaggaguucaaccaccuggaaaagcggauugaaaauuuaaacaaaaagguggaugacggguuccuggauaucuggacuuacaaugcugagcuccuuguacuguuggaaaacgagcgcacccuagacuaucaugauagcaauguuaaaaaccuguacgagaaggugcgaucacagcucaaaaacaaugccaaggaaaucggcaacggauguuuugaguucuaucacaagugcgacaauacauguauggaaagugucaaaaacggcacuuacgauuauccuaaguacuccgaggaagcaaaacugaauagagaggagauugacggggugaaacuugaaagcaccaggaucuaucaaauucuggccauauacucuacagucgcuucaaguuuggugcucguugugagccugggagcgaucuccuuuuggaugugcucuaacgguucguuacagugccggauuuguaucuga

SEQ ID NO: 133655 - RNA, 1701 nt, Artificial Sequence; identical to SEQ ID NO: 131877
  derived and/or modified CDS sequence (opt3) from hemagglutinin__InfluenzaA__ADM14609

SEQ ID NO: 133656 - RNA, 1701 nt, Artificial Sequence
  derived and/or modified CDS sequence (opt3) from hemagglutinin__InfluenzaA__ADM14618
augaaggccauccuggugguccuccuuuacaccuucgcuacagcaaacgccgacacucugugcauuggcuaucacgcgaauaacagcacggauaccguugacacaguguuggagaagaauguaacugugacccauuccgucaacuuacuggaagauaagcacaaugggaaacuauguaagcucagaggaguggcuccccugcaucuugguaaaugcaacauagccggcuggauccuggggaauccugagugugaaucuuugucaacagcaaguagcugguccuacauuguugagaccucuucgucagacaacggaacuugcuauccaggcgauuuuaucgacuacgaggagcucagggagcagcugagcaguguguccucuuucgaacgguuugagauuuucccgaagacaagcuccuggcccaaucacgauucaaacaagggugucaccgccgcuuguccucaugcaggggccaaaaguuuuuauaagaaucugaucuggcucgugaaaaagggaaacagcuacccaaaauuaucuaaguccuauauaaaugacaagggcaaagaaguacugguucuuuggggcauccaccaccccucaacgagcgcugaucaacagaguuuguaccagaacgccgacgcguacguguucgucgggacuucucgcuauuccaagaaauuuaagccugagauugcaauccgaccaaaagugcgugaucaggagggaagaaugaauuacuauuggacccugguggaacccggugacaagauuacauucgaggccacuggcaaccuagucguuccuagguacgcuuuugccauggaacggaacgcagggagcggaaucauaauuucggauaccccagugcaugacugcaauacaaccugucaaacgccgaaaggcgcuaucaacacuucucuccccuuccagaauaaccacccuauuacaaucgguaagugcccaaaguauguaaaauccaccaagcugcgccuugccacugggcugagaaaugugcccucaauccagaguaggggauuguuuggcgcgauugccggcuucauagaagggggauggacagguauggucgacggcugguacggguaucaucaccagaacgaacaaggaagcggcuacgcagcugaucucaaauccacccagaaugccaucgacgagauuacgaacaagguaaauucuguuaucgagaaaaugaacacccaguuuacagcuguggguaaggaguucaaucaccuggaaaagcggauagaaaacuuaaauaaaaaggucgaugacggguuccuggauauuuggacuuacaacgccgagcuccuugugcuguuggaaaaugagcgcacccuagacuaucaugauagcaacgugaaaaaccuguacgagaagguucgaucacagcucaaaaauaacgcaaaggaaaucggcaauggauguuuugaguucuaucacaagugcgacaacacauguauggaaagugugaaaaauggcacuuacgauuauccuaaguacuccgaggaagccaaacugaacagagaggagaucgacggggucaaacuugaaagcaccaggauuuaucaaauccuggcuauuuacucuacaguggcgucaaguuugguccucgugguuagccugggagcaauauccuuuuggaugugcucuaaugguucguuacagugccggaucuguauuuga

SEQ ID NO: 133657 - RNA, 1701 nt, Artificial Sequence; identical to SEQ ID NO: 130717
  derived and/or modified CDS sequence (opt3) from hemagglutinin__InfluenzaA__ADM14627

SEQ ID NO: 133658 - RNA, 1701 nt, Artificial Sequence
  derived and/or modified CDS sequence (opt3) from hemagglutinin__InfluenzaA__ADM14655
augaaggccauccuggugguccuccuuuacaccuucgcuacagcaaacgccgacacucugugcauuggcuaucacgcgaauaacagcacggauaccguugacacaguguuggagaaaaauguaacugugacccauuccgucaacuuacuggaagauaagcacaaugggaaacuauguaagcucagaggaguggcuccccugcaucuugguaaaugcaacauagccggcuggauccuggggaauccugagugugaaucuuugucaacagcaaguagcugguccuacauuguugagaccucuucgucagacaacggaacuugcuauccaggcgauuuuaucgacuacgaggagcucagggagcagcugagcaguguguccucuuucgaacgguuugagauuuucccgaagacaagcuccuggcccaaucacgauucaaacaagggugucaccgccgcuuguccucaugcaggggccaaaaguuuuuauaagaaucugaucuggcucgugaaaaagggaaacagcuacccaaaauuaucuaaguccuauauaaaugacaagggcaaagaaguacugguucuuuggggcauccaccaccccucaacgagcgcugaucaacagaguuuguaccagaacgccgacgcguacguguucgucgggacuucucgcuauuccaagaaauuuaagccugagauugcaauccgaccaaaagugcgugaucaggagggaagaaugaauuacuauuggacccugguggaacccggugacaagauuacauucgaggccacuggcaaccuagucguuccuagguacgcuuuugccauggaacggaacgcagggagcggaaucauaauuucggauaccccagugcaugacugcaauacaaccugucaaacgccgaaaggcgcuaucaacacuucucuccccuuccagaauauucacccuaucacaaucgguaagugcccaaaguauguacgcuccaccaaacugagacuugccacugggcugaggaacgugcccucaauucagagucggggauuguuuggcgcgauagccggcuucaucgaagggggauggacagguauggucgacggcugguacggguaucaucaccagaaugaacaaggaagcggcuacgcagcugaucucaaguccacccagaacgccauugacgagaucacgaauaaagugaacucuguuauagagaagaugaauacccaguuuacagcuguggguaaagaguucaaccaccuggaaaagcgcauugaaaauuuaaacaagaaagucgaugacggguuccuggauaucuggacuuacaaugccgagcuccuugugcuguuggaaaacgagcgaacccuagacuaucaugauagcaauguaaagaaccuguacgagaaaguuagaucacagcucaagaacaaugcaaaagaaaucggcaacggauguuuugaguucuaucacaagugcgacaauacauguauggaaagugugaagaacggcacuuacgauuauccuaaauacuccgaggaagccaagcugaauagggaggagauugacggggucaaacuugaaagcacccggaucuaucaaauucuggcuauauacucuacaguggcgucaaguuugguccucgugguuagccugggagcaaucuccuuuuggaugugcucuaacgguucguuacagugccguauuuguaucuga

SEQ ID NO: 133659 - RNA, 1701 nt, Artificial Sequence
  derived and/or modified CDS sequence (opt3) from hemagglutinin__InfluenzaA__ADM14664
augaaggccauccuggugguccuccuuuacaccuucgcuacagcaaacgccgacacucugugcauuggcuaucacgcgaauaacagcacggauaccguugacacaguguuggagaaaaauguaacugugacccauuccgucaacuuacuggaagauaagcacaaugggaaacuauguaagcucagaggaguggcuccccugcaucuugguaaaugcaacauagccggcuggauccuggggaauccugagugugaaucuuugucaacagcaaguagcugguccuacauuguugagaccucuucgucagacaacggaacuugcuauccaggcgauuuuaucgacuacgaggagcucagggagcagcugagcaguguguccucuuucgaacgguuugagauuuucccgaagacaagcuccuggcccaaucacgauucaaacaagggugucaccgccgcuuguccucaugcaggggccaaaaguuuuuauaagaaucugaucuggcucgugaaaaagggaaacagcuacccaaaauuaucuaaguccuauauaaaugacaagggcaaagaaguacugguucuuuggggcauccaccaccccucaacgagcgcugaucaacagaguuuguaccagaacgccgacgcguacguguucgucgggacuucucgcuauuccaagaaauuuaagccugagauugcaauccgaccaaaagugcgugaucaggagggaagaaugaauuacuauuggacccugguggaacccggugacaagauuacauucgaggccacuggcaaccuagucguuccuagguacgcuuuugccauggaacggaacgcagggagcggaaucauaauuucggauaccccagugcaugacugcaauacaaccugucaaacgccgaacggcgcuaucaauacuucucuccccuuccagaacauucacccuaucacaaucgguaaaugcccaaaguauguaaaguccaccaaacugcgccuugccacugggcugagaaauauucccucaauacagaguaggggauuguuuggcgcgaucgccggcuucauugaagggggauggacagguaugguggacggcugguacggguaucaucaccagaacgaacaaggaagcggcuacgcagcugaucucaaguccacccagaaugccaucgacgagauaacgaacaaagucaauucugugauugagaagaugaacacccaguuuacagcuguugguaaagaguucaaucaccuggaaaagcggaucgaaaacuuaaauaagaaaguggaugacggguuccuggauaucuggacuuacaacgccgagcuccuuguccuguuggaaaaugagcgcacccuagacuaucaugauagcaacgugaagaaccuguacgagaaaguacgaucacagcucaagaauaacgcaaaagaaauuggcaauggauguuuugaguucuaucacaagugcgacaacacauguauggaaaguguuaagaauggcacuuacgauuauccuaaauacuccgaggaagccaagcugaacagagaggagaucgacggggugaaacuugaaagcaccaggauuuaucaaauacuggcuaucuacucuacagucgcgucaaguuuggugcucgucgugagccugggagcaauuuccuuuuggaugugcucuaaugguucguuacagugccggaucuguaucuga

SEQ ID NO: 133660 - RNA, 1701 nt, Artificial Sequence; identical to SEQ ID NO: 130717
  derived and/or modified CDS sequence (opt3) from hemagglutinin__InfluenzaA__ADM14673

SEQ ID NO: 133661 - RNA, 1701 nt, Artificial Sequence; identical to SEQ ID NO: 130717
  derived and/or modified CDS sequence (opt3) from hemagglutinin__InfluenzaA__ADM14682

SEQ ID NO: 133662 - RNA, 1701 nt, Artificial Sequence; identical to SEQ ID NO: 130717
  derived and/or modified CDS sequence (opt3) from hemagglutinin__InfluenzaA__ADM14691

SEQ ID NO: 133663 - RNA, 1701 nt, Artificial Sequence; identical to SEQ ID NO: 131881
  derived and/or modified CDS sequence (opt3) from hemagglutinin__InfluenzaA__ADM14700

SEQ ID NO: 133664 - RNA, 1695 nt, Artificial Sequence
  derived and/or modified CDS sequence (opt3) from hemagglutinin__InfluenzaA__ADM14709
augaaggccauccuggugguccuccuuuacaccuucgcuacagcaaacgccgacacucugugcauuggcuaucacgcgaauaacagcacggauaccguugacacaguguuggagaaaaauguaacugugacccauuccgucaacuuacuggaagauaagcacaaugggaaacuauguaagcucagaggaguggcuccccugcaucuugguaaaugcaacauagccggcuggauccuggggaauccugagugugaaucuuugucaacagcaaguagcugguccuacauuguugagaccucuucgucagacaacggaacuugcuauccaggcgauuuuaucgacuacgaagaacucagggagcagcugagcaguguguccucuuucgaacgguuugagauuuucccgaagacaaauagcuggcccaaccacgauuccaauaagggugucaccgccgcuuguccucaugcaggggccaaaucauuuuauaagaaccugaucuggcucgugaaaaagggaaauaguuacccaaaauuaagcaagucuuauauaaacgacaagggcaaagaaguacugguucuuuggggcauccaccaccccuccacgucagcugaucaacagagcuuguaccagaaugccgacgcguacguguucgucgggaccaguaaguauucuaaaaaguuuaaaccugagauugcaauccgcccaaaggugcgagaucaggagggacguaugaacuacuauuggacucugguggaacccggugacaaaauuacauucgaggccacuggcaaccuagucguuccuagauacgcuuuugccauggaaaggaaugcaggguccggaaucauaauuagcgauaccccagugcaugacugcaacacaaccugucaaacgccgaagggcgcuaucaauacuucgcuccccuuccagaacauucacccuaucacaaucgguaagugcccaaaauauguaaagucuaccaaacugcggcuugccacugggcugcgcaaugugcccuccauucagucaagaggauuguuuggcgcgauagccggcuucaucgaagggggauggacagguauggucgacggcugguacggguaucaucaccagaacgaacaaggaaguggcuacgcagcugaucucaagagcacccagaaugccauugacgguaucacgaacaaaauaaauuccgugauugagaagaugaacacccaguuuacagcuguugggaaggaguucaaucaccuggagaaaaggaucgagaacuuaaauaagaaaguggaugacggcuuccuggauaucuggacuuacaacgccgaacuccuuguccuguuggagaaugaacggacccuaaacuaucaugacucuaacgugaagaaucuguacgagaaaguacgcagccagcucaagaacaaugcaaaggagauuggaaacggcuguuuugaguucuaucacaaaugcgauaauacauguauggagucaguuaagaacgggacuuacgacuauccuaaauacagugaagaggccaagcugaaucgagaagagaucgauggagugaaacuugaguccaccagaauuuaucaaauacuggcuaucuacagcacagucgcgucuucauuggugcucgucgugagucugggugcaauuagcuuuuggaugugcuccggccauucuugcaggaucuguaucuga

SEQ ID NO: 133665 - RNA, 1701 nt, Artificial Sequence
  derived and/or modified CDS sequence (opt3) from hemagglutinin__InfluenzaA__ADM14718
augaaggccauccuggugguccuccuuuacaccuucgcuacagcaaacgccgacacucugugcauuggcuaucacgcgaauaacagcacggauaccguugacacaguguuggagaaaaauguaacugugacccauuccgucaacuuacuggaagauaagcacaaugggaaacuauguaagcucagaggaguggcuccccugcaucuugguaaaugcaacauagccggcuggauccuggggaauccugagugugaaucuuugucaacagcaaguagcugguccuacauuguugagaccucuucgucagacaacggaacuugcuauccaggcgauuuuaucgacuacgaggagcucagggagcagcugagcaguauguccucuuucgaacgguuugagauuuucccgaagacaagcuccuggcccaaucacgauucaaacaagggugugaccgccgcuuguccucaugcaggggccaaaaguuuuuauaagaaucugaucuggcucgucaaaaagggaaacagcuacccaaaauuaucuaaguccuauauaaaugacaagggcaaagaagugcugguacuuuggggcauccaccaccccucaacgagcgcugaucaacagaguuuguaccagaacgccgacgcguacguuuucguggggacuucucgcuauuccaagaaauuuaagccugagauugcaauccgaccaaaaguccgugaucaggagggaagaaugaauuacuauuggacccugguggaacccggugacaagauuacauucgaggccacuggcaaccuaguggucccuagguacgcuuuugccauggaacggaacgcagggagcggaaucauaauuucggauaccccaguucaugacugcaauacaaccugucaaacgccgaaaggcgcuaucaacacuucucuccccuuccagaauauucacccuaucacaaucgguaagugcccaaaguaugugaaauccaccaagcugcgccuugccacugggcugagaaacguacccucaauucagaguaggggauuguuuggcgcgauagccggcuucaucgaagggggauggacagguaugguggacggcugguacggguaucaucaccagaaugaacaaggaagcggcuacgcagcugaucucaaauccacccagaacgccauugacaagaucacgaauaaagucaacucugugauagagaagaugaauacccaguuuacagcuguugguaaggaguucaaccaccuggaaaaacggauugagaauuuaaacaagaaaguggaugacggguuccuggauaucuggacuuacaaugccgaacuccuuguccuguuggagaacgaacgcacccuagacuaucaugauagcaaugugaagaaccuguacgagaaaguacgaucacagcucaagaacaaugcaaaggagaucggcaacggauguuuugaguucuaucacaaaugcgacaauacauguauggaaaguguuaagaacggcacuuacgauuauccuaaauacuccgaagaggccaagcugaauagagaagagauugacggggugaaacuugagagcaccaggaucuaucaaauucuggcuauauacucuacagucgcgucaaguuuggugcucgucgugagccugggagcaaucuccuuuuggaugugcucuaacgguucguuacagugccggauuuguaucuga

SEQ ID NO: 133666 - RNA, 1695 nt, Artificial Sequence
  derived and/or modified CDS sequence (opt3) from hemagglutinin__InfluenzaA__ADM14728
augaaggccauccuggugguccuccuuuacaccuucgcuacagcaaacgccgacacucugugcauuggcuaucacgcgaauaacagcacggauaccguugacacaguguuggagaaaaauguaacugugacccauuccgucaacuuacuggaagauaagcacaaugggaaacuauguaagcucagaggaguggcuccccugcaucuugguaaaugcaacauagccggcuggauccuggggaauccugagugugaaucuuugucaacagcaaguagcugguccuacauuguugagaccucuucgucagacaacggaacuugcuauccaggcgauuuuaucgacuacgaggagcucagggagcagcugagcaguguguccucuuucgaacgguuugagauuuucccgaagacaagcuccuggcccaaucacgauucaaacaagggugucaccgccgcuuguccucaugcaggggccaaaaguuuuuauaagaaucugaucuggcucgugaaaaagggaaacagcuacccaaaauuaucuaauuccuauauaaacgacaagggcaaggaaguacugguucuuuggggcauccaccaccccucaacgagcgcugaucaacagaguuuguaccagaaugccgacgcguacguguucgucgggacuucucgcuauuccaaaaaguuuaaaccugagauugcaauccgaccaaaggugcgugaucaggagggaagaaugaacuacuauuggacccugguggaacccggugacaaaauuacauucgaggccacuggcaaccuagucguuccuagguacgcuuuugccauggaacggaaugcagggagcggaaucauaauuucggauaccccagcucaugacugcaacacaaccugucaaacgccgaagggcgccaucaauacuucucuccccuuccagaacauucacccuaucacaaucgguaaaugcccaaaguaugugaaguccaccaaacugcgccuugcgacugggcugagaaauguacccucaauucagaguaggggauuguuuggcgccauagcaggcuucaucgaagggggauggacagguaugguggacggcugguacggguaucaucaccagaacgaacaaggaagcggcuacgcugccgaucucaaguccacccagaaugcuauugacgagaucacgaacaaagucaauucugugauagagaagaugaacacccaguuuacagccguugguaaagaguucaaucaccuggaaaagcggauugaaaacuuaaauaagaaaguggaugacggguuccuggauaucuggacuuacaacgcagagcuccuuguccuguuggaaaaugagcgcacccuagacuaucaugauagcaacgugaagaaccuguacgagaaaguacgaucacagcucaagaauaacgccaaagaaaucggcaauggauguuuugaguucuaucacaagugcgacaacacauguauggaaaguguuaagaauggcacuuacgauuauccuaaauacuccgaggaagcuaagcugaacagagaggagauugacggggugaaacuugaaagcaccaggaucuaucaaauucuggcgauauacucuacagucgcaucaaguuuggugcucgucgugagccugggagccaucuccuuuuggaugugcucuggucauucgugccggauuuguaucuga

SEQ ID NO: 133667 - RNA, 1701 nt, Artificial Sequence
  derived and/or modified CDS sequence (opt3) from hemagglutinin__InfluenzaA__ADM14737
augaaggccauccuggugguccuccuuuacaccuucgcuacagcaaacgccgacacucugugcauuggcuaucacgcgaauaacagcacggauaccguuaauacaguguuggagaaaaacguaacugugacccauuccgucaauuuacuggaagacaagcacaacgggaaacuauguaagcucagaggaguggcuccccugcaucuugguaaaugcaauauagccggcuggauccuggggaacccugagugugaaucuuugucaacagcaaguagcugguccuacauuguugagaccucuucgucagauaauggaacuugcuauccaggcgacuuuaucgauuacgaagaacucagggagcagcugagcaguguguccucuuucgaacgguuugagauuuucccgaagacaagcuccuggcccaaccacgacucaaauaagggugucaccgccgcuuguccucaugcaggggccaaaaguuuuuauaagaaccugaucuggcucgugaaaaagggaaauagcuacccaaaauuaucuaaguccuauauaaacgauaagggcaaagaaguacugguucuuuggggcauccaccaccccucaacgagcgcugaccaacagaguuuguaccagaaugccgaugcguacguguucgucgggacuucucgcuauuccaagaaauuuaagccugagauugcaauccgaccaaaagugcgugaccaggagggaagaaugaacuacuauuggacccugguggaacccggugauaagauuacauucgaggccacuggcaaccuagucguuccuagguacgcuuuugccauggagaaaaaugcagggagcggaaucauaauuucggacaccccagugcaugauugcaacacaaccugucaaacgccgaagggcgcuaucaauacuucucuccccuuccagaacauucacccuaucacaaucgguaagugcccaaaauauguaaaguccaccaaacugcggcuugccacugggcugcgcaaugugcccucaauucagaguagaggauuguuuggcgcgauagccggcuucaucgaagggggauggacagguauggucgacggcugguacggguaucaucaccagaacgaacaaggaagcggcuacgcagcugaccucaaguccacccagaaugccauugaugagaucacgaacaaaguuaauucugugauagagaagaugaacacccaguuuacagcuguggguaaggaguucaaucaccuggagaaaaggauugaaaacuuaaauaagaaagucgacgauggguuccuggacaucuggacuuacaacgccgagcuccuugugcuguuggaaaaugagcggacccuagauuaucaugacagcaacguaaagaaccuguacgagaaaguucgcucacagcucaagaauaacgcaaaggaaaucggcaauggauguuuugaguucuaucacaaaugcgauaacacauguauggaaagugugaagaauggcacuuacgacuauccuaaauacuccgaggaagccaagcugaaccgagaggagauugauggggucaaacuugaaagcaccagaaucuaucaaauucuggcuauauacucuacaguggcgucaaguuugguccucgugguuagccugggagcaaucuccuuuuggaugugcucuaaugguucguuacagugcaggauuuguaucuga

SEQ ID NO: 133668 - RNA, 1701 nt, Artificial Sequence
  derived and/or modified CDS sequence (opt3) from hemagglutinin__InfluenzaA__ADM14746
augaaggccauccuggugguccuccuuuacaccuucgcuacagcaaacgccgacacucugugcauuggcuaucacgcgaauaacagcacggauaccguugacacaguguuggagaaaaauguaacugugacccauuccgucaacuuacuggaagauaagcacaaugggaaacuauguaagcucagaggaguggcuccccugcaucuugguaaaugcaacauagccggcuggguucuggggaauccugagugugaaucuuugucaacagcaaguagcugguccuacaucguggagaccccaucuucggacaacggaacuugcuauccgggcgauuuuauugacuacgaggagcucagggagcagcugucaagcgucaguuccuucgaacgguuugagaucuuccccaagacaucuagcuggccuaaucacgauuccaacaagggugugaccgccgcuuguccacaugcaggggccaaaucauuuuauaagaaucugauuuggcucguuaaaaagggaaacaguuaccccaaauuaagcaagucuuauaucaaugacaagggcaaagaaguacuggugcuuuggggcauacaccacccuuccacgucagcugaucaacagagcuuguaccagaacgccgacgcguacgucuucguggggacuagccgcuauucuaagaaauuuaagccagagaucgcaauucgacccaaagugcgugaucaggagggaagaaugaauuacuauuggacccuggucgaaccuggugacaagaucacauucgaggccacuggcaaccuaguugugccaagguacgcuuuugccauggaacggaacgcaggguccggaauuaucauaagcgauaccccgguacaugacugcaauacaaccugucaaacgcccaaaggcgcuauuaacacuucgcucccuuuccagaauauccacccaauuacaaucgguaagugccccaaguaugugaaaucuaagaaacugcgccuugccaccgggcugagaaacgucccuuccauccagucaaggggauuguuuggcgcgauugccggcuucauagaagggggauggacugguaugguggacggcugguacggguaucaucaccagaaugaacaaggaaguggcuacgcagcugaucucaagagcacacagaacgccaucgacgagauuaccaauaaaguuaacuccgugaucgagaagaugaauacgcaguuuaccgcugucgguaaggaguucaaccaccuggaaaaacggauagaaaauuuaaacaagaaaguggaugacggguuccuggauauuuggacauacaaugccgagcuccuuguacuguuggaaaacgagcgcacucuagacuaucaugauucuaauguuaagaaccuguacgagaaagugcgaagccagcucaagaacaaugcaaaggaaaucggcaacggauguuuugaguucuaucacaaaugcgacaauaccuguauggaaucagucaagaacggcacauacgauuauccaaaauacagugaggaagccaagcugaauagagaggagaucgacggggugaaacuugaauccacuaggauuuaucaaauccuggcuauuuacagcaccgucgcgucuucauuggugcucguugugagucugggagcaauaaguuuuuggaugugcuccaacgguucuuuacagugccggaucuguauuuga

SEQ ID NO: 133669 - RNA, 1695 nt, Artificial Sequence
  derived and/or modified CDS sequence (opt3) from hemagglutinin__InfluenzaA__ADM14756
augaaggccauccuggugguccuccuuuacaccuucgcuacagcaaacgccgacacucugugcguuggcuaucacgcgaauaacagcacggauaccguggacacaguauuggagaaaaaugugacugucacccauuccgugaacuuacuggaagauaagcacaaugggaaacuauguaagcucagaggaguugcuccccugcaucuugguaaaugcaacauugccggcuggauacuggggaauccugagugugaaucuuugucaacagcaaguagcugguccuacaucguggagaccucuucgucagacaacggaacuugcuauccaggcgauuuuauugacuacgaggagcucagggagcagcugagcagugucuccucuuucgaacgguuugagaucuucccgaagacaagcuccuggcccaaucacgauucaaacaagggugugaccgccgcuuguccucaugcaggggccaaaaguuuuuauaagaaucugauuuggcucguuaaaaagggaaacagcuacccaaaauuaucuaaguccuauaucaaugacaagggcaaagaaguacuggugcuuuggggcauacaccaccccucaacgagcgcugaucaacagaguuuguaccagaacgccgacgcguacgucuucguggggacuucucgcuauuccaagaaauuuaagccugagaucgcaauucgaccaaaagugcgugaucaggagggaagaaugaauuacuauuggacccuggucgaacccggugacaagaucacauucgaggccacuggcaaccuaguugugccuagguacgcuuuugccauggaacggaacgcagggagcggaauuaucauaucggauaccccaguacaugacugcaauacaaccugucaaacgccgaaaggcgcuauuaacacuucucuccccuuccagaauauccacccuauuacaaucgguaagugcccaaaguaugugaaauccaccaagcugcgccuugccacugggcugagaaacguccccucaauccagaguaggggauuguuuggcgcgauugccggcuucauagaagggggauggacagguaugguggacggcugguacggguaucaucaccagaaugaacaaggaagcggcuacgcagcugaucucaaauccacccagaacgccaucgacaagauuacgaauaaaguuaacucugugaucgagaagaugaauacccaguuuacagcugucgguaaggaguucaaccaccuggaaaaacggauagagaauuuaaacaagaaaguggaugacggguuccuggauauuuggacuuacaaugccgaacuccuuguacuguuggagaacgaacgcacccuagacuaucaugauagcaauguuaagaaccuguacgagaaagugcgaucacagcucaagaacaaugcaaaggagaucggcaacggauguuuugaguucuaucacaaaugcgacaauacauguauggaaagugucaagaacggcacuuacgauuauccuaaauacuccgaagaggccaagcugaauagagaagagaucgacggggugaaacuugagagcaccaggauuuaucaaauccuggcuauuuacucuacagucgcgucaaguuuggugcucguugugagccugggagcaauauccuuuuggaugugcucuggucauucgugccggaucuguauuuga

SEQ ID NO: 133670 - RNA, 1701 nt, Artificial Sequence; identical to SEQ ID NO: 131881
  derived and/or modified CDS sequence (opt3) from hemagglutinin__InfluenzaA__ADM14765

SEQ ID NO: 133671 - RNA, 1695 nt, Artificial Sequence
  derived and/or modified CDS sequence (opt3) from hemagglutinin__InfluenzaA__ADM14775
augaaggccauccuggugguccuccuuuacaccuucgcuacagcaaacgccgacacucugugcauuggcuaucacgcgaauaacagcacggauaccguugacacaguguuggagaaaaauguaacugugacccauuccgucaacuuacuggaagauaagcacaaugggaaacuauguaagcucagaggaguggcuccccugcaucuugguaaaugcaacauagccggcuggauccuggggaauccugagugugaaucuuugucaacagcaaguagcugguccuacauuguugagaccucuucgucagacaacggaacuugcuauccaggcgauuuuaucgacuacgaagaacucagggagcagcugagcaguguguccucuuucgaacgguuugagauuuucccgaagacaagcuccuggcccaaucacgauucaaacaagggugucaccgccgcuuguccucaugcaggggccaaaaguuuuuauaagaaucugaucuggcucgugaaaaagggaaacagcuacccaaaauuaaauaagucuuauauaaacgacaagggcaaagaaguacugguucuuuggggcauccaccaccccuccacgucagcugaucaacagagcuuguaccagaaugccgacgcguacguguucgucgggacuucccgcuauucuaagaaauuuaagccugagauugcaauccgaccaaaagugcgugaucaggagggaagaaugaacuacuauuggacccugguggaacccggugacaagauuacauucgaggccacuggcaaccuagucguuccuagguacgcuuuugccauggaacggaaugcaggguccggaaucauaauuagcgauaccccagugcaugacugcaacacaaccugucaaacgccgaaaggcgcuaucaauacuucgcuccccuuccagaacauucacccuaucacaaucggugagugcccaaaguauguaaagucuaccaaacugcgccuugccacugggcugagaaaugugcccuccauucagucaaggggauuguuuggcgcgauagccggcuucaucgaagggggauggacagguauggucgacggcugguacggguaucaucaccagaacgagcaaggaaguggcuacgcagcugaucucaagagcacccagaaugccauugacaaaaucacgaacaaggugaauaguguuauagagaaaaugaacacccaguuuacagcuguggguaaggaguucaaucaccuggagaagcggauugaaaacuuaaauaaaaaggucgaugacggguuccuggauaucuggacuuacaacgccgagcuccuugugcuguuggaaaaugagcgcacccuagacuaucaugauucuaacguaaagaaccuguacgagaagguucgaagccagcucaaaaauaacgcaaaggaaaucggcaauggauguuuugaguucuaucacaagugcgacaacacauguauggaaucagugaaaaauggcacuuacgauuauccuaaguacagugaggaagccaaacugaacagagaggagauugacggggucaaacuugaauccaccaggaucuaucaaauucuggcuauauacagcacaguggcgucuucauugguccucgugguuagucugggagcaaucagcuuuuggaugugcuccggucauucuugccggauuuguaucuga

SEQ ID NO: 133672 - RNA, 1695 nt, Artificial Sequence
  derived and/or modified CDS sequence (opt3) from hemagglutinin__InfluenzaA__ADM14802
augaaggccauccuggugguccuccuuuacaccuucgcuacagcaaacgccgacacucugugcauuggcuaucacgcgaauaacagcacggauaccguugacacaguguuggagaaaaauguaacugugacccauuccgucaacuuacuggaagauaagcacaaugggaaacuauguaagauaagaggaguggcuccccuccaucuggguaaaugcaacaucgccggcuggauucuugggaauccugagugugaaucucugucaacagcaaguagcugguccuacaucguugagaccucuucgucagacaacggaacuugcuauccaggcgauuuuauugacuacgaagaguugagggagcagcucagcaguguguccucuuucgaacgguuugagaucuucccgaagacaagcuccuggcccaaucacgauucaaacaagggugucaccgccgcuuguccucaugcaggggccaaaaguuuuuauaagaaucugauauggcuggugaaaaagggaaacagcuacccaaaacucucuaaguccuauaucaaugacaagggcaaagaaguauuaguucuguggggcauucaccaccccucaacgagcgcugaucaacagagucuuuaccagaacgccgacgcguacguguucgucgggacuucucgcuauuccaagaaauuuaagccugagaucgcaauucgaccaaaagugcgugaucaggagggaagaaugaauuacuauuggaccuugguggaacccggugacaagaucacauucgaggccacuggcaaccuggucguuccuagguacgcuuuugccauggaacggaacgcagggagcggaauaauuaucucggauaccccagugcaugacugcaauacaaccugucaaacgccgaaaggcgcuauuaacacuucucuacccuuccagaauauccacccuaucacaauugguaagugcccaaaguauguaaaauccaccaagcuccgccuggccacugggcuuagaaacgugcccucaauacagaguaggggacuguuuggcgcgaucgccggcuucauugaagggggauggacagguauggucgacggcugguacggguaucaucaccagaaugaacaaggaagcggcuacgcagcugauuugaaauccacccagaacgccaucgacgagauaacgaauaaggugaacucuguuauugagaaaaugaauacccaguuuacagcuguggguaaggaguucaaccaccucgagaagcggaucgaaaaucugaacaaaaaggucgaugacggguucuuagauaucuggacuuacaaugccgagcugcucgugcuucuggaaaacgagcgcaccuuggacuaucaugauagcaauguuaaaaaccuauacgagaagguacgaucacagcugaaaaacaaugcaaaggaaauuggcaacggauguuuugaguucuaucacaagugcgacaauacauguauggaaagugugaaaaacggcacuuacgauuauccuaaguacuccgaggaagccaaacucaauagagaggagaucgacggggucaagcuggaaagcaccaggauuuaucaaauacuugcuaucuacucuacaguggcgucaagucuggucuuggugguuagccucggagcaauuuccuuuuggaugugcucuggucauucgugccggaucuguaucuga

SEQ ID NO: 133673 - RNA, 1704 nt, Artificial Sequence
  derived and/or modified CDS sequence (opt3) from hemagglutinin__InfluenzaA__ADM14830
augaaggccauccuggugguccuccuuuacaccuucgcuacagcaaacgccgacacucugugcauuggcuaucacgcgaauaacagcacggauaccguugacacaguguuggagaaaaauguaacugugacccauuccgucaacuuacuggaagauaagcacaaugggaaacuauguaagcucagaggaguggcuccccugcaucuugguaaaugcaacauagccggcuggauccuggggaauccugagugugaauugcucucuacagcaucaaguuggagcuacauuguugagaccuccucuucggacaacggaacuugcuauccaggcgauuuuaucgacuacgaagaacugagggagcagcugucaagcgugaguuccuucgaacgguuugagauuuucccgaagacaucuagcuggcccaaucacgauuccaacaagggugucaccgccgcuuguccucaugcaggggccaaaucauuuuauaagaaucucaucugguuagugaaaaagggaaacaguuacccaaaacugagcaagucuuauauaaaugacaagggcaaagaaguacuuguuuuguggggcauccaccaccccuccacgucagcugaucaacagagccuguaccagaacgccgacgcguacguguucgucgggaccagucgcuauucuaagaaauuuaagccugagauugcaauccgaccaaaagugcgugaucaggagggaagaaugaauuacuauuggacucuaguggaacccggugacaagauuacauucgaggccacuggcaaccucgucguuccuagguacgcuuuugccauggaacggaacgcagaguccgggaucauaauuagcgauaccccagugcaugacugcaauacaaccugucaaacgccgaaaggagcuaucaacacuucgcugcccuuccagaauauucacccuaucacaaucggcaagugcccaaaguauguaaaaucuaccaaacuucgccuggccacugguuugagaaacgugcccuccauucagucaagggggcucuuuggagcgauagccggcuucaucgaaggcggguggacaggaauggucgacgguugguacggcuaucaucaccagaaugagcaagggaguggauacgcagcugaucugaaaagcacccagaacgccauugacgagaucacgaauaaggugaacuccguuauagaaaagaugaauacccaguuuacagcugugggcaaggaguucaaccacuuagaaaagcggauugagaaucugaacaaaaaggucgaugacgguuuccucgauaucuggacuuacaaugccgaacuucugguguugcuagagaacgagcgcacccuggacuaucaugauucuaauguaaagaagcucuacgaaaaaguucgaagccagcugaagaacaacgcaaaggagaucgggaauggcuguuuugaguucuaucacaaaugcgacaacacauguauggagucagugaagaauggaacuuacgauuauccuaaauacagugaagaggccaaacuuaacagagaggaaauugacggcgucaaacuggaguccaccaggaucuaucaaauuuuggcuauauacagcacaguggcgucuucacucguccuggugguuaguuuaggggcaaucagcuuuuggaugugcuccggacauucuugccugcagugucggauuugcaucuga

SEQ ID NO: 133674 - RNA, 1695 nt, Artificial Sequence
  derived and/or modified CDS sequence (opt3) from hemagglutinin__InfluenzaA__ADM14848
augaaggccauccuggugguccuccuuuacaccuucgcuacagcaaacgccgacacucugugcauuggcuaucacgcgaauaacagcacggauaccguugacacaguguuggagaaaaauguaacugugacccauuccgucaacuuacuggaagauaagcacaaugggaaacuauguaagcucagaggaguggcuccccugcaucuugguaaaugcaacauagccggcuggauccuggggaauccugagugugaaucuuugucaacagcaaguagcugguccuacauuguugagaccucuucgucagacaacggaacuugcuauccaggcgauuuuaucgacuacgaggagcucagggagcagcugagcaguguguccucuuucgaacgguuugagauuuucccgaagacaagcuccuggcccaaucacgauucaaacaagggugucaccgccgcuuguccucaugcaggggccaaaaguuuuuauaagaaucugaucuggcucgugaaaaagggaaacagcuacccaaaauuaucuaaguccuauauaaaugacaagggcaaagaaguacugguucuuuggggcauccaccaccccucaacgagcgcugaucaacagaguuuguaccagaacgccgacgcguacguguucgucgggucuucccgcuauagcaagaaauuuaagccugagauugcaauccgaccaaaagugcgugaucaggagggaagaaugaauuacuauuggacucugguggaacccggugacaagauuaccuucgaggccacaggcaaccuagucguuccuagguacgcuuuugccauggaacggaacgcagggucgggaaucauaauuucugauacuccagugcaugacugcaauaccacaugucaaaccccgaaaggcgcuaucaacacgucccuccccuuccagaauauucacccuaucacuaucgguaagugcccaaaguauguaaaaucaacaaagcugcgccuugccaccgggcugagaaacgugcccaguauucagagcaggggauuguuuggcgcgauagccggcuucaucgaagggggauggacugguauggucgacggcugguacggguaucaucaccagaaugaacaaggauccggcuacgcagcugaucucaaaucuacacagaacgccauugacgagaucaccaauaaggugaacagcguuauagagaaaaugaauacgcaguuuaccgcuguggguaaggaguucaaccaccuggaaaagcggauugaaaauuuaaacaaaaaggucgaugacggguuccuggauaucuggacauacaaugccgagcuccuugugcuguuggaaaacgagcgcacucuagacuaucaugauucaaauguaaagaaccuguacgagaagguucgaagucagcucaaaaacaaugcaaaggaaaucggcaacggauguuuugaguucuaucacaagugcgacaauaccuguauggaauccgugaaaaacggcacauacgauuauccuaaguacagcgaggaagccaaacugaauagagaggagauugacggggucaaacuugaaucuacuaggaucuaucaaauucuggcuauauacucaaccguggcgaguagcuugguccucgugguuucccugggagcaaucucuuuuuggaugugcucgggucauagcugccggauuuguaucuga

SEQ ID NO: 133675 - RNA, 1695 nt, Artificial Sequence
  derived and/or modified CDS sequence (opt3) from hemagglutinin__InfluenzaA__ADM14866
augaaggccauccuggugguccuccuuuacaccuucgcuacagcaaacgccgacacucugugcauuggcuaucacgcgaauaacagcacggauaccguugacacaguguuggagaagaauguaacugugacccauuccgucaacuuacuggaagauaagcacaaugggaaacuauguaagcucagaggaguggcuccccugcaucuugguaaaugcaacauagccggcuggauccuggggaauccugagugugaaucuuugucaacagcaaguagcugguccuacauuguugagaccucuucgucagacaacggaacuugcuauccaggcgauuuuaucgacuacgaggagcucagggagcagcugagcaguguguccucuuucgaacgguuugagauuuucccgaagacaagcuccuggcccaaucacgauucagacaagggugucaccgccgcuuguccucaugcaggggccaaaaguuuuuauaagaaccugaucuggcucgugaaaaagggaaauagcuacccaaaauuaucuaaguccuauauaaacgauaagggcaaagaaguacugguucuuuggggcauccaccaccccucaacgagcgcugaccaacagaguuuguaccagaaugccgaugcguacguguucgucgggacuucucgcuauuccaagaaauuuaagccugagauugcaauccgaccaaaagugcgugaccaggagggaagaaugaacuacuauuggacccugguggaacccggugauaagauuacauucgaggccacuggcaaucuagucguuccuagguacgcuuuugccauggaacggaacgcagggagcggaaucauaauuucggacaccccagugcaugacugcaacacaaccugucaaacgccgaaaggcgcuaucaauacuucucuccccuuccagaacauucacccuaucacaaucgguaagugcccaaaguauguaaaauccauuaagcugcgccuugccaccgggcugagaaaugugcccucaauacagaguaggggauuguuuggcgcgaucgccggcuucauugaagggggauggacugguauggucgauggcugguacggguaucaucaccagaacgaacaaggaagcggcuacgcagcugaccucaaauccacacagaaugccaucgaugagauaaccaacaagguaaauucuguuauugagaaaaugaacacgcaguuuaccgcuguggguaaggaguucaaucaccuggaaaagcggaucgaaaacuuaaauaaaaaggucgacgauggguuccuggacaucuggacauacaacgccgagcuccuugugcuguuggaaaaugagcgcacucuagauuaucaugacagcaacgugaaaaaucuguacgagaagguucgaucacagcucaaaaacaacgcaaaggaaauuggcaauggauguuuugaguucuaucacaagugcgauaacaccuguauggaaagugugaaaaauggcacauacgacuauccuaaguacuccgaggaagccaaacugaacagagaggagaucgauggggucaaacuugaaagcacuaggauuuaucaaauacuggcuaucuacucuaccguggcgucaaguuugguccucgugguuagccugggagcaauuuccuuuuggaugugcucuggucauucgugccggaucuguaucuga

SEQ ID NO: 133676 - RNA, 1695 nt, Artificial Sequence
  derived and/or modified CDS sequence (opt3) from hemagglutinin__InfluenzaA__ADM14876
augaaggccauccuggugguccuccuuuacaccuucgcuacagcaaacgccgacacucugugcauuggcuaucacgcgaauaacagcacggauaccguugacacaguguuggagaaaaauguaacugugacccauuccgucaacuuacuggaagauaagcacaaugggaaacuauguaagcucagaggaguggcuccccugcaucuugguaaaugcaacauagccggcuggauccuggggaauccugagugugaaucuuugucaacagcaaguagcugguccuacauuguugagaccucuucgucagacaacggaacuugcuauccaggcgauuuuaucgacuacgaagaacucagggagcagcugagcaguguguccucuuucgaacgguuugagauuuucccgaagacaagcuccuggcccaaucacgauucaaacaagggugucaccgccgcuuguccucaugcaggggccaaaaguuuuuauaagaaucugaucuggcucgugaaaaagggaaacagcuacccaaaauuaucuaaguccuauauaaaugacaaggaaaaagagguacugguucuuuggggcauccaccaccccucaacgagcgcugaucaacagaguuuguaccagaacgccgacgcguacguguucgucggcacuucucgcuauuccaagaaauuuaagccugagauugcaauccgaccaaaagugcgugaucaggaagggagaaugaauuacuauuggacccugguggagcccggagacaagauuacauucgaagccacugguaaccuagucguuccuagguacgcuuuugccauggagcggaacgcaggcagcgggaucauaauuucggauaccccagugcaugacugcaauacaaccugucaaacgccgaaaggagcuaucaacacuucucuccccuuccagaauauucacccuaucacaaucggcaagugcccaaaguauguaaaauccaccaagcugcgccuugccacuggucugagaaacgugcccucaauucagaguaggggguuguuuggagcgauagccggcuucaucgaaggcggguggacaggaauggucgacgguugguacggcuaucaucaccagaaugagcaagggagcggauacgcagcugaucucaaauccacccagaacgccauugacgagaucacgaauaaggugaacucuguuauagaaaagaugaauacccaguuuacagcugugggcaaggaguucaaccaccuggaaaagcggauugagaauuuaaacaaaaaggucgaugacgguuuccuggauaucuggacuuacaaugccgaacuccuugugcuguuggagaacgagcgcacccuagacuaucaugauagcaauguuaaaaaccuguacgaaaagguacgaucacagcucaaaaacaaugcaaaggagaucgggaacggcuguuuugaguucuaucacaagugcgacaauacauguauggagagugugaaaaacggaacuuacgauuauccuaaguacuccgaagaggccaaacugaauagagaggaaauugacggcgucaaacuugagagcaccaggaucuaucaaauucuggcuauauacucuacaguggcgucaaguuugguccucgugguuagccugggggcaaucuccuuuuggaugugcucuggacauucgugccggauuuguaucuga

SEQ ID NO: 133677 - RNA, 1704 nt, Artificial Sequence
  derived and/or modified CDS sequence (opt3) from hemagglutinin__InfluenzaA__ADM14885
augaaggccauccuggugguccuccuuuacaccuucgcuacagcaaacgccgacacucugugcauuggcuaucacgcgaauaacagcacggauaccguugacacaguguuggagaaaaauguaacugugacccauuccgucaacuuacuggaagauaagcacaaugggaaacuauguaagcucagaggaguggcuccccugcaucuugguaaaugcaacauagccggcuggauccuggggaauccugagugugaauugcucucuacagcaucaaguuggagcuacauuguugagaccuccucuucggacaacggaacuugcuauccaggcgauuuuaucgacuacgaagaacugagggagcagcugucaagcgugaguuccuucgaacgguuugagauuuucccgaagacaucuagcuggcccaaucacgauuccaacaagggugucaccgccgcuuguccucaugcaggggccaaaucauuuuauaagaaucucaucugguuagugaaaaagggaaacaguuacccaaaacugagcaagucuuauauaaaugacaaggaaaaagagguacuuguuuuguggggcauccaccaccccuccacgucagcugaucaacagagccuguaccagaacgccgacgcguacguguucgucggcaccagucgcuauucuaagaaauuuaagccugagauugugauccgaccaaaagugcgugaucaggaagggagaaugaauuacuauuggacucuagucgagcccggagacaagauuacauucgaagcaacugguaaccucguugugccuagguacgccuuugcuauggagcggaacgccgaauccggcaucauaauuagcgauaccccaguacaugacugcaauacaaccugucaaacgccgaaaggggcaaucaacacuucgcugcccuuccagaauauucacccuaucacaaucggaaagugcccaaaguaugugaaaucuaccaagcugcgccuugcuacuggcuugagaaacguccccuccauucagucaaggggucucuuuggggccauagcgggauucaucgagggcggcuggacagggaugguggacggaugguacgguuaucaucaccagaaugagcaaggcaguggguacgccgcagaucugaaaagcacccagaacgcuauugacgaaaucacgaauaagguuaacuccgugauagagaaaaugaauacccaguuuacagccgucggaaaggaguucaaccacuuagagaagcggauugaaaaucugaacaaaaagguggaugacggcuuccucgauaucuggacuuacaaugcugagcuucugguauugcuagagaacgaacgcacccuggacuaucaugauucuaauguuaaaaagcucuacgagaaagugcgaagccagcugaagaacaacgccaaggaaaucgguaauggguguuuugaguucuaucacaaaugcgacaacacauguauggaaucagucaagaauggcacuuacgauuauccuaaauacagugaggaggcaaaacuuaacagagaagagauugacggagugaagcuggaauccaccaggaucuaucaaauuuuggccauauacagcacagucgcuucuucacucgugcugguugugaguuuaggcgcgaucagcuuuuggaugugcuccgggcauggaucucugcagugccggauuuguaucuga

SEQ ID NO: 133678 - RNA, 1695 nt, Artificial Sequence
  derived and/or modified CDS sequence (opt3) from hemagglutinin__InfluenzaA__ADM14894
augaaggccauccuggugguccuccuuuacaccuucgcuacagcaaacgccgacacucugugcauuggcuaucacgcgaauaacagcacggauaccguugacacaguguuggagaaaaauguaacugugacccauuccgucaacuuacuggaagauaagcacaaugggaaacuauguaagcucagaggaguggcuccccugcaucuugguaaaugcaacauagccggcuggauccuggggaauccugagugugaaucuuugucaacagcaaguagcugguccuacauuguugagaccucuucgucagacaacggaacuugcuauccaggcgauuuuaucgacuacgaagaacucagggagcagcugagcaguguguccucuuucgaacgguuugagauuuucccgaagacaagcuccuggcccaaucacgauucaaacaagggugucaccgccgcuuguccucaugcaggggccaaaaguuuuuauaagaaucugaucuggcucgugaaaaagggaaacagcuacccaaaauuaucuaaguccuauauaaaugacaaggaaaaagagguacugguucuuuggggcauccaccaccccucaacgagcgcugaucaacagaguuuguaccagaacgccgacgcguacguguucgucggcacuucucgcuauuccaagaaauuuaagccugagauugugauccgaccaaaagugcgugaucaggaagggagaaugaauuacuauuggacccuggucgagcccggagacaagauuacauucgaagcaacugguaaccuaguugugccuagguacgccuuugcuauggagcggaacgccggcagcgggaucguaauaucggauaccccagugcaugacugcaauacaaccugucaaacgccgaaaggagcaauuaacacuucucuccccuuccagaauauccacccuauuacaaucggcaagugcccaaaguaugucaaauccaccaagcugcgccuugcuacuggucugagaaacgugcccucaauccagaguaggggguuguuuggagccauugcgggcuucauagaaggcggguggacaggaaugguugacgguugguacggcuaucaucaccagaaugagcaagggagcggauacgccgcagaucucaaauccacccagaacgcuaucgacgagauuacgaauaaggugaacucugucaucgaaaagaugaauacccaguuuacagccgugggcaaggaguucaaccaccuggaaaagcggauagagaauuuaaacaaaaagguagaugacgguuuccuggauauuuggacuuacaaugcugaacuccuuguucuguuggagaacgagcgcacccuagacuaucaugauagcaaugugaaaaagcuguacgaaaaaguccgaucacagcucaagaacaacgccaaggagaucgggaauggcuguuuugaguucuaucacaaaugcgacaacacauguaugaagagugugaaaaauggaacuuacgauuauccuaaguacuccgaggaagcaaaacugaacagagaggagaucgacggcgucaaacuugaaagcaccaggauuuaucaaauccuggccauuuacucuacaguggcuucaaguuugguucucgugguaagccugggggcgauauccuuuuggaugugcucuggacauucgugccggaucuguauuuga

SEQ ID NO: 133679 - RNA, 1695 nt, Artificial Sequence
  derived and/or modified CDS sequence (opt3) from hemagglutinin__InfluenzaA__ADM14903
augaaggccauccuggugguccuccuuugcaccuucgcuacagcaaacgccgacacucuguguauuggcuaccacgcgaauaacagcacggauaccguugacacaguguuggagaaaaauguaacugugacccauuccgucaacuuacuggaagauaagcacaaugggaaacuaugcaagcucagaggaguggcuccccugcaucuugguaaauguaacauagccggcuggauccuggggaauccugagugcgaaucuuugucaacagcaaguagcugguccuauauuguugagaccucuucgucagacaacggaacuuguuacccaggcgauuuuaucgacuaugaggagcucagggagcagcugagcaguguguccucuuucgaacgguuugagauuuucccgaagacaagcuccuggcccaaucacgauucaaacaagggugucaccgccgcuugcccucaugcaggggccaaaaguuuuuacaagaaucugaucuggcucgugaaaaagggaaacagcuauccaaaauuaucuaaguccuacauaaaugacaagggcaaagaaguacugguucuuuggggcauccaccaccccucaacgagcgcugaucaacagaguuuguaucagaacgccgacgcguacguguucgucgggacuucucgcuacuccaagaaauuuaagccugagauugcaauccgaccaaaagugcgugaucaggagggaagaaugaauuauuacuggacccugguggaacccggugacaagauuacauucgaggccacuggcaaccuagucguuccuagguaugcuuuugccauggaacggaacgcagggagcggaaucauaauuucggauaccccagugcaugacuguaauacaaccugccaaacgccgaaaggcgcuaucaacacuucucuccccuuccagaauauucacccuaucacaaucgguaaguguccaaaguacguaaaauccaccaagcugcgccuugccacugggcugagaaacgugcccucaauucagaguaggggauuguuuggcgcgauagccggcuucaucgaagggggauggacagguauggucgacggcugguauggguaccaucaccagaaugaacaaggaagcggcuaugcagcugaucucaaauccacccagaacgccauugacaagaucacgaauaaagugaacucuguuauagagaagaugaauacccaguuuacagcuguggguaaggaguucaaccaccuggaaaaacggauugagaauuuaaacaagaaagucgaugacggguuccuggauaucuggacuuacaaugccgaacuccuugugcuguuggagaacgaacgcacccuagacuaccaugauagcaauguaaagaaccuguaugagaaaguucgaucacagcucaagaacaaugcaaaggagaucggcaacggaugcuuugaguucuaccacaaaugugacaauacaugcauggaaagugugaagaacggcacuuaugauuacccuaaauauuccgaagaggccaagcugaauagagaagagauugacggggucaaacuugagagcaccaggaucuaccaaauucuggcuauauauucuacaguggcgucaaguuugguccucgugguuagccugggagcaaucuccuuuuggaugugcucuggucauucgugucggauuugcaucuga

SEQ ID NO: 133680 - RNA, 1695 nt, Artificial Sequence
  derived and/or modified CDS sequence (opt3) from hemagglutinin__InfluenzaA__ADM14912
augaaggccauccuggugguccuccuuuacaccuucgcuacagcaaacgccgacacucugugcauuggcuaucacgcgaauaacagcacggauaccguugacacaguguuggagaaaaauguaacugugacccauuccgucaacuuacuggaagauaagcacaaugggaaacuauguaagcucagaggaguggcuccccugcaucuugguaaaugcaacauagccggcuggauccuggggaauccugagugugaaucuuugucaacagcaaguagcugguccuacauuguugagaccucuucgucagacaacggaacuugcuauccaggcgauuuuaucgacuacgaagaacucagggagcagcugagcaguguguccucuuucgaacgguuugagauuuucccgaagacaagcuccuggcccaaucacgauucaaacaagggugucaccgccgcuuguccucaugcaggggccaaaaguuuuuauaagaaucugaucuggcucgugaaaaagggaaacagcuacccaaaauuaucuaaguccuauauaaaugacaagggcaaagaaguacugguucuuuggggcauccaccaccccucaacgagcgcugaucaacagaguuuguaccagaacgccgacgcguacguguucgucgggacuucucgcuauuccaagaaauuuaagccugagauugcaauccgaccaaaagugcgugaucaggagggaagaaugaauuacuauuggacccugguggaacccggugacaagauuacauucgaggccacuggcaaccuagucguuccuagguacgcuuuugccauggaacggaacgcagggagcggaaucauaauuucggauaccccagugcaugacugcaauacaaccugucaaacgccggagggcgcuaucaacacuucucuccccuuccagaauauucacccuaucacaaucgguaaaugcccaaaguauguaaaguccaccaaacugcgccuugccacugggcugagaaacgugcccucaauucagaguaggggauuguuuggcgcgauagccggcuucaucgaagggggauggacagguauggucgacggcugguacggguaucaucaccagaaugagcaaggaagcggcuacgcagcugaucucaaguccacccagaacgccauugacgagaucacgaauaaagugaacucuguuauagaaaagaugaauacccaguuuacagcuguggguaaagaguucaaccaccuggaaaagcggauugagaauuuaaacaagaaagucgaugacggguuccuggauaucuggacuuacaaugccgaacuccuugugcuguuggagaacgagcgcacccuagacuaucaugauagcaauguaaagaaccuguacgaaaaaguucgaucacagcucaagaacaaugcaaaagagaucggcaacggauguuuugaguucuaucacaagugcgacaauacauguauggagagugugaagaacggcacuuacgauuauccuaaauacuccgaagaggccaagcugaauagagaggaaauugacggggucaaacuugagagcaccaggaucuaucaaauucuggcuauauacucuacaguggcgucaaguuugguccucgugguuagccugggagcaaucuccuuuuggaugugcucuggucauucgugccggauuuguaucuga

SEQ ID NO: 133681 - RNA, 1695 nt, Artificial Sequence
  derived and/or modified CDS sequence (opt3) from hemagglutinin__InfluenzaA__ADM14921
augaaggccauccuggugguccuccuuuacaccuucgcuacagcaaacgccgacacucugugcauuggcuaucacgcgaauaacagcacggauaccguugacacaguguuggagaaaaauguaacugugacccauuccgucaacuuacuggaagauaagcacaaugggaaacuauguaagcucagaggaguggcuccccugcaucuugguaaaugcaacauagccggcuggauccuggggaauccugagugugaaucuuugucaacagcaaguagcugguccuacauuguugagaccucuucgucagacaacggaacuugcuauccaggcgauuuuaucgacuacgaggagcucagggagcagcugagcaguguguccucuuucgaacgguuugagauuuucccgaagacaagcuccuggcccaaucacgauucaaacaagggugucaccgccgcuuguccucaugcaggggccaaaaguuuuuauaagaaucugaucuggcucgugaaaaagggaaacagcuacccaaaauuaucuaaguccuauauaaaugacaagggcaaagaaguacugguucuuuggggcauccaccaccccucaacgagcgcugaucaacagaguuuguaccagaacgccgacgcguacguguucgucgggacuucucgcuauuccaagaaauuuaagccugagauugcaauccgaccaaaagugcgugaucaggagggaagaaugaauuacuauuggacccugguggaacccggugacaagauuacauucgaggccacuggcaaccuagucguuccuagguacgcuuuugccauggaacggaacgcagggagcggaaucauaauuucggauaccccagugcaugacugcaauacaaccugucaaacgccgaaaggcgcuaucaacacuucucuccccuuccagaauauucacccuaucacaaucgguaagugcccaaaguauguaaaauccaccaagcugcgccuugccacugggcugagaaacgugcccucaauucagaguaggggauuguuuggcgcgauagccggcuucaucgaagggggauggacagguauggucgacggcugguacggguaucaucaccagaaugaacaaggaagcggcuacgcagcugaucucaaauccacccagaacgccauugacgagaucacgaauaaggugaacucuguuauagagaaaaugaauacccaguuuacagcuguggguaaggaguucaaccaccuggaaaagcggauugaaaauuuaaacaaaaaggucgaugacggguuccuggauaucuggacuuacaaugccgagcuccuugugcuguuggaaaacgagcgcacccuagacuaucaugauagcaauguaaagaaccuguacgagaagguucgaucacagcucaaaaacaaugcaaaggaaaucggcaacggauguuuugaguucuaucacaagugcgacaauacauguauggaaagugugaaaaacggcacuuacgauuauccuaaguacuccgaggaagccaaacugaauagagaggagauugacggggucaaacuugaaagcaccaggaucuaucaaauucuggcuauauacucuacaguggcgucaaguuugguccucgugguuagccugggagcaaucuccuuuuggaugugcucuggucauucgugccggauuuguaucuga

SEQ ID NO: 133682 - RNA, 1701 nt, Artificial Sequence; identical to SEQ ID NO: 131881
  derived and/or modified CDS sequence (opt3) from hemagglutinin__InfluenzaA__ADM14930

SEQ ID NO: 133683 - RNA, 1701 nt, Artificial Sequence
  derived and/or modified CDS sequence (opt3) from hemagglutinin__InfluenzaA__ADM14948
augaaggccauccuggugguccuccuuuacaccuucgcuacagcaaacgccgacacucugugcauuggcuaucacgcgaauaacagcacggauaccguugacacaguguuggagaaaaauguaacugugacccauuccgucaacuuacuggaagauaagcacaaugggaaacuauguaagcucagaggaguggcuccccugcaucuugguaaaugcaacauagccggcuggauccuggggaauccugagugugaaucuuugucaacagcaaguagcugguccuacauuguugagaccucuucgucagacaacggaacuugcuauccaggcgauuuuaucgacuacgaagaacucagggagcagcugagcaguguguccucuuucgaacgguuugagauuuucccgaagacaagcuccuggcccaaucacgauucaaacaagggugucaccgccgcuuguccucaugcaggggccaaaggauuuuauaagaaucugaucuggcucgugaaaaagggcaacaguuacccaaaauuaagcaagucuuauauaaaugacaagggcaaagaaguacugguucuuugggggauccaccaccccuccacgucagcugaucaacagagcuuguaccagaacgccgacgcguacguguucgucggaaccagucgcuauucucgaaaguuuaaaccugagauugcaauccguccaaaggugagagaucaggaggguaggaugaauuacuauuggacucugguggaacccggcgacaaaauuacauucgaggccacugggaaccuagucguuccucgguacgcuuuugccauggaacgcaacgcaggauccggcaucauaauuagcgauaccccagugcaugacugcaauacaaccugucaaacgccggagggugcuaucaacacuucgcuccccuuccagaauauucacccuaucacaaucgggaagugcccaaaauauguaaagucuaccaagcugagacuugccacuggacugaggaacgugcccuccauucagucacggggcuuguuuggcgcgauagccggguucaucgaaggagguuggacaggcauggucgacgggugguacggauaucaucaccagaaugagcaaggcagugguuacgcagcugaucucaaaagcacccagaacgccauugacgagaucacgaauaaggugaacuccguuauagaaaagaugaauacccaguuuacagcuguggggaaggaguucaaccaccuggaaaaacgcauugagaauuuaaacaagaaggucgaugacggcuuccuggauaucuggacuuacaaugccgaacuccuugugcuguuggagaacgagcgaacccuagacuaucaugauucuaauguuaaaaaccuguacgaaaagguaagaagccagcucaaaaacaaugcaaaggagaucggaaacggcuguuuugaguucuaucacaaaugcgacaauacauguauggagucagugaagaacgggacuuacgauuauccuaaguacagugaagaggccaaacugaauagggaggaaauugacggagucaaacuugaguccacccggaucuaucaaauucuggcuauauacagcacaguggcgucuucauugguccucgugguuagucugggugcaaucagcuuuuggaugugcuccaacggcucuuuacagugccguauuuguaucuga

SEQ ID NO: 133684 - RNA, 1695 nt, Artificial Sequence
  derived and/or modified CDS sequence (opt3) from hemagglutinin__InfluenzaA__ADM14966
augaaggccauccuggugguccuccuuuacaccuucgcuacagcaaacgccgacacucugugcauuggcuaucacgcgaauaacagcacggauaccguugacacaguguuggagaaaaauguaacugugacccauuccgucaacauauuagaagauaagcacaaugggaaacuguguaagcuaagaggaguggcuccccuccaucuggguaaaugcaacaucgccggcuggauucuugggaauccugagugugaaucucugucaacagcaaguagcugguccuacaucguugagaccucuucgucagacaacggaacuugcuauccaggcgauuuuauugacuacgaagaguugagggagcagcucagcaguguguccucuuucgaacgguuugagaucuucccgaagacaagcuccuggcccaaucacgauucaaacaagggugucaccgccgcuuguccucaugcaggggccaaaaguuuuuauaagaaucugauauggcuggugaaaaagggaaacagcuacccaaaacucucuaaguccuauaucaaugacaagggcaaagaaguauuaguucuguggggcauucaccaccccucaacgagcgcugaucaacagagucuuuaccagaacgccgacgcguacguguucgucgggucuucccgcuauagcaagaaauuuaagccugagaucgcaauucgaccaaaagugcgugaucaggagggaagaaugaauuacuauuggacuuugguggaacccggugacaagaucaccuucgaggccacaggcaaccuggucguuccuagguacgcuuuugccauggaacggaacgcagggucgggaauaauuaucucugauacuccagugcaugacugcaauaccacaugucaaaccccgaaaggcgcuauuaacacgucccuacccuuccagaauauccacccuaucacuauugguaagugcccaaaguauguaaaaucaacaaagcuccgccuggccaccgggcuuagaaacgugcccaguauacagagcaggggacuguuuggcgcgaucgccggcuucauugaagggggauggacugguauggucgacggcugguacggguaucaucaccagaaugaacaaggauccggcuacgcagcugauuugaaaucuacacagaacgccaucgacgagauaaccaauaaggugaacagcguuauugagaaaaugaauacgcaguuuaccgcuguggguaaggaguucaaccaccucgagaagcggaucgaaaaucugaacaaaaaggucgaugacggguucuuagauaucuggacauacaaugccgagcugcucgugcuucuggaaaacgagcgcacuuuggacuaucaugauucaaauguuaaaaaccuauacgagaagguacgaagucagcugaaaaacaaugcaaaggaaauuggcaacggauguuuugaguucuaucacaagugcgacaauaccuguauggaauccgugaaaaacggcacauacgauuauccuaaguacagcgaggaagccaaacucaauagagaggagaucgacggggucaagcuggaaucuacuaggauuuaucaaauacuugcuaucuacucaaccguggcgaguagccuggucuuggugguuucccucggagcaauuucuuuuuggaugugcucgggucauagcugccggaucuguaucuga

SEQ ID NO: 133685 - RNA, 1701 nt, Artificial Sequence; identical to SEQ ID NO: 130897
  derived and/or modified CDS sequence (opt3) from hemagglutinin__InfluenzaA__ADM14975

SEQ ID NO: 133686 - RNA, 1701 nt, Artificial Sequence
  derived and/or modified CDS sequence (opt3) from hemagglutinin__InfluenzaA__ADM14985
augaaggccauccuggugguccuccuuuacaccuucgcuacagcaaacgccgacacucugugcauuggcuaucacgcgaauaacagcacggauaccguugacacaguguuggagaaaaauguaacugugacccauuccgucaacuuacuggaagauaagcacaaugggaaacuauguaagcucagaggaguggcuccccugcaucuugguaaaugcaacauagccggcuggauccuggggaauccugagugugaaucuuugucaacagcaaguagcugguccuacauuguugagaccucuucgucagacaacggaacuugcuauccaggcgauuuuaucgacuacgaagaacucagggagcagcugagcaguguguccucuuucgaacgguuugagauuuucccgaagacaagcuccuggcccaaucacgauucaaacaagggugucaccgccgcuuguccucaugcaggggccaaaaguuuuuauaagaaucugaucuggcucgugaaaaagggaaacagcuacccaaaauuaucuaaguccuauauaaaugacaaggaaaaagagguacugguucuuuggggcauccaccaccccucaacgagcgcugaucaacagaguuuguaccagaacgccgacgcguacguguucgucggcacuucucgcuauuccaagaaauuuaagccugagauugcaauccgaccaaaagugcgugggcaggaaggaagaaugaauuacuauuggacccugguggagcccggugauaagauuacauucgaagccacuggcaaccuagucguuccuagguacgcuuuugccauggagcggaacgcagggagcggaaucgugauaucggacaccccaguacaugauugcaauacaaccugucaaacgccgaaaggcgcuauuaacacuucucuccccuuccagaauauccacuccauuacaaucgguaagugcccuaaguaugugaaaucaaccaagcugcgccuugccacugggcugagaaacgucccaaguauccagagcaggggauuguuuggcgcgauugccggcuucauagaagggggauggacagguaugguggacggcugguacggguaucaucaccagaaugagcaaggauccggcuacgcagcugaccucaaaucuacccagaacgccaucgaugagauuacgaauaagguuaacagcgugaucgaaaagaugaauacccaguuuacagcugucgguaaggaguucaaccaccuggaaaagcggauagagaauuuaaacaaaaagguggacgauggguuccuggacauuuggacuuacaaugccgaacuccuuguacuguuggagaacgagcgcacccuagauuaucaugacucaaauguuaaaaaccuguacgaaaaggugcgaagucagcucaaaaacaaugcaaaggagaucggcaacggauguuuugaguucuaucacaagugcgauaauacauguauggaguccgucaaaaacggcacuuacgacuaucccaaguacagcgaagaggccaaacugaauagagaggaaaucgauggggugaaacuugagucuaccaggauuuaucaaauccuggcuauuuacucaacagucgcgaguagcuuggugcucguugugucccugggagcaauaucuuuuuggaugugcucgaacgguagcuuacagugccggaucuguauuuga

SEQ ID NO: 133687 - RNA, 1701 nt, Artificial Sequence
  derived and/or modified CDS sequence (opt3) from hemagglutinin__InfluenzaA__ADM23841
augaaggccauccuggugguccuccuuuacaccuucgcuacagcaaacgccgacacucugugcauuggcuaucacgcgaauaacagcacggauaccguugacacaguguuggagaaaaauguaacugugacccauuccgucaacuuacuggaagauaagcacaaugggaaacuauguaagcucagaggaguggcuccccugcaucuugguaaaugcaacauagccggcuggauccuggggaauccugagugugaaucuuugucaacagcaaguagcugguccuacauuguugagaccucuucgucagacaacggaacuugcuauccaggcgauuuuaucgacuacgaggagcucagggagcagcugagcaguguguccucuuucgaacgguuugagauuuucccgaagacaagcuccuggcccaaucacgauucaaacaagggugucaccgccgcuuguccucaugcaggggccaaaaguuuuuauaagaaucugaucuggcucgugaaaaagggaaacagcuacccaaaauuaucuaaguccuauauaaaugacaagggcaaagaaguacugguucuuuggggcauccaccaccaaucaacgagcgcugaucagcagaguuuguaccagaacgccgacgcguacguguucgucgggacuucucgcuauuccaagaaauuuaagcccgagauugcaauccgaccuaaagugcgugaucaagagggaagaaugaauuacuauuggacccugguggaaccaggugacaagauuacauucgaggccacuggcaaccuagucguucccagguacgcuuuugccauggaacggaacgcagggagcggaaucauaauuucggauaccccugugcaugacugcaauacaaccugucagacgccaaaaggcgcuaucaacacuucucucccguuccagaauauucaccccaucacaaucgguaagugcccuaaguauguaaaauccaccaagcugcgccuugccacugggcugagaaacgugccaucaauucagaguaggggauuguuuggcgcgauagccggcuucaucgaagggggauggacagguauggucgacggcugguacggguaucaucaccaaaaugaacagggaagcggcuacgcagcugaucucaaauccacccagaacgccauugacgagaucacgaauaaggugaacucuguuauagagaaaaugaauacccaguuuacagcuguggguaaggaguucaaccaccuggaaaagcggauugaaaauuuaaacaaaaaggucgaugacggguuccuggauaucuggacuuacaaugccgagcuccuugugcuguuggaaaacgagcgcacccuagacuaucaugauagcaauguaaagaaccuguacgagaagguucgaucacaacucaaaaacaaugcaaaggaaaucggcaacggauguuuugaguucuaucacaagugcgacaauacauguauggaaagugugaaaaacggcacuuacgauuaucccaaguacuccgaggaagccaaacugaauagagaggagauugacggggucaaacuugaaagcaccaggaucuaucagauucuggcuauauacucuacaguggcgucaaguuugguccucgugguuagccugggagcaaucuccuuuuggaugugcucuaacgguucguuacagugccggauuuguaucuga

SEQ ID NO: 133688 - RNA, 1701 nt, Artificial Sequence; identical to SEQ ID NO: 131881
  derived and/or modified CDS sequence (opt3) from hemagglutinin__InfluenzaA__ADM23843

SEQ ID NO: 133689 - RNA, 1701 nt, Artificial Sequence
  derived and/or modified CDS sequence (opt3) from hemagglutinin__InfluenzaA__ADM23844
augaaggccauccuggugguccuccuuuacaccuucgcuacagcaaacgccgacacucugugcauuggcuaucacgcgaauaacagcacggauaccguugacacaguguuggagaaaaauguaacugugacccauuccgucaacuuacuggaagauaagcacaaugggaaacuauguaagcucagaggaguggcuccccugcaucuugguaaaugcaacauagccggcuggauccuggggaauccugagugugaaucuuugucaacagcaaguagcugguccuacauuguugagaccucuaucucggacaacggaacuugcuauccaggcgauuuuauugacuacgaagaacucagggagcagcugucaagcgugaguuccuucgaacgguuugagaucuucccgaagacaucuagcuggcccaaucacgauuccaacaagggugucaccacggccuguccucaugcuggggcaaaaggauuuuauaagaaucugauauggcucgugaaaaagggcaacucauacccaaaauuaaguaagagcuauaucaaugacaagggcaaagaaguacugguucuuugggggauucaccaccaaucuacuuccgccgaucagcagucauuguaccagaacgcugacgccuacguguucgucggaaccagccgcuauaguaagaaauuuaagcccgagaucgcgauucgaccuaaagugcgugaucaagaggguagaaugaauuacuauuggacacugguggaaccaggcgacaagaucacuuucgaggcaaccgggaaccuagucguucccagguacgccuuugcuauggaacggaacgccggaucuggcauaauuaucuccgauacaccugugcaugacugcaauaccacgugucagacuccaaaaggugcaauuaacacaagccucccguuccagaauauccaccccaucaccauugggaagugcccuaaguauguaaaaucgacuaagcugcgccuugcuacaggacugagaaacgugccaucuauacaguccaggggcuuguuuggcgccaucgcgggguucauugagggagguuggaccggcauggucgacgggugguacggauaucaucaccaaaaugaacagggcucagguuacgccgcagaucucaaaaguacgcagaacgcuaucgacaagauaaccaauaaagugaacagcguuauugagaagaugaauacacaguuuacugccguggggaaggaguucaaccaccuggaaaaacggaucgagaauuuaaacaagaaagucgaugacggcuuccuggauaucuggaccuacaaugcugaacuccuugugcuguuggagaacgaacgcacacuagacuaucaugauuccaauguaaagaaccuguacgagaaaguucgaucucaacucaagaacaaugccaaggagauuggaaacggcuguuuugaguucuaucacaaaugcgacaauacuuguauggagagcgugaagaacgggaccuacgauuaucccaaauacucagaagaggcaaagcugaauagagaagagaucgacggagucaaacuugagaguacaaggauuuaucagauacuggccaucuacuccaccguggcuagcucuuugguccucgugguuucacugggugcgauuaguuuuuggaugugcagcaacggcuccuuacagugccggaucuguaucuga

SEQ ID NO: 133690 - RNA, 1701 nt, Artificial Sequence
  derived and/or modified CDS sequence (opt3) from hemagglutinin__InfluenzaA__ADM23845
augaaggccauccuggugguccuccuuuacaccuucgcuacagcaaacgccgacacucugugcauuggcuaucacgcgaauaacagcacggauaccguugacacaguguuggagaaaaauguaacugugacccauuccgucaacuuacuggaagauaagcacaaugggaaacuauguaagcucagaggaguggcuccccugcaucuugguaaaugcaacauagccggcuggauccuggggaauccugagugugaaucuuugucaacagcaaguagcugguccuacauuguugagaccucuaucucggacaacggaacuugcuauccaggcgauuuuauugacuacgaggagcucagggagcagcugucaagcgugaguuccuucgaacgguuugagaucuucccgaagacaucuagcuggcccaaucacgauuccaacaagggugucaccacggccuguccucaugcuggggcaaaaucauuuuauaagaaucugauauggcucgugaaaaagggaaacaguuacccaaaauuaagcaagucuuauaucaaugacaagggcaaagaaguacugguucuuuggggcauucaccaccaauccacuucagccgaucagcagagcuuguaccagaacgcugacgccuacguguucgucgggaccagucgcuauucuaagaaauuuaagcccgagaucgcgauucgaccuaaagugcgugaucaagagggaagaaugaauuacuauuggacacugguggaaccaggugacaagaucacuuucgaggcaaccggcaaccuagucguucccagguacgccuuugcuauggaacggaacgccggguccggaauaauuaucagcgauacaccugugcaugacugcaauaccacgugucagacuccaaaaggcgcaauuaacacaucgcucccguuccagaauauccaccccaucaccauugguaagugcccuaaguauguaaaaucuacuaagcugcgccuugcuacagggcugagaaacgugccauccauacagucaaggggauuguuuggcgccaucgcgggcuucauugaagggggauggaccgguauggucgacggcugguacggguaucaucaccaaaaugaacagggaaguggcuacgccgcagaucucaaaagcacgcagaacgcuaucgacaagauaaccaauaaagugaacuccguuauugagaagaugaauacacaguuuacugccguggguaaggaguucaaccaccuggaaaaacggaucgagaauuuaaacaagaaagucgaugacggguuccuggauaucuggaccuacaaugcugaacuccuugugcuguuggagaacgaacgcacacuagacuaucaugauucuaauguaaagaaccuguacgagaaaguucgaagccaacucaagaacaaugccaaggagauuggcaacggauguuuugaguucuaucacaaaugcgacaauacuuguauggaaucagugaagaacggcaccuacgauuaucccaaauacagugaagaggcaaagcugaauagagaagagaucgacggggucaaacuugaguccacaaggauuuaucagauacuggccaucuacagcaccguggcuucuucauugguccucgugguuagucugggagcgauuagcuuuuggaugugcuccaacgguucuuuacagugccggaucuguaucuga

SEQ ID NO: 133691 - RNA, 1701 nt, Artificial Sequence
  derived and/or modified CDS sequence (opt3) from hemagglutinin__InfluenzaA__ADM23846
augaaggccauccuggugguccuccuuuacaccuucgcuacagcaaacgccgacacucugugcauuggcuaucacgcgaauaacagcacggauaccguugacacaguguuggagaaaaauguaacugugacccauuccgucaacuuacuggaagauaagcacaaugggaaacuauguaagcucagaggaguggcuccccugcaucuugguaaaugcaacauagccggcuggauccuggggaauccugagugugaaucuuugucaacagcaaguagcugguccuacauuguugagaccucuaucucggacaacggaacuugcuauccaggcgauuuuauugacuacgaggagcucagggagcagcugucaagcgugaguuccuucgaacgguuugagaucuucccgaagacaucuagcuggcccaaucacgauuccaacaagggugucaccacggccuguccucaugcuggggcaaaaucauuuuauaagaaucugauauggcucgugaaaaagggaaacaguuacccaaaauuaagcaagucuuauaucaaugacaagggcaaagaaguacugguucuuuggggcauucaccaccccuccacuucagccgaucaacagagcuuguaccagaacgcugacgccuacguguucgucgggaccagucgcuauucuaagaaauuuaagccugagaucgcgauucgaccaaaagugcgugaucaggagggaagaaugaauuacuauuggacacugguggaacccggugacaagaucacuuucgaggcaaccggcaaccuagucguuccuagguacgccuuugcuauggaacggaacgccggguccggaauaauuaucagcgauacaccagugcaugacugcaauaccacgugucaaacuccgaaaggcgcaauuaacacaucgcuccccuuccagaauauccacccuaucaccauugguaagugcccaaaguauguaaaaucuacuaagcugcgccuugcuacagggcugagaaacgugcccuccauacagucaaggggauuguuuggcgccaucgcgggcuucauugaagggggauggaccgguauggucgacggcugguacggguaucaucaccagaaugaacaaggaaguggcuacgccgcagaucucaaaagcacgcagaacgcuaucgacaagauaaccaauaaagugaacuccguuauugagaagaugaauacacaguuuacugccguggguaaggaguucaaccaccuggaaaaacggaucgagaauuuaaacaagaaagucgaugacggguuccuggauaucuggaccuacaaugcugaacuccuugugcuguuggagaacgaacgcacacuagacuaucaugauucuaauguaaagaaccuguacgagaaaguucgaagccagcucaagaacaaugccaaggagauuggcaacggauguuuugaguucuaucacaaaugcgacaauacuuguauggaaucagugaagaacggcaccuacgauuauccuaaauacagugaagaggcaaagcugaauagagaagagaucgacggggucaaacuugaguccacaaggauuuaucaaauacuggccaucuacagcaccguggcuucuucauugguccucgugguuagucugggagcgauuagcuuuuggaugugcuccaacgguucuuuacagugccggaucuguaucuga

SEQ ID NO: 133692 - RNA, 1701 nt, Artificial Sequence
  derived and/or modified CDS sequence (opt3) from hemagglutinin__InfluenzaA__ADM23847
augaaggccauccuggugguccuccuuuacaccuucgcuacagcaaacgccgacacucugugcauuggcuaucacgcgaauaacagcacggauaccguugacacaguguuggagaaaaauguaacugugacccauuccgucaacuuacuggaagauaagcacaaugggaaacuauguaagcucagaggaguggcuccccugcaucuugguaaaugcaacauagccggcuggauccuggggaauccugagugugaaucuuugucaacagcaaguagcugguccuacauuguugagaccucuaucucggacaacggaacuugcuauccaggcgauuuuauugacuacgaagaacucagggagcagcugucaagcgugaguuccuucgaacgguuugagaucuucccgaagacaucuagcuggcccaaucacgauuccaacaagggugucaccacggccuguccucaugcuggggcaaaaggauuuuauaagaaucugauauggcucgugaaaaagggcaacucauacccaaaauuaaguaagagcuauaucaaugacaagggcaaagaaguacugguucuuugggggauucaccaccaaucuacuuccgccgaucagcagucauuguaccagaacgcugacgccuacguguucgucggaaccagccgcuauaguaagaaauuuaagcccgagaucgcgauucgaccuaaagugcgugaucaagaggguagaaugaauuacuauuggacacugguggaaccaggcgacaagaucacuuucgaggcaaccgggaaccuagucguucccagguacgccuuugcuauggaacggaacgugggaucuggcauaauuaucuccgauacaccuguacaugacugcaauaccacgugucagacuccaaaaggugccauuaacacaagccucccguuccagaauauccaccccaucaccauugggaagugcccuaaguaugugaaaucgacuaagcugcgccuugcaacaggacugagaaacgucccaucuauacaguccaggggcuuguuuggcgcuaucgccggguucauugagggagguuggaccggcaugguggacgggugguacggauaucaucaccaaaaugaacagggcucagguuacgcggccgaucucaaaaguacgcagaacgcaaucgacaagauaaccaauaaaguuaacagcgugauugagaagaugaauacacaguuuacugcugucgggaaggaguucaaccaccuggaaaaacggaucgagaauuuaaacaagaaaguggaugacggcuuccuggauaucuggaccuacaaugccgaacuccuuguacuguuggagaacgaacgcacacuagacuaucaugauuccaauguuaagaaccuguacgagaaagugcgaucucaacucaagaacaaugcuaaggagauuggaaacggcuguuuugaguucuaucacaaaugcgacaauacuuguauggagagcgucaagaacgggaccuacgauuaucccaaauacucagaagaggccaagcugaauagagaagagaucgacggagugaaacuugagaguacaaggauuuaucagauacuggcaaucuacuccaccgucgccagcucuuuggugcucguugugucacugggugcuauuaguuuuuggaugugcagcaacggcuccuuacagugccggaucuguaucuga

SEQ ID NO: 133693 - RNA, 1701 nt, Artificial Sequence
  derived and/or modified CDS sequence (opt3) from hemagglutinin__InfluenzaA__ADM23849
augaaggccauccuggugguccuccuuuacaccuucgcuacagcaaacgccgacacucugugcauuggcuaucacgcgaauaacagcacggauaccguugacacaguguuggagaaaaauguaacugugacccauuccgucaacuuacuggaagauaagcacaaugggaaacuauguaagcucagaggaguggcuccccugcaucuugguaaaugcaacauagccggcuggauccuggggaauccugagugugaaucuuugucaacagcaaguagcugguccuacauuguugagaccucuucgucagacaacggaacuugcuauccaggcgauuuuaucgacuacgaggagcucagggagcagcugagcaguguguccucuuucgaacgguuugagauuuucccgaagacaagcuccuggcccaaucacgauucaaacaagggugucaccgccgcuuguccucaugcaggggccaaaaguuuuuauaagaaucugaucuggcucgugaaaaagggaaacagcuacccaaaauuaucuaaguccuauauaaaugacaagggcaaagaaguacugguucuuuggggcauccaccaccaaucaacgagcgcugaucagcagaguuuguaccagaacgccgacgcguacguguucgucgggacuucucgcuauuccaagaaauuuaagcccgagauugcaauccgaccuaaagugcgugaucaagagggaagaaugaauuacuauuggacccugguggaaccaggugacaagauuacauucgaggccacuggcaaccuagucguucccagguacgcuuuugccauggaacggaacgcagggagcggaaucauaauuucggauaccccugugcaugacugcaauacaaccugucagacgccaaaaggcgcuaucaacacuucucucccguuccagaauauucaccccaucacaaucgguaagugcccuaaguauguaaaauccaccaagcugcgccuugccacugggcugagaaacgugccaucaauucagaguaggggauuguuuggcgcgauagccggcuucaucgaagggggauggacagguauggucgacggcugguacggguaucaucaccaaaaugaacagggaagcggcuacgcagcugaucucaaauccacccagaacgccauugacaagaucacgaauaaagugaacucuguuauagagaagaugaauacccaguuuacagcuguggguaaggaguucaaccaccuggaaaaacggauugagaauuuaaacaagaaagucgaugacggguuccuggauaucuggacuuacaaugccgaacuccuugugcuguuggagaacgaacgcacccuagacuaucaugauagcaauguaaagaaccuguacgagaaaguucgaucacaacucaagaacaaugcaaaggagaucggcaacggauguuuugaguucuaucacaaaugcgacaauacauguauggaaagugugaagaacggcacuuacgauuaucccaaauacuccgaagaggccaagcugaauagagaagagauugacggggucaaacuugagagcaccaggaucuaucagauucuggcuauauacucuacaguggcgucaaguuugguccucgugguuagccugggagcaaucuccuuuuggaugugcucuaacgguucguuacagugccggauuuguaucuga

SEQ ID NO: 133694 - RNA, 1701 nt, Artificial Sequence
  derived and/or modified CDS sequence (opt3) from hemagglutinin__InfluenzaA__ADM23851
auggaggccauccuggugguccuccuuuacaccuucgcuacagcaaacgccgacacucugugcauuggcuaucacgcgaauaacagcacggauaccguugacacaguguuggaaaagaauguaacugugacccauuccgucaacuuacuggaggauaagcacaaugggaagcuauguaaacucagaggaguggcuccccugcaucuugguaagugcaacauagccggcuggauccuggggaauccugaaugugagucuuugucaacagcaaguagcugguccuacauuguugaaaccucuucgucagacaacggaacuugcuauccaggcgauuuuaucgacuacgaggagcucagggaacagcugagcaguguguccucuuucgagcgguuugaaauuuucccgaaaacaagcuccuggcccaaucacgauucaaacaagggugucaccgccgcuuguccucaugcaggggccaagaguuuuuauaaaaaucugaucuggcucgugaagaaaggaaacagcuacccaaaguuaucuaaauccuauauaaaugacaagggcaaggagguacugguucuuuggggcauccaccaccaaucaacgagcgcugaucagcagaguuuguaccagaacgccgacgcguacguguucgucgggucuucccgcuauagcaaaaaguuuaaacccgagauugcaauccgaccuaaggugcgugaucaagaaggaagaaugaauuacuauuggacucugguggagccaggugacaaaauuaccuucgaagccacaggcaaccuagucguucccagguacgcuuuugccauggagcggaacgcagggucgggaaucauaauuucugauacuccugugcaugacugcaauaccacaugucagaccccaaagggcgcuaucaacacgucccucccguuccacaauauucaucccaucacuaucgguaaaugcccuaaguauguaaagucaacaaaacugcgccuugccaccgggcugagaaacgugccaaguauucagagcaggggauuguuuggcgcgauagccggcuucaucgaagggggauggacugguauggucgacggcugguacggguaucaccaccagaaugagcaaggauccggcuacgcagcugaucucaagucuacacagaacgccauugacgagaucaccaauaaagugaacagcguuauagaaaagaugaauacgcaguuuaccgcuguggguaaagaguucaaccaucuggaaaagcggauugagaauuuaaacaagaaagucgaugacggguuccuggauaucuggacauacaaugccgaacuccuugugcuguuggagaacgagcgcacucuagacuaucacgauucaaauguaaagaaccuguacgaaaaaguucgaagucagcucaagaacaaugcaaaagagaucggcaacggauguuuugaguucuaucauaagugcgacaauaccuguauggaauccgugaagaacggcacauacgauuaucccaaauacagcgaagaggccaagcugaauagagagaaaauugacggggucaaacuugaaucuacuaggaucuaucaaauucuggcuauauacucaaccguggcgaguagcuugguccucgugguuucccugggagcaaucucuuuuuggaugugcucgaacgguagcuuacagugccggauuuguaucuga

SEQ ID NO: 133695 - RNA, 1701 nt, Artificial Sequence
  derived and/or modified CDS sequence (opt3) from hemagglutinin__InfluenzaA__ADM23852
auggaggccauccuggugguccuccuuuacaccuucgcuacagcaaacgccgacacucugugcauuggcuaucacgcgaauaacagcacggauaccguugacacaguguuggaaaagaauguaacugugacccauuccgucaacuuacuggaggauaagcacaaugggaagcuauguaaacucagaggaguggcuccccugcaucuugguaagugcaacauagccggcuggauccuggggaauccugaaugugagucuuugucaacagcaaguagcugguccuacauuguugaaaccucuucgucagacaacggaacuugcuauccaggcgauuuuaucgacuacgaggagcucagggaacagcugagcaguguguccucuuucgagcgguuugaaauuuucccgaaaacaagcuccuggcccaaucacgauucaaacaagggugucaccgccgcuuguccucaugcaggggccaagaguuuuuauaaaaaucugaucuggcucgugaagaaaggaaacagcuacccaaaguuaucuaaauccuauauaaaugacaagggcaaggagguacugguucuuuggggcauccaccaccccucaacgagcgcugaucaacagaguuuguaccagaacgccgacgcguacguguucgucgggucuucccgcuauagcaaaaaguuuaaaccugagauugcaauccgaccaaaggugcgugaucaggaaggaagaaugaauuacuauuggacucugguggagcccggugacaaaauuaccuucgaagccacaggcaaccuagucguuccuagguacgcuuuugccauggagcggaacgcagggucgggaaucauaauuucugauacuccagugcaugacugcaauaccacaugucaaaccccgaagggcgcuaucaacacgucccuccccuuccacaauauucauccuaucacuaucgguaaaugcccaaaguauguaaagucaacaaaacugcgccuugccaccgggcugagaaacgugcccaguauucagagcaggggauuguuuggcgcgauagccggcuucaucgaagggggauggacugguauggucgacggcugguacggguaucaccaccagaaugagcagggauccggcuacgcagcugaucucaagucuacacaaaacgccauugacgagaucaccaauaaagugaacagcguuauagaaaagaugaauacgcaguuuaccgcuguggguaaagaguucaaccaucuggaaaagcggauugagaauuuaaacaagaaagucgaugacggguuccuggauaucuggacauacaaugccgaacuccuugugcuguuggagaacgagcgcacucuagacuaucacgauucaaauguaaagaaccuguacgaaaaaguucgaagucagcucaagaacaaugcaaaagagaucggcaacggauguuuugaguucuaucauaagugcgacaauaccuguauggaauccgugaagaacggcacauacgauuauccuaaauacagcgaagaggccaagcugaauagagagaaaauugacggggucaaacuugaaucuacuaggaucuaucagauucuggcuauauacucaaccguggcgaguagcuugguccucgugguuucccugggagcaaucucuuuuuggaugugcucgaacgguagcuuacaaugccggauuuguaucuga

SEQ ID NO: 133696 - RNA, 1701 nt, Artificial Sequence; identical to SEQ ID NO: 133695
  derived and/or modified CDS sequence (opt3) from hemagglutinin__InfluenzaA__ADM23853

SEQ ID NO: 133697 - RNA, 1701 nt, Artificial Sequence; identical to SEQ ID NO: 130959
  derived and/or modified CDS sequence (opt3) from hemagglutinin__InfluenzaA__ADM23855

SEQ ID NO: 133698 - RNA, 1701 nt, Artificial Sequence
  derived and/or modified CDS sequence (opt3) from hemagglutinin__InfluenzaA__ADM23856
augaaggccauccuggugguccuccuuuacaccuucgcuacaguuaacgcagacacucugugcauuggcuaucacgccaauaacagcacggauaccguggacacaguauuggagaaaaaugugacugucacccauuccgugaacuuacuggaagauaagcacaaugggaaacuauguaagcucagaggaguugcgccccugcaucuugguaaaugcaacauagcuggcuggauccuggggaauccugagugugaaucuuugucaacagccaguagcugguccuacauuguggagaccucuucgucagacaacggaacuugcuauccaggcgauuuuaucgacuacgaagaacucagggagcagcugagcagugucuccucuuucgaacgguuugagauuuucccgaagacaagcuccuggcccaaucacgauucaaacaagggugugaccgcagccuguccucaugcuggggcaaaaaguuuuuauaagaaucugaucuggcucguuaaaaagggaaacagcuacccaaaauuaucuaaguccuauauaaaugacaagcgcaaagaaguacuggugcuuuggggcauccaccaccaaucaacgagcgccgaucagcagaguuuguaccagaacgcugacgccuacgucuucgugggcacuucucgauauuccaagaaauuuaagcccgagauugcgauccguccuaaagugagagaucaagaggggaggaugaauuacuauuggacccuggucgaaccaggagacaagauuacauucgaggcaacugguaaccuaguugugccccgguacgccuuugcuauggaacgcaacgccggcagcgggaucauaauuucggauaccccuguacaugacugcaauacaaccugucagacgccaaaaggagcaaucaacacuucucucccguuccagaauauucaccccaucacaaucggcaagugcccuaaguaugugaaauccaccaagcugagacuugcuacuggucugaggaacgucccaucaauucagagucggggguuguuuggagccauagcgggcuucaucgagggcggguggacaggaaugguggacgguugguacggcuaucaucaccaaaaugaacaggggagcggauacgccgcagaucucaaauccacccagaacgcuauugacaagaucacgaauaaaguuaacucugugauagagaagaugaauacccaguuuacagccgucggcaaggaguucaaccaccuggaaaaacgcauugagaauuuaaacaagaaaguggaugacgguuuccuggauaucuggacuuacaaugcugaacuccuuguacuguuggagaacgaacgaacccuagacuaucaugauagcaauguuaagaaccuguacgagaaagugagaucacaacucaagaacaaugccaaggagaucgggaacggcuguuuugaguucuaucacaaaugcgacaauacauguauggagagugucaagaacggaacuuacgauuaucccaaauacuccgaagaggcaaagcugaauagggaagagauugacggcgugaaacuugagagcacccggaucuaucagauucuggccauauacucuacagucgcuucaaguuuggugcucguugugagccugggggcgaucuccuuuuggaugugcucuaacggaucguuacagugccguauuuguaucuga

SEQ ID NO: 133699 - RNA, 1701 nt, Artificial Sequence; identical to SEQ ID NO: 130717
  derived and/or modified CDS sequence (opt3) from hemagglutinin__InfluenzaA__ADM25945

SEQ ID NO: 133700 - RNA, 1701 nt, Artificial Sequence; identical to SEQ ID NO: 130959
  derived and/or modified CDS sequence (opt3) from hemagglutinin__InfluenzaA__ADM25948

SEQ ID NO: 133701 - RNA, 1701 nt, Artificial Sequence; identical to SEQ ID NO: 132746
  derived and/or modified CDS sequence (opt3) from hemagglutinin__InfluenzaA__ADM26264

SEQ ID NO: 133702 - RNA, 1701 nt, Artificial Sequence; identical to SEQ ID NO: 132746
  derived and/or modified CDS sequence (opt3) from hemagglutinin__InfluenzaA__ADM26265

SEQ ID NO: 133703 - RNA, 1701 nt, Artificial Sequence; identical to SEQ ID NO: 132746
  derived and/or modified CDS sequence (opt3) from hemagglutinin__InfluenzaA__ADM26266

SEQ ID NO: 133704 - RNA, 1701 nt, Artificial Sequence; identical to SEQ ID NO: 132746
  derived and/or modified CDS sequence (opt3) from hemagglutinin__InfluenzaA__ADM26267

SEQ ID NO: 133705 - RNA, 1701 nt, Artificial Sequence
  derived and/or modified CDS sequence (opt3) from hemagglutinin__InfluenzaA__ADM26268
augaaggccauccuggugguccuccuuuacaccuucacaacugcuaacgcagacacgcugugcauuggcuaucacgccaauaacagcaccgauacaguugacacuguguuggagaaaaauguaaccgugacacauuccgucaacuuacuggaagauaagcacaaugggaaacuauguaagcucagaggaguggcgccccugcaucuugguaaaugcaacauagcuggcuggauccuggggaauccugagugugaaucuuugucaaccgccaguagcugguccuacauuguugagacuucuucgucagacaacggaacaugcuauccaggcgauuuuaucgacuacgaagaacucagggagcagcugagcaguguguccucuuucgaacgguuugagauuuucccgaagaccagcuccuggcccaaucacgauucaaacaagggugucacggcagccuguccucaugcuggggcaaaaaguuuuuauaagaaucugaucuggcucgugaaaaagggaaacagcuacccaaaauuaucuaaguccuauauaaaugacaagggcaaagaaguacugguucuuuggggcauccaccaccccucaacuagcgccgaucaacagaguuuguaccagaacgcugacgccuacguguucgucgggaccucucgcuauuccaagaaauuuaagccugagauugcgauccgaccaaaagugcgugagcaggaaggaagaaugaauuacuauuggacacugguggagcccggugauaagauuacuuucgaagcaaccggcaaccuagucguuccuagguacgccuuugcuauggagcggaacgccgggagcggaaucauaauuucggacacaccagugcaugauugcaauaccacgugucaaacuccgaaaggcgcaaucaacacaucucuccccuuccagaauauucacuccaucaccaucgguaagugcccuaaguauguaaaaucaacuaagcugcgccuugcuacagggcugagaaacgugccaaguauucagagcaggggauuguuuggcgccauagcgggcuucaucgaagggggauggaccgguauggucgacggcugguacggguaucaucaccagaaugagcaaggauccggcuacgccgcagaccucaaaucuacgcagaacgcuauugaugagaucaccaauaaggugaacagcguuauagagaaaaugaauacacaguuuacugccguggguaaggaguucaaccaccuggaaaagcggauugagaauuuaaacaaaaaggucgacgauggguuccuggacaucuggaccuacaaugcugaacuccuugugcuguuggagaacgagcgcacacuagauuaucaugacucaaauguuaaaaaccuguacgaaaagguacgaagucagcucaaaaacaaugccaaggagaucggcaacggauguuuugaguucuaucacaagugcgauaauacuuguauggaauccgugaaaaacggcaccuacgacuaucccaaguacagcgaagaggcaaaacugaagagagaggaaauugauggggucaaacuugagucuacaaggaucuaucaaauucuggccauauacucaaccguggcuaguagcuugguccucgugguuucccugggagcgaucucuuuuuggaugugcucgaaugguagcuuacagugccggauuuguaucuga

SEQ ID NO: 133706 - RNA, 1701 nt, Artificial Sequence
  derived and/or modified CDS sequence (opt3) from hemagglutinin__InfluenzaA__ADM26269
augaagaccauccuggugguccuccuuuacacauucacuacggccaacgcugacacccugugcauuggcuaucacgcaaauaacagcacagauacuguugacaccguguuggagaaaaauguaacagugacccauuccgucaacuuacuggaagauaagcacaaugggaaacuauguaagcucagaggaguggcgccccugcaucuugguaaaugcaacauagccggcuggauccuggggaauccugagugugaaucuuugucaacugcuaguagcugguccuacauuguugagacaucuucgucagacaacggaaccugcuauccaggcgauuuuaucgacuacgaagaacucagggagcagcugagcaguguguccucuuucgaacgguuugagauuuucccgaagacgagcuccuggcccaaucacgauucaaacaagggugucacugccgcauguccucaugccggggcuaaaaguuuuuauaagaaucugaucuggcucgugaaaaagggaaacagcuacccaaaauuaucuaaguccuauauaaaugacaagggcaaagaaguacugguucuuuggggcauccaccaccccucaaccagcgcagaucaacagaguuuguaccagaacgccgacgcuuacguguucgucgggacaucucgcuauuccaagaaauuuaagccugagauugccauccgaccaaaagugcgugagcaggaaggaagaaugaauuacuauuggacucugguggagcccggugauaagauuaccuucgaagcgacaggcaaccuagucguuccuagguacgcauuugccauggagcggaacgcugggagcggaaucauaauuucggacaccccagugcaugauugcaauacgacuugucaaacaccgaaaggcgccaucaacaccucucuccccuuccagaauauucacuccaucacuaucgguaagugcccuaaguauguaaaaucaacaaagcugcgccuugcaaccgggcugagaaacgugccaaguauucagagcaggggauuguuuggcgcuauagccggcuucaucgaagggggauggacggguauggucgacggcugguacggguaucaucaccagaaugagcaaggauccggcuacgcggccgaccucaaaucuacccagaacgcaauugaugagaucacaaauaaggugaacagcguuauagagaaaaugaauacucaguuuaccgcuguggguaaggaguucaaccaccuggaaaagcggauugagaauuuaaacaaaaaggucgacgauggguuccuggacaucuggacauacaaugccgaacuccuugugcuguuggagaacgagcgcacucuagauuaucaugacucaaauguuaaaaaccuguacgaaaagguacgaagucagcucaaaaacaaugcuaaggagaucggcaacggauguuuugaguucuaucacaagugcgauaauaccuguauggaauccgugaaaaacggcacauacgacuaucccaaguacagcgaagaggccaaacugaagagagaggaaauugauggggucaaacuugagucuaccaggaucuaucaaauucuggcaauauacucaacuguggccaguagcuugguccucgugguuucccugggagcuaucucuuuuuggaugugcucgaaugguagcuuacagugccggauuuguaucuga

SEQ ID NO: 133707 - RNA, 1701 nt, Artificial Sequence
  derived and/or modified CDS sequence (opt3) from hemagglutinin__InfluenzaA__ADM26270
augaaggccauccuggugguccuccuuuacaccuucacaacugcuaacgcagacacgcugugcauuggcuaucacgccaauaacagcaccgauacaguugacacuguguuggagaaaaauguaaccgugacacauuccgucaacuuacuggaagauaagcacaaugggaaacuauguaagcucagaggaguggcgccccugcaucuugguaaaugcaacauagcuggcuggauccuggggaauccugagugugaaucuuugucaaccgccaguagcugguccuacauuguugagacuucuucgucagacaacggaacaugcuauccaggcgauuuuaucgacuacgaagaacucagggagcagcugagcaguguguccucuuucgaacgguuugagauuuucccgaagaccagcuccuggcccaaucacgauucaaacaagggugucacggcagccuguccucaugcuggggcaaaaaguuuuuauaagaaucugaucuggcucgugaaaaagggaaacagcuacccaaaauuaucuaaguccuauauaaaugacaagggcaaagaaguacugguucuuuggggcauccaccaccccucaacuagcgccgaucaacagaguuuguaccagaacgcugacgccuacguguucgucgggaccucucgcuauuccaagaaauuuaagccugagauugcgauccgaccaaaagugcgugagcaggaaggaagaaugaauuacuauuggacacugguggagcccggugauaagauuacuuucgaagcaaccggcaaccuagucguuccuagguacgccuuugcuauggagcggaacgccgggagcggaaucauaauuucggacacaccagugcaugauugcaauaccacgugucaaacuccgaaaggcgcaaucaacacaucucuccccuuccagaauauucacuccaucaccaucggucgcugcccuaaguauguaaagucaacuaaacugagacuugcuacagggcugaggaacgugccaaguauucagagccggggauuguuuggcgccauagcgggcuucaucgaagggggauggaccgguauggucgacggcugguacggguaucaucaccagaaugagcaaggauccggcuacgccgcagaccucaagucuacgcagaacgcuauugaugagaucaccaauaaagugaacagcguuauagaaaagaugaauacacaguuuacugccguggguaaagaguucaaccaccuggaaaagcgcauugagaauuuaaacaagaaagucgacgauggguuccuggacaucuggaccuacaaugcugaacuccuugugcuguuggagaacgagcgaacacuagaucaucacgacucaaauguaaagaaccuguaugaaaaaguuagaagucagcucaagaacaaugccaaagagaucggcaacggauguuuugaguucuaccauaagugcgauaauacuuguauggaguccgugaagaacggcaccuaugacuaccccaaauauagcgaagaggcaaagcugaauagggaggaaauugauggggucaaacuugagucuacacggaucuaccaaauucuggccauauauucaaccguggcuaguagcuugguccucgugguuucccugggagcgaucucuuuuuggaugugcucgaacgguagcuuacagugccguauuuguaucuga

SEQ ID NO: 133708 - RNA, 1701 nt, Artificial Sequence; identical to SEQ ID NO: 132746
  derived and/or modified CDS sequence (opt3) from hemagglutinin__InfluenzaA__ADM26271

SEQ ID NO: 133709 - RNA, 1701 nt, Artificial Sequence
  derived and/or modified CDS sequence (opt3) from hemagglutinin__InfluenzaA__ADM26272
augaaggccauccuggugguccuccuuuacaccuucacaacugcuaacgcagacacgcugugcauuggcuaucacgccaauaacagcaccgauacaguugacacuguguuggagaaaaauguaaccgugacacauuccgucaacuuacuggaagauaagcacaaugggaaacuauguaagcucagaggaguggcgccccugcaucuugguaaaugcaacauagcuggcuggauccuggggaauccugagugugaaucuuugucaaccgccaguagcugguccuacauuguugagacuucuucgucagacaacggaacaugcuauccaggcgauuuuaucgacuacgaagaacucagggagcagcugagcaguguguccucuuucgaacgguuugagauuuucccgaagaccagcuccuggcccaaucacgauucaaacaagggugucacggcagccuguccucaugcuggggcaaaaaguuuuuauaagaaucugaucuggcucgugaaaaagggaaacagcuacccaaaauuaucuaaguccuauauaaaugacaagggcaaagaaguacugguucuuuggggcauccaccaccccucaacuagcgccgaucaacagaguuuguaccagaacgcugacgccuacguguucgucgggaccucucgcuauuccaagaaauuuaagccugagauugcgauccgaccaaaagugcgugagcaggaaggaagaaugaauuacuauuggacacugguggagcccggugauaagauuacuuucgaagcaaccggcaaccuagucguuccuagguacgccuuugcuauggagcggaacgccgggagcggaaucauaauuucggacacaccagugcaugauugcaauaccacgugucaaacuccgaaaggcgcaaucaacacaucucuccccuuccagaauauucacuccaucaccaucggucgcugcccuaaguauguaaagucaacuaaacugagacuugcuacagggcugaggaacgugccaaguauucagagccggggauuguuuggcgccauagcgggcuucaucgaagggggauggaccgguauggucgacggcugguacggguaucaucaccagaaugagcaaggauccggcuacgccgcagaccucaagucuacgcagaacgcuauugaugagaucaccaauaaagugaacagcguuauagaaaagaugaauacacaguuuacugccguggguaaagaguucaaccaccuggaaaagcgcauugagaauuuaaacaagaaagucgacgauggguuccuggacaucuggaccuacaaugcugaacuccuugugcuguuggagaacgagcgaacacuagauuaucaugacucaaauguaaagaaccuguacgaaaaaguuagaagucagcucaagaacaaugccaaagagaucggcaacggauguuuugaguucuaucacaagugcgauaauacuuguauggaguccgugaagaacggcaccuacgacuaucccaaauacagcgaagaggcaaagcugaauagggaggaaauugauggggucaaacuugagucuacacggaucuaucaaauucuggccauauacucaaccguggcuaguagcuugguccucgugguuucccugggagcgaucucuuuuuggaugugcucgaacgguagcuuacagugccguauuuguaucuga

SEQ ID NO: 133710 - RNA, 1701 nt, Artificial Sequence
  derived and/or modified CDS sequence (opt3) from hemagglutinin__InfluenzaA__ADM26274
augaaggccauccuggugguccuccuuuacaccuucacaacugcuaacgcagacacgcugugcauuggcuaucacgccaauaacagcaccgauacaguugacacuguguuggagaaaaauguaaccgugacacauuccgucaacuuacuggaagauaagcacaaugggaaacuauguaagcucagaggaguggcgccccugcaucuugguaaaugcaacauagcuggcuggauccuggggaauccugagugugaaucuuugucaaccgccaguagcugguccuacauuguugagacuucuucgucagacaacggaacaugcuauccaggcgauuuuaucgacuacgaagaacucagggagcagcugagcaguguguccucuuucgaacgguuugagauuuucccgaagaccagcuccuggcccaaucacgauucaaacaagggugucacggcagccuguccucaugcuggggcaaaaaguuuuuauaagaaucugaucuggcucgugaaaaagggaaacagcuacccaaaauuaucuaaguccuauauaaaugacaagggcaaagaaguacugguucuuuggggcauccaccaccccucaacuagcgccgaucaacagaguuuguaccagaacgcugacgccuacguguucgucgggaccucucgcuauuccaagaaauuuaagccugagauugcgauccgaccaaaagugcgugagcaggaaggaagaaugaauuacuauuggacacugguggagcccggugauaagauuacuuucgaagcaaccggcaaccuagucguuccuagguacgccuuugcuauggagcggaacgccgggagcggaaucauaauuucggacacaccagugcaugauugcaauaccacgugucaaacuccgaaaggcgcaaucaacacaucucuccccuuccagaauauucacuccaucaccaucgguaagugcccuaaguauguaaaaucaacuaagcugcgccuugcuacagggcugagaaacgugccaaguauucagagcaggggauuguuuggcgccauagcgggcuucaucgaagggggauggaccgguauggucgacggcugguacggguaucaucaccagaaugagcaaggauccggcuacgccgcagaccucaaaucuacgcagaacgcuauugaugagaucaccaauaaggugaacagcguuauagaaaagaugaauacacaguuuacugccguggguaaggaguucaaccaccuggaaaagcggauugagaauuuaaacaaaaaggucgacgauggguuccuggacaucuggaccuacaaugcugaacuccuugugcuguuggagaacgagcgcacacuagauuaucaugacucaaauguaaaagaucuguacgaaaagguucgaagucagcucaaaaacaacgccaaggagaucggcaauggauguuuugaguucuaucacaagugcgacaacacuuguauggaguccgugaaaaauggcaccuacgauuaucccaaguacagcgaagaggcaaaacugaacagagaggaaauugacggggucaaacuugagucuacaaggaucuaucaaauucuggccauauacucaaccguggcuaguagcuugguccucgugguuucccugggagcgaucucuuuuuggaugugcucgaaugguagcuuacagugccggauuuguaucuga

SEQ ID NO: 133711 - RNA, 1701 nt, Artificial Sequence; identical to SEQ ID NO: 132746
  derived and/or modified CDS sequence (opt3) from hemagglutinin__InfluenzaA__ADM26276

SEQ ID NO: 133712 - RNA, 1701 nt, Artificial Sequence
  derived and/or modified CDS sequence (opt3) from hemagglutinin__InfluenzaA__ADM26277
augaaggccauccuggugguccuccuuuacaccuucacaacugcuaacgcagacacgcugugcauuggcuaucacgccaauaacagcaccgauacaguugacacuguguuggagaaaaauguaaccgugacacauuccgucaacuuacuggaagauaagcacaaugggaaacuauguaagcucagaggaguggcgccccugcaucuugguaaaugcaacauagcuggcuggauccuggggaauccugagugugaaucuuugucaaccgccaguagcugguccuacauuguugagacuucuucgucagacaacggaacaugcuauccaggcgauuuuaucgacuacgaagaacucagggagcagcugagcaguguguccucuuucgaacgguuugagauuuucccgaagaccagcuccuggcccaaucacgauucaaacaagggugucacggcagccuguccucaugcuggggcaaaaaguuuuuauaagaaucugaucuggcucgugaaaaagggaaacagcuacccaaaauuaucuaaguccuauauaaaugacaagggcaaagaaguacugguucuuuggggcauccaccaccccucaacuagcgccgaucaacagaguuuguaccagaacgcugacgccuacguguucgucgggaccucucgcuauuccaagaaauuuaagccugagauugcgauccgaccaaaagugcgugagcaggaaggaagaaugaauuacuauuggacacugguggagcccggugauaagauuacuuucgaagcaaccggcaaccuagucguuccuagguacgccuuugcuauggagcggaacgccgggagcggaaucauaauuucggacacaccagugcaugauugcaauaccacgugucaaacuccgaaaggcgcaaucaacacaucucuccccuuccagaauauucacuccaucaccaucgguaagugcccuaaguauguaaaaucaacuaagcugcgccuugcuacagggcugagaaacgugccaaguauucagagcaggggauuguuuggcgccauagcgggcuucaucgaagggggauggaccgguauggucgacggcugguacggguaucaucaccagaaugagcaaggauccggcuacgccgcagaccucaaaucuacgcagaacgcuauugaugagaucaccaauaaggugaacagcguuauagaaaagaugaauacacaguuuacugccguggguaaggaguucaaccaccuggaaaagcggauugagaauuuaaacaaaaaggucgacgauggguuccuggacaucuggaccuacaaugcugaacuccuugugcuguuggagaacgagcgcacacuagauuaucaugacucaaauguuaaaaaccuguacgaaaagguacgaagucagcucaaaaacaaugccaaggagaucggcaacggauguuuugaguucuaucacaagugcgauaauacuuguauggaguccgugaaaaacggcaccuacgacuaucccaaguacagcgaagaggcaaaacugaauagagaggaaauugauggggucaaacuugagucuacaaggaucuaucaaauucuggccauauacucaaccguggcuaguagcuugguccucaucgugucccugggagcgauuucuuuuuggaugugcucgaacgguagcuuacagugccggaucuguaucuga

SEQ ID NO: 133713 - RNA, 1701 nt, Artificial Sequence
  derived and/or modified CDS sequence (opt3) from hemagglutinin__InfluenzaA__ADM26278
augaaggccauccuggugguccuccuuuacaccuucacaacugcuaacgcagacacgcugugcauuggcuaucacgccaauaacagcaccgauacaguugacacuguguuggagaaaaauguaaccgugacacauuccgucaacuuacuggaagauaagcacaaugggaaacuauguaagcucagaggaguggcgccccugcaucuugguaaaugcaacauagcuggcuggauccuggggaauccugagugugaaucuuugucaaccgccaguagcugguccuacauuguugagacuucuucgucagacaacggaacaugcuauccaggcgauuuuaucgacuacgaagaacucagggagcagcugagcaguguguccucuuucgaacgguuugagauuuucccgaagaccagcuccuggcccaaucacgauucaaacaagggugucacggcagccuguccucaugcuggggcaaaaaguuuuuauaagaaucugaucuggcucgugaaaaagggaaacagcuacccaaaauuaucuaaguccuauauaaaugacaagggcaaagaaguacugguucuuuggggcauccaccaccccucaacuagcgccgaucaacagaguuuguaccagaacgcugacgccuacgugucugucgggaccucccgcuauagcaagaaauucaagccugagauugcgauccgaccaaaagugcgugagcaggaaggaagaaugaauuacuauuggacacugguggagcccggugauaagauuacuuuugaagcaaccggcaaccuagucguuccuagguucgccuuugcuauggagcggaacgccgggucgggaaucauaauuucugacacaccagugcaugauugcaauaccacgugucaaacuccgaaaggcgcaaucaacacaucccuccccuuccagaauauucacucaaucaccaucgguaagugcccuaaguacguaaaaaguacuaagcugcgccuugcuacagggcugagaaacgugccaagcauucaguccaggggauuguuuggcgccauagcgggcuucaucgaagggggauggaccgguauggucgacggcugguauggguaccaucaccagaaugagcaaggaucuggcuaugccgcagaccucaaaagcacgcagaacgcuauugaugagaucaccaauaaggugaacucaguuauagagaaaaugaauacacaguuuacugccguggguaaggaguucaaccaccuggaaaagcggauugagaauuuaaacaaaaaggucgacgauggguuccuggacaucuggaccuacaaugcugaacuccuugugcuguuggagaacgagcgcacacuagauuaccaugacaguaauguuaaaaaccuguaugaaaagguacgaucccagcucaaaaacaaugccaaggagaucggcaacggauguuuugaguucuaccacaagugcgauaauacuuguauggaaagcgugaaaaacggcaccuaugacuaccccaaguauucugaagaggcaaaacugaagagagaggaaauugauggggucaaacuugagucaacaaggaucuaccaaauucuggccauauauaguaccguggcuagcuccuugguccucgugguuucucugggagcgaucucguuuuggaugugcagcaaugguuccuuacagugccggauuuguaucuga

SEQ ID NO: 133714 - RNA, 1701 nt, Artificial Sequence
  derived and/or modified CDS sequence (opt3) from hemagglutinin__InfluenzaA__ADM26279
augaaggccauccuggugguccuccuuuacaccuucacaacugcuaacgcagacacgcugugcauuggcuaucacgccaauaacagcaccgauacaguugacacuguguuggagaaaaauguaaccgugacacauuccgucaacuuacuggaagauaagcacaaugggaaacuauguaagcucagaggaguggcgccccugcaucuugguaaaugcaacauagcuggcuggauccuggggaauccugagugugaaucuuugucaaccgccaguagcugguccuacauuguugagacuucuucgucagacaacggaacaugcuauccaggcgauuuuaucgacuacgaagaacucagggagcagcugagcaguguguccucuuucgaacgguuugagauuuucccgaagaccagcuccuggcccaaucacgauucaaacaagggugucacggcagccuguccucaugcuggggcaaaaaguuuuuauaagaaucugaucuggcucgugaaaaagggaaacagcuacccaaaauuaucuaaguccuauauaaaugacaagggcaaagaaguacugguucuuuggggcauccaccaccccucaacuagcgccgaucaacagaguuuguaccagaacgcugacgccuacguguucgucgggaccucucgcuauuccaagaaauuuaagccugagauugcgauccgaccaaaagugcguggacaggaggguagaaugaauuacuauuggacacugguggaacccggcgauaagauuacuuucgaggcaaccgggaaccuagucguuccuagguacgccuuugcuauggaacggaacgccggaagcggcaucauaauuucggacacaccagugcaugauugcaauaccacgugucaaacuccgaaaggugcaaucaacacaucucuccccuuccagaauauucacuccaucaccaucgggaagugcccuaaguauguaaaaucaacuaagcugcgccuugcuacaggacugagaaacgugccaaguauucagagcaggggcuuguuuggcgccauagcgggguucaucgagggagguuggaccggcauggucgacgggugguacggauaucaucaccagaaugaacaaggcuccgguuacgccgcagaccucaaaucuacgcagaacgcuauugaugagaucaccaauaaggugaacagcguuauagagaaaaugaauacacaguuuacugccguggggaaggaguucaaccaccuggagaagcggauugaaaauuuaaacaaaaaggucgacgauggcuuccuggacaucuggaccuacaaugcugagcuccuugugcuguuggaaaacgagcgcacacuagauuaucaugacucaaauguaaagaaccuguacgagaagguucgaagucagcucaaaaacaaugccaaggaaaucggaaacggcuguuuugaguucuaucacaagugcgauaauacuuguauggaauccgugaaaaacgggaccuacgacuaucccaaguacagcgaggaagcaaaacugaauagagaggagauugauggagucaaacuugaaucuacaaggaucuaucaaauucuggccauauacucaaccguggcuaguagcuugguccucgugguuucccugggugcgaucucuuuuuggaugugcucgaacggcagcuuacagugccggauuuguaucuga

SEQ ID NO: 133715 - RNA, 1701 nt, Artificial Sequence; identical to SEQ ID NO: 132746
  derived and/or modified CDS sequence (opt3) from hemagglutinin__InfluenzaA__ADM26280

SEQ ID NO: 133716 - RNA, 1701 nt, Artificial Sequence
  derived and/or modified CDS sequence (opt3) from hemagglutinin__InfluenzaA__ADM26281
augaaggccauccuggugguccuccuuuacaccuucgcuacagcaaacgccgacacucugugcauuggcuaucacgcgaauaacagcacggauaccguugacacaguguuggagaaaaauguaacugugacccauuccgucaacuuacuggaagauaagcacaaugggaaacuauguaagcucagaggaguggcuccccugcaucuugguaaaugcaacauagccggcuggauccuggggaauccugagugugaaucuuugucaacagcaaguagcugguccuacauuguugagaccucuucgucagacaacggaacuugcuauccaggcgauuuuaucgacuacgaggagcucagggagcagcugagcaguguguccucuuucgaacgguuugagauuuucccgaagacaagcuccuggcccaaucacgauucaaacaagggugucaccgccgcuuguccucaugcaggggccaaaaguuuuuauaagaaucugaucuggcucgugaaaaagggaaacagcuacccaaaauuaucuaaguccuauauaaaugacaagggcaaagaaguacugguucuuuggggcauccaccaccccucaacgagcgcugaucaacagaguuuguaccagaacgccgacgcguacguguucgucgggacuucucgcuauuccaagaaauuuaagccugagauugcaauccgaccaaaagugcgugaucaggagggaagaaugaauuacuauuggacccugguggaacccggugacaagauuacauucgaggccacuggcaaccuagucguuccuagguacgcuuuugccauggaacggaacgcagggagcggaaucauaauuucggauaccccagugcaugacugcaauacaaccugucaaacgccgaaaggcgcuaucaacacuucucuccccuuccaguccauucacccuaucacaaucgguaagugcccaaaguauguaaaaucaaccaagcugcgccuugccacugggcugagaaaugugcccaguauucagagcaggggauuguuuggcgcgauagccggcuucaucgaagggggauggacagguauggucgacggcugguacggguaucaucaccagaacgaacaaggauccggcuacgcagcugaucucaaaucuacccagaaugccauugacaagaucacgaacaaagugaauagcguuauagagaagaugaacacccaguuuacagcuguggguaaggaguucaaucaccuggaacggcgcauugagaacuuaaauaaaaaggucgaugacggguuccuggauaucuggacuuacaacgccgaacuccuugugcuguuggagaaugaacgaacccuagacuaucaugauucaaacguaaagaaucuguacgagaagguuagaagucagcucaaaaacaacgcaaaggagaucggcaauggauguuuugaguucuaucacaagugcgacaacacauguauggaauccgugaaaaauggcacuuacgauuauccuaaguacagcgaagaggccaaacugaacagggaagagauugacggggucaaacuugagucuacccggguguaucaaauccuggcuauuuacucaacagucgcgaguagcuuggugcucguugugucccugggagcaauaucuuuuuggaugugcucgaaugguagcuuacagugccguaucuguauuuga

SEQ ID NO: 133717 - RNA, 1701 nt, Artificial Sequence
  derived and/or modified CDS sequence (opt3) from hemagglutinin__InfluenzaA__ADM26282
augaaggccauccuggugguccuccuuuacaccuucacaacugcuaacgcagacacgcugugcauuggcuaucacgccaauaacagcaccgauacaguugacacuguguuggagaaaaauguaaccgugacacauuccgucaacuuacuggaagauaagcacaaugggaaacuauguaagcucagaggaguggcgccccugcaucuugguaaaugcaacauagcuggcuggauccuggggaauccugagugugaaucuuugucaaccgccaguagcugguccuacauuguugagacuucuucgucagacaacggaacaugcuauccaggcgauuuuaucgacuacgaagaacucagggagcagcugagcaguguguccucuuucgaacgguuugagauuuucccgaagaccagcuccuggcccaaucacgauucaaacaagggugucacggcagccuguccucaugcuggggcaaaaaguuuuuauaagaaucugaucuggcucgugaaaaagggaaacagcuacccaaaauuaucuaaguccuauauaaaugacaagggcaaagaaguacugguucuuuggggcauccaccaccccucaacuagcgccgaucaacagaguuuguaccagaacgcugacgccuacguguucgucgggaccucucgcuauuccaagaaauuuaagccugagauugcgauccgaccaaaagugcgugagcaggaaggaagaaugaauuacuauuggacacugguggagcccggugauaagauuacuuucgaagcaaccggcaaccuagucguuccuagguacgccuuugcuauggagcggaacgccgggagcggaaucauaauuucggacacaccagugcaugauugcaauaccacgugucaaacuccgaaaggcgcaaucaacacaucucuccccuuccagaauauucacuccaucaccaucgguaagugcccuaaguauguaaaaucaacuaagcugcgccuugcuacagggcugagaaacgugccaaguauucagagcaggggauuguuuggcgccauagcgggcuucaucgaagggggauggaccgguauggucgacggcugguacggguaucaucaccagaaugagcaaggauccggcuacgccgcagaccucaaaucuacgcagaacgcuauugaugagaucaccaauaaggugaacagcguuauagagaaaaugaauacacaguuuacugccguggguaaggaguucaaccaccuggaacggcgcauugagaauuuaaacaagaaagucgacgauggguuccuggacaucuggaccuacaaugcugaacuccuugugcuguuggagaacgagcgaacacuagauuaucaugacucaaauguaaagaaccuguacgaaaaaguuagaagucagcucaagaacaaugccaaagagaucggcaacggauguuuugaguucuaucacaagugcgauaauacuuguauggaauccgugaagaacggcaccuacgacuaucccaaauacagcgaagaggcaaagcugaauagggaggaaauugauggggucaaacuugagucuacacggaucuaucaaauucuggccauauacucaaccguggcuaguagcuugguccucgugguuucccugggagcgaucucuuuuuggaugugcucgaacgguagcuuacagugccguauuuguaucuga

SEQ ID NO: 133718 - RNA, 1701 nt, Artificial Sequence
  derived and/or modified CDS sequence (opt3) from hemagglutinin__InfluenzaA__ADM26283
augaaggccauccuggugguccuccuuuacaccuucacaacugcuaacgcagacacgcugugcauuggcuaucacgccaauaacagcaccgauacaguugacacuguguuggagaaaaauguaaccgugacacauuccgucaacuuacuggaagauaagcacaaugggaaacuauguaagcucagaggaguggcgccccugcaucuugguaaaugcaacauagcuggcuggauccuggggaauccugagugugaaucuuugucaaccgccaguagcugguccuacauuguugagacuucuucgucagacaacggaacaugcuauccaggcgauuuuaucgacuacgaagaacucagggagcagcugagcaguguguccucuuucgaacgguuugagauuuucccgaagaccagcuccuggcccaaucacgauucaaacaagggugucacggcagccuguccucaugcuggggcaaaaaguuuuuauaagaaucugaucuggcucgugaaaaagggaaacagcuacccaaaauuaucuaaguccuauauaaaugacaagggcaaagaaguacugguucuuuggggcauccaccaccccucaacuagcgccgaucaacagaguuuguaccagaacgcugacgccuacguguucgucgggaccucucgcuauuccaagaaauuuaagccugagauugcgauccgaccaaaagugcgugagcaggaaggaagaaugaauuacuauuggacacugguggagcccggugauaagauuacuuucgaagcaaccggcaaccuagucguuccuagguacgccuuugcuauggagcggaacgccgggagcggaaucauaauuucggacacaccagugcaugauugcaauaccacgugucaaacuccgaaaggcgcaaucaacacaucucuccccuuccagaauauucacuccaucaccaucgguaagugcccuaaguauguaaaaucaacuaagcugcgccuugcuacagggcugagaaacgugccaaguauucagagcaggggauuguuuggcgccauagcgggcuucaucgaagggggauggaccgguauggucgacggcugguacggguaucaucaccagaaugagcaaggauccggcuacgccgcagaccucaaaucuacgcagaacgcuauugaugagaucaccaauaaggugaacagcguuauagagaaaaugaauacacaguuuacugccguggguaaggaguucaaccaccuggaaaagcggauugagaauuuaaacaaaaaggucgacgauggguuccuggacaucuggaccuacaaugcugaacuccuugugcuguuggagaacgagcgcacacuagauuaucaugacucaaauguuaaaaaccuguacgaaaagguacgaagucagcucaaaaacaaugccaaggagaucggcaacggauguuuugaguucuaucacaagugcgauaauacuuguauggaauccgugaaaaacggcaccuacgacuaucccaaguacagcgaagaggcaaaacugaauagagagaagauugauggggucaaacuugaaucuacaaggaucuaucaaauucuggccauauacucaaccguggcuaguagcuugguccucgugguuucccugggagcgaucucuuuuuggaugugcucgaacgguagcuuacagugccggauuuguaucuga

SEQ ID NO: 133719 - RNA, 1701 nt, Artificial Sequence; identical to SEQ ID NO: 132746
  derived and/or modified CDS sequence (opt3) from hemagglutinin__InfluenzaA__ADM26284

SEQ ID NO: 133720 - RNA, 1701 nt, Artificial Sequence; identical to SEQ ID NO: 132746
  derived and/or modified CDS sequence (opt3) from hemagglutinin__InfluenzaA__ADM26285

SEQ ID NO: 133721 - RNA, 1701 nt, Artificial Sequence
  derived and/or modified CDS sequence (opt3) from hemagglutinin__InfluenzaA__ADM26784
augaagaccaucauugcccugagcuacauacucugccuuguguucgcucagaaacugcccggcaacgacaauuccacagcaacuuuguguuuagggcaccaugccgucccuaacggaacgaucguuaagaccauuacaaaugaucaaaucgaggugacuaacgcgaccgaacugguacagucuucaaguacaggugagauuugcgacagcccacaccagauccuagauggcgaaaauuguacccucauagacgcucugcuuggggauccgcagugcgacggauuucaaaacaaaaagugggaucuguucguggagagauccaaagccuauucuaauuguuaccccuaugacgucccugauuacgcaucguugaggucacucguggccagcaguggcacucuggaauuuaacaaugaguccuucaacuggacagguguuacccagaaugggacgucuagcgcuugcaugcggcgcuccaacaauucauuuuucagucgacugaacuggcucacucauuuaaaguuuaaguauccagcacugaaugugaccaugcccaacaacgagcaguucgacaaacuuuacaucuggggaguccaccauccuggcacagauaaugaccagaucuuuuuguaugcccaagcuagcggccguauuacugugucuaccaagagaucccagcagacaguaauuccaaacaucgggucaaggccccggguucgcaauauaccuagcagaauuaguaucuacuggaccauugugaaaccaggagauauccugcuaaucaacucuacggguaaucucauugccccgaggggcuacuucaagauacgguccgggaaaagcucgaucaugcgcucugacgcgcccauuggaaaguguaacuccgaaugcaucacuccuaauggcucaauaccaaacgacaagcccuuucagaaugucaaccgaauuacauauggugcauguccuagauacgugaaacaaaauacccugaagcuggccacugggaugaggaacgugccagagaaacagacacggggaaucuucggcgcuaucgccggcuuuauugaaaaugggugggagggaauggucgaugguugguauggcuuccgucaccagaacagugaggggcgcggacaagcagcugaccuuaagagcacccaggccgcgaucgaucagauuaauggcaaauugaacagacucauagguaagacgaacgaaaaauuccaccagaucgagaaggaauuuuccgagguugaagggaggauucaagaccuggagaaguacguggaggauaccaaaaucgacuuauggucuuauaaugccgaacugcucguagcacuugagaaccagcauacaaucgaucugacugacagcgaaaugaauaaguuguucgagaaaaccaagaaacagcuacgggaaaacgcugaggauaugggcaauggaugcuuuaagauuuaccacaagugugacaacgccugcauaggcucaauccgaaaugggacauaugaucaugacguguaccgcgacgaggcucugaacaauagauuccagauuaaaggagucgaacucaagagugguuacaaagauuggauccuguggauuuccuuugccaucagcugcuuccuucuguguguggcauugcucggcuuuauaaugugggccugccaaaaggggaacaucagguguaauauuugcaucuga

SEQ ID NO: 133722 - RNA, 1701 nt, Artificial Sequence; identical to SEQ ID NO: 130482
  derived and/or modified CDS sequence (opt3) from hemagglutinin__InfluenzaA__ADM26795

SEQ ID NO: 133723 - RNA, 1701 nt, Artificial Sequence
  derived and/or modified CDS sequence (opt3) from hemagglutinin__InfluenzaA__ADM26817
augaagaccacaaucgcccugagccacauucucugccuuguguucgcucagaaacugcccggcaacgacaauuccacugcaacguuguguuuagggcaucacgccgucccuaacggaaccauaguuaagacaaucacuaaugaucaaauugaggugaccaacgcgacagaacugguacagucuucaagugcuggugagaucugcgacagcccacaucagauucuagauggcgaaaauuguacccucaucgacgcccugcuuggggauccgcagugcgacggauuucaaaacaaaaagugggaucuguucguggagagaaggcgggcauacuccaauuguuaucccuacgacgucccugauuaugccucuuugcgcucgcucguggcuucaagcggcacucuggaauuuaacaaugagaguuucaacuggacagguguuacccagaaugggacguccucugcaugcauacgacguagcaacaauuccuuuuucucaagacugaacuggcucacucacuuaaauuuuaaauacccagcccugaacgugaccaugcccaacaaugagcaguucgacaaguuguauaucuggggaguccaucacccuggcacagauaaggaccagauuuuucuuuacgcucaagccaguggcaggaucacugugagcaccaaacggucucagcaggcgguaauuccaaacaucgggucccgccccagaguuaggaauauaccuucacggauuagcaucuauuggacaauugugaagccaggagauauccugcuaaucaacaguaccgguaaucucauugcaccgcgcggcuacuucaaaauacgaucugggaaguccagcaucaugagaucggacgcccccauuggaaaauguaacucugaaugcaucacgccuaauggcuccauaccaaacgacaagcccuuucagaaugucaacaggauuacuuacggugcuuguccucgguaugugaagcaaucaacacugaaacuugccaccgggaugcguaaugugccagagaagcagacucgcggaaucuucggcgcaaucgcuggcuuuauugaaaacgggugggagggaauggucgaugguugguacggcuucagacaccagaauagugaggggaggggacaagccgcggaccugaaaagcacacaggccgcaaucgaucagauuaacggcaaguugaaucggcucauagguaaaaccaacgaaaaguuccaucagaucgagaaagaauuuuccgagguugaagggcgcauucaagaccuggagaaguauguggaggauacgaagaucgacuuauggucuuacaacgcugaacugcucguagcccuugagaaucagcacaccaucgaucugacagacagcgaaaugaacaaauuguucgagaagacuaaaaagcagcuacgagaaaaugcugaggauaugggcaacggaugcuuuaaaauuuaucauaagugugacaaugccugcauaggcucaaucagaaacgggaccuacgaucacgacguguauagggacgaggcacugaauaaccgguuccagauuaagggagucgaacucaaaagugguuacaaggauuggauccuguggauuuccuuugccaucagcugcuuccuucuguguguggcuuugcucggcuuuauaaugugggcgugccaaaaagggaauauccgcuguaacauuugcaucuga

SEQ ID NO: 133724 - RNA, 1704 nt, Artificial Sequence
  derived and/or modified CDS sequence (opt3) from hemagglutinin__InfluenzaA__ADM31424
auggagaagaucgugcuccuguucaccacaauuagccuugucaaauccgaccacauaugcaucggcuaccaugccaacaauucuacugaacagguugauacgauuauggagaagaacgugaccguaacacacgcucaagacauccuggaaaagacucauaaugggaaguugugugauuuaaacggagugaaaccccugauucuaaaggacugcucagucgcagguuggcuccugggcaauccucuuugugaugaguuuaucaacgugccagaauggaguuauauaguugagaaggccaauccggcgaacgaccugugcuaccccgggaauuucaacgauuaugaggaauugaaacaccuccugagcagaaucaaucauuuugagaagauucagaucauuccuaaagacuccuggucugaucacgaggcuucgcugggagugucagccgcauguagcuaccagggcaacaguuccuucuuuaggaaugucguguggcucaucaagaaagacaacgccuauccaaccauaaagaaggauuacaauaacacaaaccaggaagacuuacugguacuuugggguauucaccaucccaaugaugaggcugaacaaacccgguuguaucagaacccuacuacauacaucucuauugggaccagcacgcugaaucagcgccuaguuccaaaaaucgcaacucgauccaagaucaacggacagucaggccguauugacuucuuuuggaccauacucaaacccaaugacgccauccacuucgagaguaacggcaauuuuauugcuccugaauacgccuauaagaucgugaaaaagggggauagcacaauaaugaaaucugaggucgaauacggaaacugcaauacuagaugucaaaccccaauuggugcgaucaacuccucaaugccguuccauaauauccacccccugacaauuggcgagugcccuaaguaugugaaaagcaacaaacuugugcuggcaaccggguugaggaauaguccacagcgggagcgcagaaggaagcggggacucuuuggcgccaucgcugguuucauugaagggggauggcagggcauggucgacggcugguacggguaucaccauucuaacgagcagggauccgguuacgccgcagauaaagaaagcacgcaaaaggcuauagacggcguuacuaauaaagugaacucgaucauugauaagaugaacacacaguuugaggccguagggcgcgaguucaauaaccuggaacgaagaaucgagaauuuaaacaagaaaauggaagacggauuccuggauguguggaccuauaaugcggagcuccuuguccugauggaaaacgagaggacuuuggacuuucacgauucuaaugugaagaaccuauacgacaaaguucggcugcagcucaaggauaaugccaaagaacugggcaacgguuguuucgaguuuuaccauaagugcaauaacgaguguauggaauccgugcguaaugggacauaugacuacccccaauauucagaggaagcacgccuuaagagagaggagaucaguggcgucaaacuggaaagcauuggaauauaccagaucuuguccauuuauucuaccguggcuagcucacucguacuggccaucaugauggcuggcuuaagucuguggaugugcuccaacgggagccuacagugcaggauuuguaucuga

SEQ ID NO: 133725 - RNA, 1701 nt, Artificial Sequence; identical to SEQ ID NO: 133318
  derived and/or modified CDS sequence (opt3) from hemagglutinin__InfluenzaA__ADM31478

SEQ ID NO: 133726 - RNA, 1701 nt, Artificial Sequence
  derived and/or modified CDS sequence (opt3) from hemagglutinin__InfluenzaA__ADM31488
augaaggccauccuggugguccuccuuuacaccuucgcuacagcaaacgccgacacucugugcauuggcuaucacgcgaauaacagcacggauaccguugacacaguguuggagaaaaauguaacugugacccauuccgucaacauauuagaagauaagcacaaugggaaacuguguaagcuaagaggaguggcuccccuccaucuggguaaaugcaacaucgccggcuggauucuugggaauccugagugugaaucucugucaacagcaaguagcugguccuacaucguugagaccucuucgucagacaacggaacuugcuauccaggcgauuuuauugacuacgaagaguugagggagcagcucagcaguguguccucuuucgaacgguuugagaucuucccgaagacaagcuccuggcccaaucacgauucaaacaagggugucaccgccgcuuguccucaugcaggggccaaaaguuuuuauaagaaucugauauggcuggugaaaaagggaaacagcuacccaaaacucucuaaguccuauaucaaugacaagggcaaagaaguauuaguucuguggggcauucaccaccccucaacgagcgcugaucaacagagucuuuaccagaacgccgacgcguacguguucgucgggucuuccaaguauagcaaaaaguuuaaaccugagaucgcaauucgcccaaaggugcgagaucaggagggacguaugaauuacuauuggacuuugguggaacccggugacaaaaucaccuucgaggccacaggcaaccuggucguuccuagauacgcuuuugccauggaaaggaacgcagggucgggaauaauuaucucugauacuccagugcaugacugcaauaccacaugucaaaccccgaagggcgcuauuaacacgucccuacccuuccagaauauccacccuaucacuauugguaagugcccaaaauauguaaagucaacaaaacuccggcuggccaccgggcuucgcaacgugcccaguauacagagcagaggacuguuuggcgcgaucgccggcuucauugaagggggauggacugguauggucgacggcugguacggguaucaucaccagaaugaacaaggauccggcuacgcagcugauuugaagucuacacagaacgccaucgacgagauaaccaauaaagugaacagcguuauugagaagaugaauacgcaguuuaccgcuguggguaaggaguucaaccaccucgagaaaaggaucgaaaaucugaacaagaaagucgaugacggguucuuagauaucuggacauacaaugccgagcugcucgugcuucuggaaaacgagcggacuuuggacuaucaugauucaaauguaaagaaccuauacgagaaaguucgcagucagcugaagaacaaugcaaaggaagugggcaacggauguuuugaguucuaucacaaaugcgacaauaccuguauggaauccgucaagaacggcacauacgauuauccuaaauacagcgaggaagccaagcucaaucgagaggagauugacggggugaaacuggaaucuacuagaaucuaucaaauucuugcuauauacucaaccgcggcaaguagccuggucuuggugguuucccucggagccaucucuuuuuggaugugcucgaacgguagccugcagugcaggauuuguaucuga

SEQ ID NO: 133727 - RNA, 1701 nt, Artificial Sequence
  derived and/or modified CDS sequence (opt3) from hemagglutinin__InfluenzaA__ADM31498
augaaggccauccuggugguccuccuuuacaccuucgcuacagcaaacgccgacacucugugcauuggcuaucacgcgaauaacagcacggauaccguugacacaguguuggagaaaaauguaacugugacccauuccgucaacuuacuggaagauaagcacaaugggaaacuauguaagcucagaggaguggcuccccugcaucuugguaaaugcaacauagccggcuggauccuggggaauccugagugugaaucuuugucaacagcaaguagcugguccuacauuguugagaccucuucgucagacaacggaacuugcuauccaggcgauuuuaucgacuacgaagaacucagggagcagcugagcaguguguccucuuucgaacgguuugagauuuucccgaagacaagcuccuggcccaaucacgauucaaacaagggugucaccgccgcuuguccucaugcaggggccaaaaguuuuuauaagaaucugaucuggcucgugaaaaagggaaacagcuacccaaaauuaucuaaguccuauauaaaugacaagggcaaagaaguacugguucuuuggggcauccaccaccccucaacgagcgcugaucaacagaguuuguaccagaacgccgacgcguacguguucgucgggacuucucgcuauuccaagaaauuuaagccugagauugcaauccgaccaaaagugcgugaucaggagggaagaaugaauuacuauuggacccuggugaagcccggugacaaaauuacauucgaagccacuggcaaccuagucguuccuagguacgcuuuugccauggagcggaacgcagggagcggaaucauaauuucggauaccccagugcaugacugcaauacaaccugucaaacgccgaagggcgcuaucaacacuucucuccccuuccagaauauucacccuaucacaaucgguaagugcccaaaauauguaaaguccaccaaacugcgccuugccacugggcugagaaacgugcccucaauucagaguaggggauuguuuggcgcgauagccggcuucaucgaagggggauggacagguauggucgacggcugguacggguaucaucaccagaaugagcaaggaagcggcuacgcagcugaucucaaguccacccagcacgccauugacgaaaucacgaacaaaguuaauucugugauagagaagaugaacacccaguuuacagcuguggguaaggaguucaaucaucuggaaaaacggauugagaacuuaaauaagaaagucgaugacggguuccuggauaucuggacuuacaacgccgaacuccuugugcuguuggagaaugaacgcacccuagacuaucacgauagcaacguaaagaaucuguacgagaaaguucgaucacagcucaagaacaacgcaaaggagaucggcaauggauguuuugaguucuaucauaaaugcgacaacacauguauggagagugugaagaauggcacuuacgauuauccuaaauacuccgaagaggccaagcugaacagagaagagauugacggggucaaacuugagagcaccaggaucuaucaaauucuggcuauauacucuacaguggcgucaaguuugguccucgugguuagccugggagcaaucuccuuuuggaugugcucuaaugguucguuacagugccggauuuguaucuga

SEQ ID NO: 133728 - RNA, 1701 nt, Artificial Sequence
  derived and/or modified CDS sequence (opt3) from hemagglutinin__InfluenzaA__ADM31508
augaaggccauccuggugguccuccuuuacaccuucgcuacagcaaacgccgacacucugugcauuggcuaucacgcgaauaacagcacggauaccguugacacaguguuggagaaaaauguaacugugacccauuccgucaacuuacuggaagauaagcacaaugggaaacuauguaagcucagaggaguggcuccccugcaucuugguaaaugcaacauagccggcuggauccuggggaauccugagugugaaucuuugucaacagcaaguagcugguccuacauuguugagaccucuucgucagacaacggaacuugcuauccaggcgauuuuaucgacuacgaggagcucagggagcagcugagcaguguguccucuuucgaacgguuugagauuuucccgaagacacgcagcuggcccaaucacgauuccaacaagggugucaccgccgcuuguccucaugcaggggccaaaucauuuuauaagagucugaucuggcucgugaaaaagggaaauagcuacccaaaauuaucuaaguccuauauaaacgacaagggcaaagaaguacugguucuuuggggcauccaccaccccucaacgagcgcugaucaacagaguuuguaccagaaugccgacgcguacguguucgucgggacuucucgauauuccaagaaauuuaagccugagauugcaauccguccaaaagugagagaucaggagggaaggaugaacuacuauuggacccugguggaacccggugacaagauuacauucgaggccacuggcaaucuagucguuccucgguacgcuuuugccauggaacgcaacgcagggagcggaaucauaauuucggauaccccagugcaugacugcaacacaaccugucaaacgccgaaaggcgcuaucaauacuucucuccccuuccagaacauucacccuaucacaaucgguaagugcccaaaguauguaaaauccaccaagcugagacuugccacugggcugaggaaugugcccucaauucagagucggggauuguuuggcgcgauagccggcuucaucgaagggggauggacagguauggucgacggcugguacggguaucaucaccagaacgaacaaggaagcggcuacgcagcugaucucaaauccacccagcacgccauugacgagaucacgaauaaggugaacucuguuauagagaaaaugaauacccaguuuacagcuguggguaaggaguucaaccaucuggaaaagcgcauugaaaauuuaaacaaaaaggucgaugacggguuccuggauaucuggacuuacaaugccgagcuccuugugcuguuggaaaacgagcgaacccuagacuaucacgauagcaauguaaagaaccuguacgagaagguuagaucacagcucaaaaauaacgcaaaggaaaucggcaacggauguuuugaguucuaucauaagugcgacaauacauguauggaaagugugaaaaacggcacuuacgauuauccuaaguacuccgaggaagccaaacugaauagggaggagauugacggggucaaacuugaaagcacccggaucuaucaaauucuggcuauauacucuacaguggcgucaaguuugguccucgugguuagccugggagcaaucuccuuuuggaugugcucuaacgguucguuacagugccguauuuguaucuga

SEQ ID NO: 133729 - RNA, 1701 nt, Artificial Sequence
  derived and/or modified CDS sequence (opt3) from hemagglutinin__InfluenzaA__ADM31518
augaaggccauccuggugguccuccuuuacaccuucgcuacagcaaacgccgacacucugugcauuggcuaucacgcgaauaacagcacggauaccguugacacaguguuggagaaaaauguaacugugacccauuccgucaacuuacuggaagauaagcacaaugggaaacuauguaagcucagaggaguggcuccccugcaucuugguaaaugcaacauagccggcuggauccuggggaauccugagugugaaucuuugucaacagcaaguagcugguccuacauuguugagaccucuucgucagacaacggaacuugcuauccaggcgauuuuaucgacuacgaggagcucagggagcagcugagcaguguguccucuuucgaacgguuugagauuuucccgaagacaagcuccuggcccaaucacgauucaaacaagggugucaccgccgcuuguccucaugcaggggccaaaaguuuuuauaagaaucugaucuggcucgugaaaaagggaaacagcuacccaaaauuaucuaaguccuauguaaaugacaagggcaaagaaguucuggugcuuuggggcauacaccaccccucaacgagcgcugaucaacagaguuuguaccagaacgccgacgcguacgucuucguggggacuucucgcuauuccaagaaauuuaagccugagaucgcaauucgaccaaaagugcgugaucaggagggaagaaugaauuacuauuggacccuggucgaacccggugacaagaucacauucgaggccacuggcaaccuaguugugccuagguacgcuuuugccauggaacggaacgcagggagcggaauuaucauaucggauaccccaguacaugacugcaauacaaccugucaaacgccgaaaggcgcuauuaacacuucucuccccuuccagaauauccacccuauuacaaucgguaagugcccaaaguaugugaaauccaccaagcugcgccuugccacugggcugagaaacauccccucaauucagaguaggggauuguuuggcgcgauagccggcuucaucgaagggggauggacagguauggucgacggcugguacggguaucaucaccagaaugaacaaggaagcggcuacgcagcugaucucaaauccacccagaacgccauugacgagaucacgaauaaggugaacucuguuauagagaaaaugaauacccaguuuacagcuguggguaaggaguucaaccaccuggaaaagcggauugaaaauuuaaacaaaaaggucgaugacggguuccuggauaucuggacuuacaaugccgagcuccuugugcuguuggaaaacgagcgcacccuagacuaucaugauagcaauguaaagaaccuguacgagaagguucgaucacagcucaaaaacaaugcaaaggaaaucggcaacggauguuuugaguucuaucacaagugcgacaauacauguauggaaagugugaaaaacggcacuuacgauuauccuaaguacuccgaggaagccaaacugaauagagaggagauugacggggucaaacuugaaagcaccaggaucuaucaaauucuggcuauauacucuacaguggcgucaaguuugguccucgugguuagccugggagcaaucuccuuuuggaugugcucuaacgguucguuacagugccggauuuguaucuga

SEQ ID NO: 133730 - RNA, 1701 nt, Artificial Sequence
  derived and/or modified CDS sequence (opt3) from hemagglutinin__InfluenzaA__ADM31528
augaaggccauccuggugguccuccuuuacaccuucgcuacagcaaacgccgacacucugugcauuggcuaucacgcgaauaacagcacggauaccguugacacaguguuggagaaaaauguaacugugacccauuccgucaacuuacuggaagauaagcacaaugggaaacuauguaagcucagaggaguggcuccccugcaucuugguaaaugcaacauagccggcuggauccuggggaauccugagugugaaucuuugucaacagcaaguagcugguccuacauuguugagaccucuucgucagacaacggaacuugcuauccaggcgauuuuaucgacuacgaggagcucagggagcagcugagcaguguguccucuuucgaacgguuugagauguucccgaagacaagcuccuggcccaaucacgauucaaacaagggugucaccgccgcuuguccucaugcaggggccaaaaguuuuuauaagaaucugauuuggcucgugaaaaagggaaacagcuacccaaaauuaucuaaguccuauaucaaugacaagggcaaagaaguacugguucuuuggggcauacaccaccccucaacgagcgcugaucaacagaguuuguaccagaacgccgacgcguacguguucgucgggacuucucgcuauuccaagaaauuuaagccugagaucgcaauucgaccaaaagugcgugaucaggagggaagaaugaauuacuauuggacccugguggaacccggugacaagaucacauucgaggccacuggcaaccuagucguuccuagguacgcuuuugccauggaacggaacgcagggagcggaauuaucauaucggauaccccagugcaugacugcaauacaaccugucaaacgccgaaaggcgcuauuaacacuucucuccccuuccagaauauccacccuauuacaaucgguaagugcccaaaguauguaaaauccaccaagcugcgccuugccacugggcugagaaacgugcccucaauccagaguaggggauuguuuggcgcgauugccggcuucauagaagggggauggacagguauggucgacggcugguacggguaucaucaccagaaugaacaaggaagcggcuacgcagcugaucucaaauccacccagaacgccaucgacaagauuacgaauaaagugaacucuguuaucgagaagaugaauacccaguuuacagcuguggguaaggaguucaaccaccuggaaaaacggauagagaauuuaaacaagaaagucgaugacggguuccuggauauuuggacuuacaaugccgaacuccuugugcuguuggagaacgaacgcacccuagacuaucaugauagcaauguaaagaaccuguacgagaaaguucgaucacagcucaagaacaaugcaaaggaggugggcaacggauguuuugaguucuaucacaaaugcgacaauacauguauggaaagugucaagaacggcacuuacgauuauccuaaauacuccgaagaggccaagcugaauagagaagagaucgacggggugaaacuugagagcaccaggaucuaucaaauucuggcuaucuacucuacagucgcgucaaguuuggugcucguugugagccugggagcaauuuccuuuuggaugugcucuaacgguucguuacagugccggauauguaucuga

SEQ ID NO: 133731 - RNA, 1701 nt, Artificial Sequence
  derived and/or modified CDS sequence (opt3) from hemagglutinin__InfluenzaA__ADM31538
augaaggccauccuggugguccuccuuuacaccuucgcuacagcaaacgccgacacucugugcauuggcuaucacgcgaauaacagcacggauaccguugacacaguguuggagaaaaauguaacugugacccauuccgucaacuuacuggaagauaagcacgacgggaaacuauguaagcucagaggaguggcuccccugcaucuugguaaaugcaauauagccggcuggauccuggggaacccugagugugaaucuuugucaacagcaaguagcugguccuacauuguugagaccucuucgucagauaauggaacuugcuauccaggcgacuuuaucgauuacgaggagcucagggagcagcugagcaguguguccucuuucgaacgguuugagauuuucccgaagacaagcuccuggcccaaccacgacucaaauaagggugucaccgccgcuuguccucaugcaggggccaaaaguuuuuauaagaaccugaucuggcucgugaaaaagggaaauagcuacccaaaauuaucuaaguccuauauaaacgauaagggcaaagaaguacugguucuuuggggcauccaccaccccucaacgagcgcugaccaacagaguuuguaccagaaugccgaugcguacguguucgucgggacuucucgcuauuccaagaaauuuaagccugagauugcaauccgaccaaaagugcgugaccaggagggaagaaugaacuacuauuggacccugguggaacccggugauaagauuacauucgaggccacuggcaaucuagucguuccuagguacgcuuuugccauggaacggaacgcagggagcggaaucauaauuucggacaccccagugcaugacugcaacacaaccugucaaacgccgaaaggcgcuaucaauacuucucuccccuuccagaacauucacccuaucacaaucgguaagugcccaaaguauguaaaauccaccaagcugcgccuugccacugggcugagaaauauucccucaauacagaguaggggauuguuuggcgcgaucgccggcuucauugaagggggauggacagguaugguggauggcugguacggguaucaucaccagaacgaacaaggaagcggcuacgcagcugaccucaaauccacccagaaugccaucgauaagauaacgaacaaagucaauucugugauugagaagaugaacacccaguuuacagcuguugguaaggaguucaaucaccuggaaaaacggaucgagaacuuaaauaagaaaguggacgauggguuccuggacaucuggacuuacaacgccgaacuccuuguccuguuggagaaugaacgcacccuagauuaucaugacagcaacgugaagaaucuguacgagaaaguacgaucacagcucaagaacaacgcaaaggagauuggcaauggauguuuugaguucuaucacaaaugcgauaacacauguauggaaaguguuaagaauggcacuuacgacuauccuaaauacuccgaagaggccaagcugaacagagaagagaucgauggggugaaacuugagagcaccaggauuuaucaaauacuggcuaucuacucuacagucgcgucaaguuuggugcucgucgugagccugggagcaauuuccuuuuggaugugcucuaaugguucguuacagugccggaucuguaucuga

SEQ ID NO: 133732 - RNA, 1701 nt, Artificial Sequence
  derived and/or modified CDS sequence (opt3) from hemagglutinin__InfluenzaA__ADM31548
augaaggccauccuggugguccuccuuuacaccuucgcuacagcaaacgccgacacucugugcauuggcuaucacgcgaauaacagcacggauaccguugacacaguguuggagaaaaauguaacugugacccauuccgucaacuuacuggaagauaagcacaaugggaaacuauguaagcucagaggaguggcuccccugcaucuugguaaaugcaacauagccggcuggauccuggggaauccugagugugaaucuuugucaacagcaaguagcugguccuacauuguugagaccucuucgucagacaacggaacuugcuauccaggcgauuuuaucgacuacgaggagcucagggagcagcugagcaguguguccucuuucgaacgguuugagauuuucccgaagacaagcuccuggcccaaucacgauucaaacaagggugucaccgccgcuuguccucaugcaggggccaaaaguuuuuauaagaaucugaucuggcucgugaaaaagggaaacagcuacccaaaauuaucuaaguccuauauaaaugacaagggcaaagaaguacugguucuuuggggcauccaccaccccucaacgagcgcugaucaacagaguuuguaccagaacgccgacgcguacguguucgucgggacuucucgcuauuccaagaaauuuaagccugagguggcaauucgaccaaaagugcgugaucaggagggaagaaugaauuacuauuggacccuggucgaacccggugacaagaucacauucgaggccacuggcaaccuaguugugccuagguacgcuuuugccauggaacggaacgcagggagcggaauuaucauaucggauaccccaguacaugacugcaauacaaccugucaaacgccgaaaggcgcuauuaacacuucucuccccuuccagaauauccacccuauuacaaucgguaagugcccaaaguaugugaaauccaccaagcugcgccuugccacugggcugagaaacauccccucaauucagaguaggggauuguuuggcgcgauagccggcuucaucgaagggggauggacagguauggucgacggcugguacggguaucaucaccagaaugaacaaggaagcggcuacgcagcugaucucaaauccacccagaacgccauugacgagaucacgaauaaggugaacucuguuauagagaaaaugaauacccaguuuacagcuguggguaaggaguucaaccaccuggaaaagcggauugaaaauuuaaacaaaaaggucgaugacggguuccuggauaucuggacuuacaaugccgagcuccuugugcuguuggaaaacgagcgcacccuagacuaucaugauagcaauguaaagaaccuguacgagaagguucgaucacagcucaaaaacaaugcaaaggaaaucggcaacggauguuuugaguucuaucacaagugcgacaauacauguauggaaagugugaaaaacggcacuuacgauuauccuaaguacuccgaggaagccaaacugaauagagaggagauugacggggucaaacuugaaagcaccaggaucuaucaaauucuggcuauauacucuacaguggcgucaaguuugguccucgugguuagccugggagcaaucuccuuuuggaugugcucuaacgguucguuacagugccggauuuguaucuga

SEQ ID NO: 133733 - RNA, 1701 nt, Artificial Sequence
  derived and/or modified CDS sequence (opt3) from hemagglutinin__InfluenzaA__ADM31558
augaaggccauccuggugguccuccuuuacaccuucgcuacagcaaacgccgacacucugugcauuggcuaucacgcgaauaacagcacggauaccguugacacaguguuggagaaaaauguaacugugacccauuccgucaacuuacuggaagauaagcacaaugggaaacuauguaagcucagaggaguggcuccccugcaucuugguaaaugcaacauagccggcuggauccuggggaauccugagugugaaucuuugucaacagcaaguagcugguccuacauuguugagaccucuucgucagacaacggaacuugcuauccaggcgauuuuaucgacuacgaggagcucagggagcagcugagcaguguguccucuuucgaacgguuugagauuuucccgaagacaagcuccuggcccaaucacgauucaaacaagggugucaccgccgcuuguccucaugcaggggccaaaaguuuuuauaagaaucugaucuggcucgugaaaaagggaaacagcuacccaaaauuaucuaaguccuauauaaaugacaagggcaaagaaguacugguucuuuggggcauccaccaccccucaacgagcgcugaucaacagaguuuguaccagaacgccgacgcguacguguucgucgggacuucucgcuauuccaagaaauuuaagccugagauugcaauccgaccaaaagugcgugaucaggagggaagaaugaauuacuauuggacccugguggaacccggugacaagauuacauucgaggccacuggcaaccuagucguuccuagguacgcuuuugccauggaacggaacgcagggagcggaaucauaauuucggauaccccagugcaugacugcaauacaaccugucaaacgccgaaaggcgcuaucaacacuucucuccccuuccagaauauucacccuaucacaaucgguaagugcccaaaguauguaaaauccaccaagcugcgccuugccacugggcugagaaacauucccucaauacagaguaggggauuguuuggcgcgaucgccggcuucauugaagggggauggacagguaugguggacggcugguacggguaucaucaccagaaugaacaaggaagcggcuacgcagcugaucucaaauccacccagaacgccaucgacaagauaacgaauaaagucaacucugugauugagaagaugaauacccaguuuacagcuguugguaaggaguucaaccaccuggaaaaacggaucgagaauuuaaacaagaaaguggaugacggguuccuggauaucuggacuuacaaugccgaacuccuuguccuguuggagaacgaacgcacccuagacuaucaugauagcaaugugaagaaccuguacgagaaaguacgaucacagcucaagaacaaugcaaaggagauuagaaacggcuguuuugaguucuaucacaaaugcgacaauacauguauggaaaguguuaagaacggaacuuacgauuauccuaaauacuccgaagaggccaagcugaauagggaagagaucgacggcgugaaacuugagagcacccggauuuaucaaauacuggcuaucuacucuacagucgcgucaaguuuggugcucgucgugagccugggggcaauuuccuuuuggaugugcucuaacggaucguuacagugccguaucuguaucuga

SEQ ID NO: 133734 - RNA, 1701 nt, Artificial Sequence; identical to SEQ ID NO: 132314
  derived and/or modified CDS sequence (opt3) from hemagglutinin__InfluenzaA__ADM31568

SEQ ID NO: 133735 - RNA, 1701 nt, Artificial Sequence; identical to SEQ ID NO: 130717
  derived and/or modified CDS sequence (opt3) from hemagglutinin__InfluenzaA__ADM31578

SEQ ID NO: 133736 - RNA, 1701 nt, Artificial Sequence
  derived and/or modified CDS sequence (opt3) from hemagglutinin__InfluenzaA__ADM31588
augaaggccauccuggugguccuccuuuacaccuucgcuacagcaaacgccgacacucugugcauuggcuaucacgcgaauaacagcacggauaccguugacacaauauuggagaagaaugugacuguaacccauuccgugaacuuacuggaagauaagcacaaugggaaacuauguaagcucagaggagucgcuccccugcaucuugguaaaugcaacaucgccggcuggauucuggggaauccugagugugaaucuuugucaacagcaaguagcugguccuacaucguggagaccucuucgucagacaacggaacuugcuauccaggcgauuuuauugacuacgaggagcucagggagcagcugagcaguguuuccucuuucgaacgguuugagauguucccgaagacaagcuccuggcccaaucacgauucaaacaagggugugaccgccgcuuguccucaugcaggggccaaaaguuuuuauaagaaucugaucuggcucgucaaaaagggaaacagcuacccaaaauuaaauaagucuuauauaaacgacaagggcaaagaagugcugguacuuuggggcauccaccaccccuccacgucagcugaucaacagagcuuguaccagaaugccgacgcguacguuuucguggggacuagccgcuauucuaagaaauuuaagaccgagauugcaauccgaccuaaaguccgugaucaggagggaagaaugaacuacuauuggacacugguggaaccaggugacaagauuacuuucgaggccaccggcaaccuagugguccccagguacgcuuuugccauggaacggaaugcaggguccggaaucauaauuagcgauacaccuguucaugacugcaacaccacgugucaaacuccaaaaggcgcuaucaauacaucgcucccguuccagaacauucaccccaucaccaucgguaagugcccuaaguaugugaaaucuacuaagcugcgccuugccacagggcugagaaauguaccauccauucagucaaggggauuguuuggcgcgauagccggcuucaucgaagggggauggaccgguaugguggacggcugguacggguaucaucaccagaacgaacaaggaaguggcuacgcagcugaucucaaaagcacgcagaaugccauugacgagaucaccaacaaggucaauuccgugauagagaaaaugaacacacaguuuacugcuguugguaaggaguucaaucaccuggaaaagcggauugaaaacuuaaauaaaaagguggaugacggguuccuggauaucuggaccuacaacgccgagcuccuuguccuguuggaaaaugagcgcacacuagacuaucaugauucuaacgugaaaaaccuguacgagaagguacgaagccagcucaaaaauaacgcaaaggaaguuggcaauggauguuuugaguucuaucacaagugcgacaacacuuguauggaaucagugaaaaauggcaccuacgauuaucccaaguacagugaggaagccaaacugaacagagaggagaucgacggggucaaacuugaauccacaaggauuuaucaaauccuggcuauuuacagcaccguggcgucuucauugguccucgugguuagucugggagcaauaaguuuuuggaugugcuccaaugguucuuuacagugccggaucuguauuuga

SEQ ID NO: 133737 - RNA, 1701 nt, Artificial Sequence
  derived and/or modified CDS sequence (opt3) from hemagglutinin__InfluenzaA__ADM31598
augaacgccauccuggugguccuccuuuacaccuucgcuacagcaaaugccgacacucugugcauuggcuaucacgcgaacaauagcacggauaccguugacacauuguuagagaagaacgugacuguaacccauuccgugaaucugcuagaagauaaacacaacgggaagcucuguaaacugagaggagucgcuccccuucaucuggguaagugcgacauagccggcuggaucuuggggaauccugagugugaaucucucucaacagcaaguagcugguccuacauuguggagaccucuucgucagauaacggaacuugcuauccaggcgacuuuaucgauuacgaggagcugagggagcagcugagcaguguuuccucuuucgaacgguuugagauuuucccgaaaacaagcuccuggcccgaccacgauucaaauaagggugugaccgccgcuuguccucaugcaggggccaagaguuuuuauaaaaaccucaucugguuagucaagaaaggaaauagcuacccaaagcugucuaaauccuauauaaacgacaagggcaaggaagugcuuguauuguggggcauccaccaccccucaacgagcgcugaucaacagagucuguaccagaaugccgacgcguacguuuucguggggacuucucgcuauuccaaaaaguuuaaaccugagauugcaauccgaccaaagguccgugaucaggagggaagaaugaacuaccauuggacccuaguggaacccggugacaaaauuacauucgaggccacuggcaaucucguggucccuagguaugcuuuugccauggaacggaacgcagggagcggaaucauaauuucggacgcuccaguucacgauugcaacaccacaugucaaaccccgaagggcgccaucaauacgucucugcccuuccagaacauucauccuaucacuaucgguaaaugcccaaaguacgugaaguccacaaaacuucgccuggcgaccggguugagaaauguacccucaauucagaguaggggacucuuuggcgccauagcaggcuucaucgaagggggauggacugguaugguggacggcugguauggguaccaccaccagaacgaacaaggaagcggcuaugcugccgaucugaaguccacacagaaugcuauugacgagaucaccaacaaaauaaauucugucauugagaagaugaacacgcaguuuaccgccguggguaaagaguucaaucauuuagaaaagcggaucgaaaaccugaauaagaaaguugaugacggguuccucgauaucuggacauacaacgcagagcuucugguguugcuagaaaaugagcgcacucuggacuaccacgauagcaacgucaagaaucucuaugagaaagugcgaucacagcugaagaacaacgccaaagaaauuggcaauggauguuuugaguucuaccauaagugcgacaacaccuguauggaaaguguaaagaauggcacauaugauuacccuaaauauuccgaggaagcuaaacuuaacagagaggagaucgacgggguuaagcuggaaagcacuaggauuuaccaaauauuggcgaucuauucuaccguggcaucaagucucguccugguggucagcuuaggagccauuuccuuuuggaugugcucuaaugguucgcugcagugccggaucuguaucuga

SEQ ID NO: 133738 - RNA, 1701 nt, Artificial Sequence
  derived and/or modified CDS sequence (opt3) from hemagglutinin__InfluenzaA__ADM31608
augaaggccauccuggugguccuccuuuacaccuucgcuacaguuaacgcagacacucugugcauuggcuaucacgccaauaacagcacggauaccguggacacaguauuggagaaaaaugugacugucacccauuccgugaacuuacuggaagauaagcacaaugggaaacuauguaagcucagaggaguugcgccccugcaucuugguaaaugcaacauagcuggcuggauccuggggaauccugagugugaaucuuugucaacagccaguagcugguccuacauuguggagaccucuucgucagacaacggaacuugcuauccaggcgauuuuaucgacuacgaggagcucagggagcagcugagcagugucuccucuuucgaacgguuugagauuuucccgaagacaagcuccuggcccaaucacgauucaaacaagggugugaccgcagccuguccucaugcuggggcaaaaaguuuuuauaagaaucugaucuggcucguuaaaaagggaaacagcuacccaaaauuaucuaaguccuauauaaaugacaagggcaaagaaguacuggugcuuuggggcauccaccaccccucaacgagcgccgaucaacagaguuuguaccagaacgcugacgccuacgucuucguggggacuucucgcuauuccaagaaauuuaagccugagauugcgauccgaccaaaagugcgugaucaggagggaagaaugaauuacuauuggacccuggucgaacccggugacaagauuacauucgaggcaacuggcaaccuaguugugccuagguacgccuuugcuauggaacggaacgccgggagcggaaucauaauuucggauaccccaguacaugacugcaauacaaccugucaaacgccgaaaggcgcaaucaacacuucucuccccuuccagaauauucacccuaucacaaucgguaagugcccaaaguaugugaaauccaccaagcugcgccuugcuacugggcugagaaacguccccucaauucagaguaggggauuguuuggcgccauagcgggcuucaucgaagggggauggacagguaugguggacggcugguacggguaucaucaccagaaugaacaaggaagcggcuacgccgcagaucucaaauccacccagaacgcuauugacaagaucacgaauaaaguuaacucugugauagagaagaugaauacccaguuuacagccgucgguaaggaguucaaccaccuggaaaaacggauugagaauuuaaacaagaaaguggaugacggguuccuggauaucuggacuuacaaugcugaacuccuuguacuguuggagaacgaacgcacccuagacuaucaugauagcaauguuaagaaccuguacgagaaagugcgaucacagcucaagaacaaugccaaggagaucggcaacggauguuuugaguucuaucacaaaugcgacaauacauguauggaaagugucaagaacggcacuuacgauuauccuaaauacuccgaagaggcaaagcugaauagagaagagauugacggggugaaacuugagagcaccaggaucuaucaaauucuggccauauacucuacagucgcuucaaguuuggugcucguugugagccugggagcgaucuccuuuuggaugugcucuaacgguucguuacagugccggauuuguaucuga

SEQ ID NO: 133739 - RNA, 1701 nt, Artificial Sequence; identical to SEQ ID NO: 132269
  derived and/or modified CDS sequence (opt3) from hemagglutinin__InfluenzaA__ADM31618

SEQ ID NO: 133740 - RNA, 1701 nt, Artificial Sequence; identical to SEQ ID NO: 131881
  derived and/or modified CDS sequence (opt3) from hemagglutinin__InfluenzaA__ADM31628

SEQ ID NO: 133741 - RNA, 1701 nt, Artificial Sequence; identical to SEQ ID NO: 133620
  derived and/or modified CDS sequence (opt3) from hemagglutinin__InfluenzaA__ADM31638

SEQ ID NO: 133742 - RNA, 1701 nt, Artificial Sequence; identical to SEQ ID NO: 132137
  derived and/or modified CDS sequence (opt3) from hemagglutinin__InfluenzaA__ADM31648

SEQ ID NO: 133743 - RNA, 1701 nt, Artificial Sequence; identical to SEQ ID NO: 132884
  derived and/or modified CDS sequence (opt3) from hemagglutinin__InfluenzaA__ADM31658

SEQ ID NO: 133744 - RNA, 1701 nt, Artificial Sequence; identical to SEQ ID NO: 132137
  derived and/or modified CDS sequence (opt3) from hemagglutinin__InfluenzaA__ADM31668

SEQ ID NO: 133745 - RNA, 1701 nt, Artificial Sequence; identical to SEQ ID NO: 130717
  derived and/or modified CDS sequence (opt3) from hemagglutinin__InfluenzaA__ADM31688
